United States Patent Application Publication US 2018/0126003 A1 - sequence listing, part 67

SEQ ID NO: 120916 - DNA, 987 bp, Artificial Sequence
  derived and/or modified sequence
atgctggtgcggcggggggcccgggccggccccaggatgccccggggctggacagccctgtgcctgctgagcctgctgcccagcggcttcatgagcctggacaacaacggcacagccaccccagagctgcccacccagggcaccttcagcaatgtgtccaccaacgtgtcctaccaggagaccaccacccccagcaccctgggcagcaccagcctgcaccctgtgtcccagcacggcaatgaggccaccaccaacatcacagagaccaccgtgaagttcaccagcaccagcgtcatcacctctgtgtatggcaacaccaacagctctgtgcagagccagaccagcgtcatcagcacagtgttcaccaccccagccaacgtgtccaccccagagaccaccctgaagcccagcctgagccctggaaatgtgtctgacctgagcaccaccagcaccagcctggccaccagccccaccaagccctacaccagcagcagccccatcctgagtgacatcaaggccgagatcaagtgcagcggcatccgggaggtgaagctgacccagggcatctgcctggagcagaacaagaccagcagctgtgccgagttcaagaaggacagaggagagggcctggcccgggtgctgtgtggggaggagcaggctgatgctgatgctggggcccaggtgtgcagcctgctgctggcccagagcgaggtgcggccccagtgcctgctgctggtgctggccaacagaacagagatcagcagcaagctgcagctgatgaagaagcaccagagcgacctgaagaagctgggcatcctggacttcacagagcaggatgtggccagccaccagagctacagccagaagaccctcatcgccctggtgaccagcggggccctgctggccgtgctgggcatcaccggctacttcctgatgaacagaagatcctggagccccaccggggagcggctggagctggagccctag

SEQ ID NO: 120917 - DNA, 987 bp, Artificial Sequence
  derived and/or modified sequence
atgctggtgcggcggggcgcccgggccggcccccggatgccccggggatggacagccttatgcctgctgtccttgcttccttcagggttcatgtcccttgataataacggcactgctactcccgaactgcctacccagggcacattctcaaacgtcagcaccaatgtaagttatcaggagaccactactccatctacactaggcagcacctctctccaccctgtgtcacaacacggcaacgaggctaccactaatatcaccgagactaccgttaaattcaccagtacctcagtgatcacgtccgtttatggtaacacaaacagctcagtacagagccagacaagcgttatcagtaccgtgtttaccacacctgcaaacgtgtccacgccagaaacgaccttaaaaccttccctatcacccgggaatgtgtcagatcttagtactaccagtacaagcctggccaccagtccaactaaaccctacacttccagctccccaattctgtccgatatcaaagccgaaattaagtgctccgggatccgggaagtgaagcttacccaggggatctgtcttgagcagaacaagacatctagttgcgcagaattcaagaaggatcgcggtgagggtttggcaagagtcctctgcggcgaggaacaggcagacgccgatgccggagcacaggtatgctctctgctcctggcccagtcagaagtgcggccccagtgccttcttttggtgcttgcaaaccgcaccgagatttcttctaaacttcagcttatgaagaagcaccaatccgacctcaaaaagctaggcattctcgattttaccgaacaggatgtcgcaagccaccagtcctattcgcaaaaaacactgattgccctggttacatccggcgcccttctggccgtacttggcatcaccgggtactttttgatgaaccggcgctcctggagccctaccggcgaacgactggagcttgagccctag

SEQ ID NO: 120918 - DNA, 987 bp, Artificial Sequence
  derived and/or modified sequence
atgctggttagacgcggtgcgagagctgggccacgaatgccgagaggctggacagctttgtgcctgttatccctactgccctcaggatttatgtcactggacaataacggcacagcaaccccagagctgcctacacagggcacgttttcaaacgtttccacgaatgttagctaccaagaaaccaccacaccgagtaccctggggtccacatctctgcaccccgtctcccagcacgggaatgaggctactactaatatcaccgagaccaccgtcaagttcactagcacatctgtgatcacaagcgtgtacggtaatactaattcttccgtccagtcccagactagcgtgatcagcaccgtgtttacaacccctgccaatgtgagcacgccagaaacaaccctgaagcccagcctatcgccaggcaatgtttccgatctgtctactacttcaacaagcctagccacaagtcccacaaaaccgtacacaagtagtagccctattttgagcgacatcaaagcagagattaaatgttccggaatccgcgaggtgaaattgacgcaaggcatctgccttgaacaaaacaagacatcatcctgtgccgaatttaaaaaagacagaggtgagggtttggctagagtgctttgtggcgaggagcaggccgacgctgatgccggagcgcaggtttgcagtctcttgctggcccaatctgaagtgcgccctcagtgcctgcttcttgtacttgctaacagaactgagatcagcagtaaactccagcttatgaagaaacaccaaagcgaccttaaaaagctagggatccttgattttaccgagcaggatgttgcctcccaccagagttatagccagaagactttgattgcgctggtgacatccggcgcactattggcggttttgggtatcacaggttacttcctgatgaatcgaaggagctggagccctacaggcgaaagactcgaactagagccttag

SEQ ID NO: 120919 - DNA, 2874 bp, Artificial Sequence
  derived and/or modified sequence
aagaagtgggatggggcctctccagaaagctgaacgaggcatctggagcccgaacaaacctccaccttttttggcctcgacggcggcaacccagcctccctcctaacgccctccgcctttgggaccaaccaggggagctcaagttagtagcagccaaggagaggcgctgccttgccaagactaaaaagggaggggagaagagaggaaaaaagcaagaatcccccacccctctcccgggcggagggggcgggaagagcgcgtcctggccaagccgagtagtgtcttccactcggtgcgtctctctaggagccgcgcgggaaggatgctggtccgcaggggcgcgcgcgcagggcccaggatgccgcggggctggaccgcgctttgcttgctgagtttgctgccttctgggttcatgagtcttgacaacaacggtactgctaccccagagttacctacccagggaacattttcaaatgtttctacaaatgtatcctaccaagaaactacaacacctagtacccttggaagtaccagcctgcaccctgtgtctcaacatggcaatgaggccacaacaaacatcacagaaacgacagtcaaattcacatctacctctgtgataacctcagtttatggaaacacaaactcttctgtccagtcacagacctctgtaatcagcacagtgttcaccaccccagccaacgtttcaactccagagacaaccttgaagcctagcctgtcacctggaaatgtttcagacctttcaaccactagcactagccttgcaacatctcccactaaaccctatacatcatcttctcctatcctaagtgacatcaaggcagaaatcaaatgttcaggcatcagagaagtgaaattgactcagggcatctgcctggagcaaaataagacctccagctgtgcggagtttaagaaggacaggggagagggcctggcccgagtgctgtgtggggaggagcaggctgatgctgatgctggggcccaggtatgctccctgctccttgcccagtctgaggtgaggcctcagtgtctactgctggtcttggccaacagaacagaaatttccagcaaactccaacttatgaaaaagcaccaatctgacctgaaaaagctggggatcctagatttcactgagcaagatgttgcaagccaccagagctattcccaaaagaccctgattgcactggtcacctcgggagccctgctggctgtcttgggcatcactggctatttcctgatgaatcgccgcagctggagccccacaggagaaaggctggagctggaaccctgaccactcttcaggaagaaaggagtctgcacatgcagctgcaccctccctccgatccttcctcccacctccccctcccccttctcccacccctgcccccacttcctgtttgggcccctctcccatccagtgtctcacagccctgcttaccagataatgctactttatttatacactgtctagggcgaagacccttattacacggaaaacggtggaggccagggctatagctcaggacctgggacctcccctgaggctcagggaaaggccagtgtgaaccgaggggctcaggaaaacgggaccggccaggccacctccagaaacggccattcagcaagacaacacgtggtggctgataccgaattgtgactcggctaggtggggcaaggctgggcagtgtccgagagagcacccctctctgcatctgaccacgtgctacccccatgctggaggtgacatctcttacgcccaacccttccccactgcacacacctcagaggctgttcttggggccctacaccttgaggaggggcaggtaaactcctgtcctttacacattcggctccctggagccagactctggtcttctttgggtaaacgtgtgacgggggaaagccaaggtctggagaagctcccaggaacaatcgatggccttgcagcactcacacaggacccccttcccctaccccctcctctctgccgcaatacaggaacccccaggggaaagatgagcttttctaggctacaattttctcccaggaagctttgatttttaccgtttcttccctgtattttctttctctactttgaggaaaccaaagtaaccttttgcacctgctctcttgtaatgatatagccagaaaaacgtgttgccttgaaccacttccctcatctctcctccaagacactgtggacttggtcaccagctcctcccttgttctctaagttccactgagctccatgtgccccctctaccatttgcagagtcctgcacagttttctggctggagcctagaacaggcctcccaagttttaggacaaacagctcagttctagtctctctggggccacacagaaactctttttgggctcctttttctccctctggatcaaagtaggcaggaccatgggaccaggtcttggagctgagcctctcacctgtactcttccgaaaaatcctcttcctctgaggctggatcctagccttatcctctgatctccatggcttcctcctccctcctgccgactcctgggttgagctgttgcctcagtcccccaacagatgcttttctgtctctgcctccctcaccctgagccccttccttgctctgcacccccatatggtcatagcccagatcagctcctaacccttatcaccagctgcctcttctgtgggtgacccaggtccttgtttgctgttgatttctttccagaggggttgagcagggatcctggtttcaatgacggttggaaatagaaatttccagagaagagagtattgggtagatattttttctgaatacaaagtgatgtgtttaaatactgcaattaaagtgatactgaaacac

SEQ ID NO: 120920 - DNA, 987 bp, Artificial Sequence
  derived and/or modified sequence
atgctggtgagaagaggcgccagagccggccccagaatgcccagaggctggaccgccctgtgcctgctgagcctgctgcccagcggcttcatgagcctggacaacaacggcaccgccacccccgagctgcccacccagggcaccttcagcaacgtgagcaccaacgtgagctaccaggagaccaccacccccagcaccctgggcagcaccagcctgcaccccgtgagccagcacggcaacgaggccaccaccaacatcaccgagaccaccgtgaagttcaccagcaccagcgtgatcaccagcgtgtacggcaacaccaacagcagcgtgcagagccagaccagcgtgatcagcaccgtgttcaccacccccgccaacgtgagcacccccgagaccaccctgaagcccagcctgagccccggcaacgtgagcgacctgagcaccaccagcaccagcctggccaccagccccaccaagccctacaccagcagcagccccatcctgagcgacatcaaggccgagatcaagtgcagcggcatcagagaggtgaagctgacccagggcatctgcctggagcagaacaagaccagcagctgcgccgagttcaagaaggacagaggcgagggcctggccagagtgctgtgcggcgaggagcaggccgacgccgacgccggcgcccaggtgtgcagcctgctgctggcccagagcgaggtgagaccccagtgcctgctgctggtgctggccaacagaaccgagatcagcagcaagctgcagctgatgaagaagcaccagagcgacctgaagaagctgggcatcctggacttcaccgagcaggacgtggccagccaccagagctacagccagaagaccctgatcgccctggtgaccagcggcgccctgctggccgtgctgggcatcaccggctacttcctgatgaacagaagaagctggagccccaccggcgagagactggagctggagccctag

SEQ ID NO: 120921 - protein, 281 aa, Artificial Sequence
  derived and/or modified sequence
MSAQESCLSLIKYFLFVFNLFFFVLGSLIFCFGIWILIDKTSFVSFVGLAFVPLQIWSKVLAISGIFTMGIALLGCVGALKELRCLLGLYFGMLLLLFATQITLGILISTQRAQLERSLRDVVEKTIQKYGTNPEETAAEESWDYVQFQLRCCGWHYPQDWFQVLILRGNGSEAHRVPCSCYNLSATNDSTILDKVILPQLSRLGHLARSRHSADICAVPAESHIYREGCAQGLQKWLHNNLISIVGICLGVGLLELGFMTLSIFLCRNLDHVYNRLARYR

SEQ ID NO: 120922 - protein, 213 aa, Artificial Sequence
  derived and/or modified sequence
MGIALLGCVGALKELRCLLGLYFGMLLLLFATQITLGILISTQRAQLERSLRDVVEKTIQKYGTNPEETAAEESWDYVQFQLRCCGWHYPQDWFQVLILRGNGSEAHRVPCSCYNLSATNDSTILDKVILPQLSRLGHLARSRHSADICAVPAESHIYREGCAQGLQKWLHNNLISIVGICLGVGLLELGFMTLSIFLCRNLDHVYNRLARYR

SEQ ID NO: 120923 - protein, 270 aa, Artificial Sequence
  derived and/or modified sequence
MSAQESCLSLIKYFLFVFNLFFFVLGSLIFCFGIWILIDKTSFVSFVGLAFVPLQIWSKVLAISGIFTMGIALLGCVGALKELRCLLGLYFGMLLLLFATQITLGILISTQRAQLERSLRDVVEKTIQKYGTNPEETAAEESWDYVQFQLRCCGWHYPQDWFQVLILRGNGSEAHRVPCSCYNLSATNDSTILDKVILPQLSRLGHLARSRHSADICAVPAESHIYREGCAQGLQKWLHNNLISIVGICLGVGLLEVIWPRPHPRSALNP

SEQ ID NO: 120924 - DNA, 846 bp, Artificial Sequence
  derived and/or modified sequence
atgagcgctcaagaatcctgcttatctctcataaagtatttcctgttcgttttcaatctgttctttttcgtgctggggtccctgatattttgttttggtatctggattcttatagataagactagcttcgtgagctttgttggcctcgctttcgtccccctgcagatctggagtaaggtgcttgctatcagcggcatctttacaatgggcatcgctctcctcggatgcgtcggagccctcaaggagctgaggtgtttactgggactctacttcggtatgctgctcttgttgttcgctacacagatcaccttggggatactgatcagtactcaaagggcccaattggagcgcagcttgagggacgttgtagaaaaaacaatccaaaagtatggtaccaaccccgaagagaccgcagccgaggaatcttgggattatgtgcagttccagctccgatgttgtggatggcactacccgcaggattggtttcaagttctgattctgcgcggaaatgggagcgaagcccaccgagtcccttgctcctgttataacctaagcgctacaaacgacagcacaatcttagataaggtgatactcccacagctcagccggcttggccatctagcaaggtctagacacagcgcagatatctgcgctgttccagccgagtcacacatttatcgcgagggctgcgcccagggccttcagaaatggctgcataacaacctcatctccattgtgggtatctgcctgggggtcgggctacttgagctcggctttatgacactcagcatctttctgtgtagaaatctggaccacgtttacaatcgactagcaaggtatagatag

SEQ ID NO: 120925 - DNA, 471 bp, Artificial Sequence
  derived and/or modified sequence
atgagcgcgcaggaatcttgtttgagcctcatcaaatactttctgttcgttttcaacctgttctttttcgtgctggggagtctgatcttttgcttcggcatttggatcctgatagacaaaacaagctttgtatcttttgtcggactagccttcgtgccgctccagatctggagcaaagtgcttgccatctccggcatctttacaatggggatagcactactcggctgtgttggagccctcaaggagctgaggtgtttgctgggcctgtacttcggtatgctgcttcttttgtttgcgacccaaattaccctcggaattctgatctcaacccagcgcgcacagaaagatactcccacgtggaccaaaggcgacagacataagcaactgcagagagagacccatgggaagaaacgcgaacaggaaaaggaaatcgacgcactgaaggaggagacggagacttacgaaccctag

SEQ ID NO: 120926 - DNA, 813 bp, Artificial Sequence
  derived and/or modified sequence
atgtccgcccaggaatcatgtctgagcctaatcaagtattttctcttcgtatttaaccttttcttcttcgtactggggagcttgattttttgttttggcatatggatattgatagacaagaccagttttgtttcatttgttggactcgctttcgttccgctacaaatctggtctaaggtgttggccattagtgggatctttacaatgggtatcgcactgttgggttgcgtgggagccctcaaggaactgaggtgtttgctgggtctgtacttcgggatgcttttgttgttgttcgctactcagattactctgggcatacttatttcaacgcaaagggcccaactcgaaaggtctctgcgagacgtcgtggaaaaaacgatacagaagtacgggacgaaccctgaggagaccgccgctgaagagtcatgggactacgtgcagttccaactccggtgctgtggctggcattacccccaggactggttccaggttctgatactccgcggcaacggtagcgaagcacatagggtgccctgcagttgttacaatctcagtgcgacaaacgactccaccatcctggacaaggttattctcccacagttgtctcggctcgggcacctggcacgctcgaggcactccgccgatatctgtgcagtccccgctgagtcccatatttatagggagggctgtgcccagggactccaaaagtggctgcataataacctcatctccatagtcgggatttgtctcggcgtgggactgctggaggtgatatggccacggccccacccacggtcagccctgaacccctag

SEQ ID NO: 120927 - DNA, 846 bp, Artificial Sequence
  derived and/or modified sequence
atgtctgcccaggagagctgcctgagcctcatcaagtacttcctgtttgtgttcaacctcttcttctttgtgctgggcagcctcatcttctgcttcggcatctggatcctgattgacaagaccagctttgtgtcctttgtgggcctggcctttgtgcccctgcagatctggagcaaggtgctggccatcagcggcatcttcaccatgggcatcgccctgctgggctgtgtgggcgccctgaaggagctgcgctgcctgctgggcctgtacttcggcatgctgctgctgctgtttgccacccagatcaccctgggcatcctgatcagcacccagagggcccagctggagaggagcctgagagatgtggtggagaagaccatccagaagtatggcaccaaccctgaggagacagctgctgaggagagctgggactatgtgcagttccagctgcgctgctgcggctggcactacccccaggactggttccaggtgctgatcctgcggggaaatggcagcgaggcccaccgggtgccctgcagctgctacaacctgagcgccaccaatgacagcaccatcctggacaaggtgatcctgccccagctgagccggctgggccacctggcccggagccgccacagcgctgacatctgtgctgtgcctgctgagagccacatctaccgggagggctgtgcccagggcctgcagaagtggctgcacaacaacctgatcagcatcgtgggcatctgcctgggcgtgggcctgctggagctgggcttcatgaccctgagcatcttcctgtgcaggaacctggaccacgtgtacaaccggctggcccgctacagatag

SEQ ID NO: 120928 - DNA, 471 bp, Artificial Sequence
  derived and/or modified sequence
atgtctgcccaggagagctgcctgagcctcatcaagtacttcctgtttgtgttcaacctcttcttctttgtgctgggcagcctcatcttctgcttcggcatctggatcctgattgacaagaccagctttgtgtcctttgtgggcctggcctttgtgcccctgcagatctggagcaaggtgctggccatcagcggcatcttcaccatgggcatcgccctgctgggctgtgtgggcgccctgaaggagctgcgctgcctgctgggcctgtacttcggcatgctgctgctgctgtttgccacccagatcaccctgggcatcctgatcagcacccagagggcccagaaggacacccccacctggaccaagggggacagacacaagcagctgcagcgggagacccacggcaagaagcgggagcaggagaaggagattgatgccctgaaggaggagacagagacctatgagccctag

SEQ ID NO: 120929 - DNA, 813 bp, Artificial Sequence
  derived and/or modified sequence
atgtctgcccaggagagctgcctgagcctcatcaagtacttcctgtttgtgttcaacctcttcttctttgtgctgggcagcctcatcttctgcttcggcatctggatcctgattgacaagaccagctttgtgtcctttgtgggcctggcctttgtgcccctgcagatctggagcaaggtgctggccatcagcggcatcttcaccatgggcatcgccctgctgggctgtgtgggcgccctgaaggagctgcgctgcctgctgggcctgtacttcggcatgctgctgctgctgtttgccacccagatcaccctgggcatcctgatcagcacccagagggcccagctggagaggagcctgagagatgtggtggagaagaccatccagaagtatggcaccaaccctgaggagacagctgctgaggagagctgggactatgtgcagttccagctgcgctgctgcggctggcactacccccaggactggttccaggtgctgatcctgcggggaaatggcagcgaggcccaccgggtgccctgcagctgctacaacctgagcgccaccaatgacagcaccatcctggacaaggtgatcctgccccagctgagccggctgggccacctggcccggagccgccacagcgctgacatctgtgctgtgcctgctgagagccacatctaccgggagggctgtgcccagggcctgcagaagtggctgcacaacaacctgatcagcatcgtgggcatctgcctgggcgtgggcctgctggaggtgatctggccccggccccaccccaggtctgccctgaacccctag

SEQ ID NO: 120930 - DNA, 846 bp, Artificial Sequence
  derived and/or modified sequence
atgagcgcccaggagagctgcctgagcctgatcaagtacttcctgtttgttttcaacctttttttctttgtcctcggctcacttattttctgtttcggtatatggattctgatagacaagacatcttttgtgtcttttgtaggattagctttcgtgcccctgcagatttggagtaaagtgttggctatttctgggatcttcaccatgggcatcgcactcttggggtgcgtaggagctctgaaggagctaaggtgcctgctcgggttgtatttcggtatgttgctgctgcttttcgcaacccaaatcacactcgggattctaattagcactcagcgcgcccagctcgagaggtcgctgcgggatgttgtggaaaagacaatccaaaagtatgggacaaacccagaggagacagccgcagaggagtcctgggattatgttcagttccagctgcggtgttgtggatggcactatccacaggattggtttcaggtgctcattctgcgaggcaacggtagtgaggcccacagggttccgtgttcctgttacaatctgtcagcaaccaacgatagtaccatcctggacaaggtgatactaccacagctgtctcgtttgggccacctggccaggtctaggcactccgcagatatctgtgccgtccctgccgagtctcatatttatcgggagggttgcgcacaggggctgcagaagtggttgcacaacaatctgatcagtatagtgggcatctgtctcggcgtgggtctgctggaacttggcttcatgacactcagcattttcctgtgtcggaacctggatcacgtctacaacagactggccagatacaggtag

SEQ ID NO: 120931 - DNA, 471 bp, Artificial Sequence
  derived and/or modified sequence
atgagcgcccaggagagctgcctgagcctgatcaagtacttcctgtttgtctttaacttatttttcttcgtcttagggagccttatattttgcttcgggatatggatcctcatcgacaaaacaagtttcgtctcattcgtcggactggcctttgtaccactgcagatatggtctaaggtgcttgcgatatccgggatctttacaatgggcatagctctacttggctgcgtgggggcattgaaggagctccggtgcctgttaggcctgtacttcggaatgcttctgctcctctttgccacccagatcacccttggcattttgatctcaactcagcgggcacagaaggatacacctacttggactaagggagaccgacacaaacagctccagcgtgaaacccacggcaagaagagggaacaggaaaaggaaatcgatgctctaaaggaagaaacagagacgtacgaaccttag

SEQ ID NO: 120932 - DNA, 813 bp, Artificial Sequence
  derived and/or modified sequence
atgagcgcccaggagagctgcctgagcctgatcaagtacttcctgtttgtcttcaatctctttttcttcgtgcttggcagcttgatcttttgcttcgggatttggattctgatagataaaacctcctttgtctcctttgttggtttagcattcgtgcctcttcaaatctggtcaaaagttctggccatctccggcatctttactatggggattgctcttttaggatgtgtcggggccctgaaggaacttaggtgtctgttgggattgtacttcggcatgctcctactcctgtttgcgactcagattacgttgggaattctgatctccactcaacgggcacaattagaaaggagtctgagagacgtggttgaaaagaccatccagaagtacggaacaaaccctgaggagaccgccgctgaggaatcttgggactatgtccagttccaattgcgatgttgtggttggcactacccgcaggattggttccaggtgctaatactgcggggaaacgggagtgaagcgcatagagtcccctgttcctgttacaacctgagtgctaccaatgacagtactattctcgataaggtaatactgccccagttgagcagattgggtcacctggcgcgatcccgacacagcgctgatatctgtgcggtcccggcggaatcccatatctatcgcgagggctgcgctcaaggactgcaaaagtggctgcataataacctgatctcaatcgtgggaatttgcctgggggtgggcttgttagaggtgatctggccgcggcctcatccacggtcggctctgaatccgtag

SEQ ID NO: 120933 - DNA, 846 bp, Artificial Sequence
  derived and/or modified sequence
atgtccgcccaggaaagttgcctatctcttataaaatactttctgttcgtgtttaatctgttcttttttgtcctcgggtcgcttatattctgcttcggaatttggattctcatcgacaagacttcatttgttagcttcgtcggcttagcatttgttcccctgcagatctggagtaaagttctcgcaattagtgggatcttcacgatggggattgctttactgggctgcgtgggcgctttaaaggaactgagatgcctgctgggtttgtactttggtatgctcctcttgctgttcgctacgcagatcaccctgggcatcctgatctccactcagcgggcacaactggaaaggtctctgcgcgatgtggtggagaagaccatccaaaagtatggaactaacccggaggagacagctgccgaagagagctgggactacgtccaatttcagctgcgatgctgtggctggcactatccccaggactggttccaagttctcatcctgagagggaatggctctgaagcccaccgcgtgccatgcagttgttataacctatccgcaaccaacgattccacaatcttagataaagtgattttgccacagctgtcccggctcggccacctagcgcgatccaggcactctgcggatatctgcgccgtcccagcagagtcgcacatttatcgcgagggatgtgctcaggggctccagaagtggttgcacaataacctcattagcattgtgggtatctgtctgggggtgggcttgctggagttgggttttatgactcttagtatattcctgtgccggaatttggatcatgtctacaataggttggcgaggtaccgctag

SEQ ID NO: 120934 - DNA, 471 bp, Artificial Sequence
  derived and/or modified sequence
atgagcgctcaagagtcatgcctgagtctgattaaatactttctgttcgtttttaacctctttttctttgtattggggtccctaatcttctgctttggcatctggatactgatcgacaagacgtccttcgttagcttcgttgggctcgcttttgtgcctctgcagatctggtccaaagtactggcaatcagcggaatcttcactatgggtatcgccttgctgggctgcgtgggagccctgaaggaactgcggtgtctcctcgggctttattttgggatgcttcttttactgttcgcaacacaaattactctcggtatcctcattagtactcagagagcccaaaaggacactcctacatggacaaagggggatcggcacaagcagctccagcgcgagactcatggcaaaaagcgcgagcaggagaaggagattgacgcactgaaagaggagacagaaacatacgagccatag

SEQ ID NO: 120935 - DNA, 813 bp, Artificial Sequence
  derived and/or modified sequence
atgtctgcccaagaaagttgtctctccctgatcaaatactttctctttgtctttaatttatttttcttcgtgttgggaagcctcatcttctgttttgggatttggattctgatcgataagactagcttcgtttctttcgtcggcctcgcctttgtcccccttcagatatggtctaaggttctagccatctcgggaattttcaccatggggattgccctccttggctgtgtaggcgctcttaaggagctccggtgtctgctggggttgtacttcggtatgctgttgttgctctttgctacccaaattactctgggtattttgattagcacccagcgcgctcagctggagcggagtctccgcgacgtggttgagaagacaatacagaagtacgggacaaaccctgaagagaccgcagctgaagagtcttgggactatgtccagttccagctgcgctgctgtgggtggcactacccccaggattggtttcaggtcctgatcttacgcggtaacggttctgaggcccaccgggtcccctgctcatgctataatttatccgccacaaatgatagtacaattcttgataaagtaattctcccccagctcagtaggctgggacatcttgctcggtcccgccactcagccgatatatgcgccgttcctgctgagtcacatatctatagagaaggttgtgcgcagggccttcaaaagtggttacacaacaatttgatttctattgtcggaatttgcttgggtgtcggactgcttgaagttatttggcctaggccacaccctagaagcgccctcaacccatag

SEQ ID NO: 120936 - DNA, 1241 bp, Artificial Sequence
  derived and/or modified sequence
ttcctttctctctcagctctccgtctctctttctctctcagcctctttctttctccctgtctcccccactgtcagcacctcttctgtgtggtgagtggaccgcttaccccactaggtgaagatgtcagcccaggagagctgcctcagcctcatcaagtacttcctcttcgttttcaacctcttcttcttcgtcctcggcagcctgatcttctgcttcggcatctggatcctcattgacaagaccagcttcgtgtcctttgtgggcttggccttcgtgcctctgcagatctggtccaaagtcctggccatctcaggaatcttcaccatgggcatcgccctcctgggttgtgtgggggccctcaaggagctccgctgcctcctgggcctgtattttgggatgctgctgctcctgtttgccacacagatcaccctgggaatcctcatctccactcagcgggcccagctggagcgaagcttgcgggacgtcgtagagaaaaccatccaaaagtacggcaccaaccccgaggagaccgcggccgaggagagctgggactatgtgcagttccagctgcgctgctgcggctggcactacccgcaggactggttccaagtcctcatcctgagaggtaacgggtcggaggcgcaccgcgtgccctgctcctgctacaacttgtcggcgaccaacgactccacaatcctagataaggtgatcttgccccagctcagcaggcttggacacctggcgcggtccagacacagtgcagacatctgcgctgtccctgcagagagccacatctaccgcgagggctgcgcgcagggcctccagaagtggctgcacaacaaccttatttccatagtgggcatttgcctgggcgtcggcctactcgagctcgggttcatgacgctctcgatattcctgtgcagaaacctggaccacgtctacaaccggctcgctcgataccgttaggccccgccctccccaaagtcccgccccgcccccgtcacgtgcgctgggcacttccctgctgcctgtaaatatttgtttaatccccagttcgcctggagccctccgccttcacattcccctggggacccacgtggctgcgtgcccctgctgctgtcacctctcccacgggacctggggctttcgtccacagcttcctgtccccatctgtcggcctaccaccacccacaagattatttttcacccaaacctcaaataaatcccctgcgtttttggt

SEQ ID NO: 120937 - DNA, 1207 bp, Artificial Sequence
  derived and/or modified sequence
ttcctttctctctcagctctccgtctctctttctctctcagcctctttctttctccctgtctcccccactgtcagcacctcttctgtgtggtgagtggaccgcttaccccactaggtgaagatgtcagcccaggagagctgcctcagcctcatcaagtcctcggcagcctgatcttctgcttcggcatctggatcctcattgacaagaccagcttcgtgtcctttgtgggcttggccttcgtgcctctgcagatctggtccaaagtcctggccatctcaggaatcttcaccatgggcatcgccctcctgggttgtgtgggggccctcaaggagctccgctgcctcctgggcctgtattttgggatgctgctgctcctgtttgccacacagatcaccctgggaatcctcatctccactcagcgggcccagctggagcgaagcttgcgggacgtcgtagagaaaaccatccaaaagtacggcaccaaccccgaggagaccgcggccgaggagagctgggactatgtgcagttccagctgcgctgctgcggctggcactacccgcaggactggttccaagtcctcatcctgagaggtaacgggtcggaggcgcaccgcgtgccctgctcctgctacaacttgtcggcgaccaacgactccacaatcctagataaggtgatcttgccccagctcagcaggcttggacacctggcgcggtccagacacagtgcagacatctgcgctgtccctgcagagagccacatctaccgcgagggctgcgcgcagggcctccagaagtggctgcacaacaaccttatttccatagtgggcatttgcctgggcgtcggcctactcgagctcgggttcatgacgctctcgatattcctgtgcagaaacctggaccacgtctacaaccggctcgctcgataccgttaggccccgccctccccaaagtcccgccccgcccccgtcacgtgcgctgggcacttccctgctgcctgtaaatatttgtttaatccccagttcgcctggagccctccgccttcacattcccctggggacccacgtggctgcgtgcccctgctgctgtcacctctcccacgggacctggggctttcgtccacagcttcctgtccccatctgtcggcctaccaccacccacaagattatttttcacccaaacctcaaataaatcccctgcgtttttggt

SEQ ID NO: 120938 - DNA, 1571 bp, Artificial Sequence
  derived and/or modified sequence
actaggtgaagatgtcagcccaggagagctgcctcagcctcatcaagtacttcctcttcgttttcaacctcttcttcttcgtcctcggcagcctgatcttctgcttcggcatctggatcctcattgacaagaccagcttcgtgtcctttgtgggcttggccttcgtgcctctgcagatctggtccaaagtcctggccatctcaggaatcttcaccatgggcatcgccctcctgggttgtgtgggggccctcaaggagctccgctgcctcctgggcctgtattttgggatgctgctgctcctgtttgccacacagatcaccctgggaatcctcatctccactcagcgggcccagctggagcgaagcttgcgggacgtcgtagagaaaaccatccaaaagtacggcaccaaccccgaggagaccgcggccgaggagagctgggactatgtgcagttccagctgcgctgctgcggctggcactacccgcaggactggttccaagtcctcatcctgagaggtaacgggtcggaggcgcaccgcgtgccctgctcctgctacaacttgtcggcgaccaacgactccacaatcctagataaggtgatcttgccccagctcagcaggcttggacacctggcgcggtccagacacagtgcagacatctgcgctgtccctgcagagagccacatctaccgcgagggctgcgcgcagggcctccagaagtggctgcacaacaaccttatttccatagtgggcatttgcctgggcgtcggcctactcgaggtgatctggccccgcccccacccgcgatcggccctaaatccctagatggccctgcccttcatttcgcgtccttcggttgcctgggaaggacgagctcagggcggagcgcagcccaccccggccctcccgccgctccacccagcaccggagggtgggggcggcccagcttcagggagccctgattgggtgtacgcagggaaagcctcctgctattggctgcgatctccctcccctttctccgcagatgactgtcatggtgctgagcgtacagctacagcgcagggcactccgccggaaatgcgagccgcacgtgccgggcgctggggattcgagccccgggcccagcctgatcgctgacggcggcggcgggcacagcggcagtctgtggggtggctggggcatggcgggtgcctgccccaactggggagacaaggcaccgcagggcaagctgcccatggccctggggctctggccgctgtgggttcaagacgaggaccagcctgacactggaagtgcgggcgcagaattagaggaggcacaattagaggctgaggcagagggggaagacagatgagcctccaaaataaaggaccctgggcttgcttccgaccttactccttctcagcctctacccccacttgtagcagctattcccgcctcatcagccagccctgcggcagttcccgtcgagccccgcccttttctacctatccccttctccagccccttcccgcccaattcacggccccacccctgacctttctcgcccgggtgggcatcacccccgtctcg

SEQ ID NO: 120939 - DNA, 846 bp, Artificial Sequence
  derived and/or modified sequence
atgagcgcccaggagagctgcctgagcctgatcaagtacttcctgttcgtgttcaacctgttcttcttcgtgctgggcagcctgatcttctgcttcggcatctggatcctgatcgacaagaccagcttcgtgagcttcgtgggcctggccttcgtgcccctgcagatctggagcaaggtgctggccatcagcggcatcttcaccatgggcatcgccctgctgggctgcgtgggcgccctgaaggagctgagatgcctgctgggcctgtacttcggcatgctgctgctgctgttcgccacccagatcaccctgggcatcctgatcagcacccagagagcccagctggagagaagcctgagagacgtggtggagaagaccatccagaagtacggcaccaaccccgaggagaccgccgccgaggagagctgggactacgtgcagttccagctgagatgctgcggctggcactacccccaggactggttccaggtgctgatcctgagaggcaacggcagcgaggcccacagagtgccctgcagctgctacaacctgagcgccaccaacgacagcaccatcctggacaaggtgatcctgccccagctgagcagactgggccacctggccagaagcagacacagcgccgacatctgcgccgtgcccgccgagagccacatctacagagagggctgcgcccagggcctgcagaagtggctgcacaacaacctgatcagcatcgtgggcatctgcctgggcgtgggcctgctggagctgggcttcatgaccctgagcatcttcctgtgcagaaacctggaccacgtgtacaacagactggccagatacagatag

SEQ ID NO: 120940 - DNA, 471 bp, Artificial Sequence
  derived and/or modified sequence
atgagcgcccaggagagctgcctgagcctgatcaagtacttcctgttcgtgttcaacctgttcttcttcgtgctgggcagcctgatcttctgcttcggcatctggatcctgatcgacaagaccagcttcgtgagcttcgtgggcctggccttcgtgcccctgcagatctggagcaaggtgctggccatcagcggcatcttcaccatgggcatcgccctgctgggctgcgtgggcgccctgaaggagctgagatgcctgctgggcctgtacttcggcatgctgctgctgctgttcgccacccagatcaccctgggcatcctgatcagcacccagagagcccagaaggacacccccacctggaccaagggcgacagacacaagcagctgcagagagagacccacggcaagaagagagagcaggagaaggagatcgacgccctgaaggaggagaccgagacctacgagccctag

SEQ ID NO: 120941 - DNA, 813 bp, Artificial Sequence
  derived and/or modified sequence
atgagcgcccaggagagctgcctgagcctgatcaagtacttcctgttcgtgttcaacctgttcttcttcgtgctgggcagcctgatcttctgcttcggcatctggatcctgatcgacaagaccagcttcgtgagcttcgtgggcctggccttcgtgcccctgcagatctggagcaaggtgctggccatcagcggcatcttcaccatgggcatcgccctgctgggctgcgtgggcgccctgaaggagctgagatgcctgctgggcctgtacttcggcatgctgctgctgctgttcgccacccagatcaccctgggcatcctgatcagcacccagagagcccagctggagagaagcctgagagacgtggtggagaagaccatccagaagtacggcaccaaccccgaggagaccgccgccgaggagagctgggactacgtgcagttccagctgagatgctgcggctggcactacccccaggactggttccaggtgctgatcctgagaggcaacggcagcgaggcccacagagtgccctgcagctgctacaacctgagcgccaccaacgacagcaccatcctggacaaggtgatcctgccccagctgagcagactgggccacctggccagaagcagacacagcgccgacatctgcgccgtgcccgccgagagccacatctacagagagggctgcgcccagggcctgcagaagtggctgcacaacaacctgatcagcatcgtgggcatctgcctgggcgtgggcctgctggaggtgatctggcccagaccccaccccagaagcgccctgaacccctag

SEQ ID NO: 120942 - protein, 300 aa, Artificial Sequence
  derived and/or modified sequence
MANCEFSPVSGDKPCCRLSRRAQLCLGVSILVLILVVVLAVVVPRWRQQWSGPGTTKRFPETVLARCVKYTEIHPEMRHVDCQSVWDAFKGAFISKHPCNITEEDYQPLMKLGTQTVPCNKILLWSRIKDLAHQFTQVQRDMFTLEDTLLGYLADDLTWCGEFNTSKINYQSCPDWRKDCSNNPVSVFWKTVSRRFAEAACDVVHVMLNGSRSKIFDKNSTFGSVEVHNLQPEKVQTLEAWVIHGGREDSRDLCQDPTIKELESIISKRNIQFSCKNIYRPDKFLQCVKNPEDSSCTSEI

SEQ ID NO: 120943 - protein, 160 aa, Artificial Sequence
  derived and/or modified sequence
MANCEFSPVSGDKPCCRLSRRAQLCLGVSILVLILVVVLAVVVPRWRQQWSGPGTTKRFPETVLARCVKYTEIHPEMRHVDCQSVWDAFKGAFISKHPCNITEEDYQPLMKLGTQTVPCNKNETINLAQTGERTAATTLFQYSGKRFPAGLQKLPVMWSM

SEQ ID NO: 120944 - DNA, 483 bp, Artificial Sequence
  derived and/or modified sequence
atggcaaattgcgaattttcacccgtcagtggcgataagccttgctgccggctaagtcggagggcacagctgtgtctcggggtgtcaatcctagtgctgattctggtggttgttttggctgtagtcgtgccaagatggaggcagcagtggtcaggcccagggactaccaagagattccccgagaccgttctcgctcggtgcgttaaatacaccgaaattcatccagaaatgcgccatgtcgactgtcagagcgtctgggatgcattcaagggggcctttatctccaagcacccctgcaatattactgaggaggactaccagcccctgatgaaattgggcactcaaaccgtgccctgtaacaagaacgaaaccattaacttggcccagaccggcgagaggaccgctgctactacactgttccagtattccggcaagcgatttcccgctggtctgcagaaactccctgtgatgtggtccatgtag

SEQ ID NO: 120945 - DNA, 903 bp, Artificial Sequence
  derived and/or modified sequence
atggcgaattgtgaattctcacctgtatcgggcgataagccatgctgtcggctgtctcggcgggcgcagctgtgtctgggcgtgtccattcttgtcttaatactggtcgtggtgctcgctgtggttgtgcccagatggaggcagcagtggtccgggcctggcacaacaaagagattcccagagaccgtattggcccggtgtgttaagtacacagagatccaccccgagatgcggcatgtggactgccagtccgtgtgggacgccttcaagggcgccttcatttccaagcatccgtgtaacataacagaagaagactatcagccgctaatgaagctcggaacccagacagtgccctgcaacaaaattctgctgtggtccaggataaaggacctggctcaccaattcacacaggtacagagggacatgttcaccctggaagatacactgctgggttacctggcggacgacttgacatggtgcggagaatttaacacctcaaagatcaattatcagagttgtccagactggcgtaaagactgtagtaataatccggttagtgttttttggaaaacagtttctagaaggtttgccgaggctgcatgcgatgtcgtgcatgtgatgctcaacggctctcgatccaaaatcttcgataagaactctaccttcggcagcgtggaggtgcacaacctgcagccggaaaaggtgcagaccctcgaagcatgggtgattcatggggggagagaagattcccgcgatctctgtcaggaccccaccattaaggagctggagagcatcatttctaaaagaaacattcagttcagctgcaagaatatttacagacctgacaagttcctgcagtgtgtgaaaaatcccgaagatagcagctgtaccagcgagatctag

SEQ ID NO: 120946 - DNA, 483 bp, Artificial Sequence
  derived and/or modified sequence
atggccaactgtgagttcagccctgtgtctggggacaagccctgctgccgcctgagccggcgggcccagctgtgcctgggcgtgtccatcctggtgctgatcctggtggtggtgctggccgtggtggtgccccgctggaggcagcagtggagcggccctggcaccaccaagcgcttccctgagaccgtgctggcccgctgtgtgaagtacacagagatccaccctgagatgagacatgtggactgccagagcgtgtgggatgccttcaagggggccttcatcagcaagcacccctgcaacatcacagaggaggactaccagcccctgatgaagctgggcacccagacagtgccctgcaacaagaatgagaccatcaacctggcccagacaggagagaggacagctgccaccaccctcttccagtacagcggcaagcgcttccctgctggcctgcagaagctgcctgtgatgtggagcatgtag

SEQ ID NO: 120947 - DNA, 903 bp, Artificial Sequence
  derived and/or modified sequence
atggccaactgtgagttcagccctgtgtctggggacaagccctgctgccgcctgagccggcgggcccagctgtgcctgggcgtgtccatcctggtgctgatcctggtggtggtgctggccgtggtggtgccccgctggaggcagcagtggagcggccctggcaccaccaagcgcttccctgagaccgtgctggcccgctgtgtgaagtacacagagatccaccctgagatgagacatgtggactgccagagcgtgtgggatgccttcaagggggccttcatcagcaagcacccctgcaacatcacagaggaggactaccagcccctgatgaagctgggcacccagacagtgccctgcaacaagatcctgctgtggagccgcatcaaggacctggcccaccagttcacccaggtgcagagggacatgttcaccctggaggacaccctgctgggctacctggctgatgacctgacctggtgtggggagttcaacaccagcaagatcaactaccagagctgcccagactggaggaaggactgcagcaacaaccctgtgtctgtgttctggaagacagtgagccgccgctttgctgaggccgcctgtgatgtggtgcacgtgatgctgaatggcagccgcagcaagatctttgacaagaacagcaccttcggctctgtggaggtgcacaacctgcagcctgagaaggtgcagaccctggaggcctgggtgatccacggcggccgggaggacagccgggacctgtgccaggaccccaccatcaaggagctggagagcatcatcagcaagaggaacatccagttcagctgcaagaacatctacagaccagacaagttcctgcagtgtgtgaagaaccctgaggacagcagctgcaccagcgagatctag

SEQ ID NO: 120948 - DNA, 483 bp, Artificial Sequence
  derived and/or modified sequence
atggccaactgcgagttcagccccgtgagcggcgacaagccctgctgcagactgtctagaagggcccagctctgcctgggcgtctctatacttgtcctgatactggtcgtggttctggctgtggtagtcccccgctggcggcagcagtggagcggacccggaaccacaaaaaggtttccagagactgtactcgccaggtgtgtgaagtatacagaaatccaccccgagatgagacatgtggattgccagtccgtgtgggacgcctttaagggtgcctttatcagtaaacatccatgcaatatcaccgaggaagactatcaacccctgatgaagctgggcacacagacggttccctgtaataagaatgagaccatcaacctcgcccagacaggtgagagaactgctgccacaaccctgttccagtatagcggcaaaaggttcccagccggactgcagaagctgcctgtcatgtggtctatgtag

SEQ ID NO: 120949 - DNA, 903 bp, Artificial Sequence
  derived and/or modified sequence
atggccaactgcgagttcagccccgtgagcggcgacaagccctgctgccggctgagtaggcgcgctcagctctgcctgggtgtctccattctcgtgttgattctagtggtcgtccttgctgtagttgtccccagatggcgtcaacagtggtcggggcccggaacgactaaacgctttcctgagacggtcctggcccgttgcgtcaaatacacagagatccaccccgagatgcgtcacgtggattgccagtcagtttgggatgcctttaagggggcatttatctctaagcacccgtgtaatattactgaggaggactaccagcccctgatgaaactaggcactcagacagtcccttgtaataagatactgctgtggtccagaataaaggatttagctcatcagtttactcaggttcagcgggacatgtttacgctggaggatacgttattggggtacctggccgacgacctgacgtggtgcggagaattcaatacatccaagatcaattaccagagctgtcccgattggcgcaaggactgttcaaataacccagtttccgttttctggaagactgtctccaggcgtttcgcggaagctgcatgcgacgtggtgcacgtgatgctgaatggttcccggtctaaaatcttcgataagaattcaaccttcgggtccgtggaagtccacaacctccagccagagaaagtccagacattggaggcatgggttatccacggcgggagagaggacagccgggacctgtgtcaggaccccacaataaaggaactggagagcatcatcagtaaaaggaacattcaattctcatgtaaaaatatctataggcccgataagtttctgcagtgcgtaaaaaatcctgaagactcgtcgtgcaccagcgagatctag

SEQ ID NO: 120950 - DNA, 483 bp, Artificial Sequence
  derived and/or modified sequence
atggcaaactgcgagttttcccccgtgtcgggcgataaaccatgctgtaggctgagcaggcgagcccagttgtgtctgggagtttccattctcgtgctgattctggtggtggtactggcggtcgtcgtgcctcgctggagacagcagtggtctggccctggtacaactaagcggttccccgagactgtgctggccaggtgtgttaagtacaccgagatacaccccgagatgcggcatgtggattgccagtctgtgtgggatgcctttaaaggagcttttatatcaaagcatccttgtaatattacagaggaagactaccagccactcatgaaactgggaactcagaccgtcccttgtaataaaaatgagactatcaatcttgctcagacaggggagcgcaccgccgcaacgaccttgtttcagtattctggaaagcggttccccgcaggcctgcagaagttgcccgtcatgtggtctatgtag

SEQ ID NO: 120951 - DNA, 903 bp, Artificial Sequence
  derived and/or modified sequence
atggctaactgtgaattttcaccagtatccggtgacaagccatgctgtcgattgagcaggagagcacaactctgtcttggagtatcaatactcgtgctcattctggtggtggtactggcagtcgtcgtgccccgatggcgccagcagtggtcaggcccaggtacaacaaagaggtttcctgagaccgtcctggccaggtgtgtcaagtataccgagattcaccccgagatgcggcacgtggactgtcagagcgtgtgggacgccttcaaaggagcctttatctctaagcacccatgcaacatcacagaggaagattaccaaccgctgatgaaactcggtacacagacagtgccttgcaacaagatcctcctgtggtctcgaatcaaagatctcgcgcaccagtttacccaggtgcagcgcgatatgttcaccctggaggacacattgctcggctacctcgccgacgatctgacctggtgcggagagttcaacacgtctaagatcaattaccagtcctgcccagattggcgaaaagattgttccaacaatcctgtgagtgtattctggaagactgtgtcaaggaggttcgccgaagccgcatgcgacgtcgtccacgttatgctgaacggtagccgcagtaaaattttcgacaagaattctacattcggttctgtagaagtccacaatttgcaaccagaaaaagtccagacgctcgaagcctgggtgatacatggaggccgagaagattccagagatttatgccaggacccaaccataaaggagcttgaatccattatcagtaagagaaacatacagtttagttgcaaaaatatctacaggccagataaattcctgcagtgcgtgaagaatcccgaagatagctcgtgcacttcagagatctag

SEQ ID NO: 120952 - DNA, 1884 bp, Artificial Sequence
  derived and/or modified sequence
gggggtgggaagggaaacagagaaaaggcaagtgaaacagaaggggaggtgcagtttcagaacccagccagcctctctcttgctgcctagcctcctgccggcctcatcttcgcccagccaaccccgcctggagccctatggccaactgcgagttcagcccggtgtccggggacaaaccctgctgccggctctctaggagagcccaactctgtcttggcgtcagtatcctggtcctgatcctcgtcgtggtgctcgcggtggtcgtcccgaggtggcgccagcagtggagcggtccgggcaccaccaagcgctttcccgagaccgtcctggcgcgatgcgtcaagtacactgaaattcatcctgagatgagacatgtagactgccaaagtgtatgggatgctttcaagggtgcatttatttcaaaacatccttgcaacattactgaagaagactatcagccactaatgaagttgggaactcagaccgtaccttgcaacaagattcttctttggagcagaataaaagatctggcccatcagttcacacaggtccagcgggacatgttcaccctggaggacacgctgctaggctaccttgctgatgacctcacatggtgtggtgaattcaacacttccaaaataaactatcaatcttgcccagactggagaaaggactgcagcaacaaccctgtttcagtattctggaaaacggtttcccgcaggtttgcagaagctgcctgtgatgtggtccatgtgatgctcaatggatcccgcagtaaaatctttgacaaaaacagcacttttgggagtgtggaagtccataatttgcaaccagagaaggttcagacactagaggcctgggtgatacatggtggaagagaagattccagagacttatgccaggatcccaccataaaagagctggaatcgattataagcaaaaggaatattcaattttcctgcaagaatatctacagacctgacaagtttcttcagtgtgtgaaaaatcctgaggattcatcttgcacatctgagatctgagccagtcgctgtggttgttttagctccttgactccttgtggtttatgtcatcatacatgactcagcatacctgctggtgcagagctgaagattttggagggtcctccacaataaggtcaatgccagagacggaagcctttttccccaaagtcttaaaataacttatatcatcagcatacctttattgtgatctatcaatagtcaagaaaaattattgtataagattagaatgaaaattgtatgttaagttacttcactttaattctcatgtgatccttttatgttatttatatattggtaacatcctttctattgaaaaatcaccacaccaaacctctcttattagaacaggcaagtgaagaaaagtgaatgctcaagtttttcagaaagcattacatttccaaatgaatgaccttgttgcatgatgtatttttgtacccttcctacagatagtcaaaccataaacttcatggtcatgggtcatgttggtgaaaattattctgtaggatataagctacccacgtacttggtgctttaccccaacccttccaacagtgctgtgaggttggtattatttcattttttagatgagaaaatgggagctcagagaggttatatatttaagttggtgcaaaagtaattgcaagttttgccaccgaaaggaatggcaaaaccacaattatttttgaaccaacctaataatttaccgtaagtcctacatttagtatcaagctagagactgaatttgaactcaactctgtccaactccaaaattcatgtgctttttccttctaggcctttcataccaaactaatagtagtttatattctcttccaacaaatgc

SEQ ID NO: 120953 - DNA, 1357 bp, Artificial Sequence
  derived and/or modified sequence
agtgaaacagaaggggaggtgcagtttcagaacccagccagcctctctcttgctgcctagcctcctgccggcctcatcttcgcccagccaaccccgcctggagccctatggccaactgcgagttcagcccggtgtccggggacaaaccctgctgccggctctctaggagagcccaactctgtcttggcgtcagtatcctggtcctgatcctcgtcgtggtgctcgcggtggtcgtcccgaggtggcgccagcagtggagcggtccgggcaccaccaagcgctttcccgagaccgtcctggcgcgatgcgtcaagtacactgaaattcatcctgagatgagacatgtagactgccaaagtgtatgggatgctttcaagggtgcatttatttcaaaacatccttgcaacattactgaagaagactatcagccactaatgaagttgggaactcagaccgtaccttgcaacaagaatgaaactatcaatcttgcccagactggagaaaggactgcagcaacaaccctgtttcagtattctggaaaacggtttcccgcaggtttgcagaagctgcctgtgatgtggtccatgtgatgctcaatggatcccgcagtaaaatctttgacaaaaacagcacttttgggagtgtggaagtccataatttgcaaccagagaaggttcagacactagaggcctgggtgatacatggtggaagagaagattccagagacttatgccaggatcccaccataaaagagctggaatcgattataagcaaaaggaatattcaattttcctgcaagaatatctacagacctgacaagtttcttcagtgtgtgaaaaatcctgaggattcatcttgcacatctgagatctgagccagtcgctgtggttgttttagctccttgactccttgtggtttatgtcatcatacatgactcagcatacctgctggtgcagagctgaagattttggagggtcctccacaataaggtcaatgccagagacggaagcctttttccccaaagtcttaaaataacttatatcatcagcatacctttattgtgatctatcaatagtcaagaaaaattattgtataagattagaatgaaaattgtatgttaagttacttcactttaattctcatgtgatccttttatgttatttatatattggtaacatcctttctattgaaaaatcaccacaccaaacctctcttattagaacaggcaagtgaagaaaagtgaatgctcaagtttttcagaaagcattacatttccaaatgaatgaccttgttgcatgatgtatttttgtacccttcctacagatagtcaaaccataaacttcatggtcatgggtca

SEQ ID NO: 120954 - DNA, 483 bp, Artificial Sequence
  derived and/or modified sequence
atggccaactgcgagttcagccccgtgagcggcgacaagccctgctgcagactgagcagaagagcccagctgtgcctgggcgtgagcatcctggtgctgatcctggtggtggtgctggccgtggtggtgcccagatggagacagcagtggagcggccccggcaccaccaagagattccccgagaccgtgctggccagatgcgtgaagtacaccgagatccaccccgagatgagacacgtggactgccagagcgtgtgggacgccttcaagggcgccttcatcagcaagcacccctgcaacatcaccgaggaggactaccagcccctgatgaagctgggcacccagaccgtgccctgcaacaagaacgagaccatcaacctggcccagaccggcgagagaaccgccgccaccaccctgttccagtacagcggcaagagattccccgccggcctgcagaagctgcccgtgatgtggagcatgtag

SEQ ID NO: 120955 - DNA, 903 bp, Artificial Sequence
  derived and/or modified sequence
atggccaactgcgagttcagccccgtgagcggcgacaagccctgctgcagactgagcagaagagcccagctgtgcctgggcgtgagcatcctggtgctgatcctggtggtggtgctggccgtggtggtgcccagatggagacagcagtggagcggccccggcaccaccaagagattccccgagaccgtgctggccagatgcgtgaagtacaccgagatccaccccgagatgagacacgtggactgccagagcgtgtgggacgccttcaagggcgccttcatcagcaagcacccctgcaacatcaccgaggaggactaccagcccctgatgaagctgggcacccagaccgtgccctgcaacaagatcctgctgtggagcagaatcaaggacctggcccaccagttcacccaggtgcagagagacatgttcaccctggaggacaccctgctgggctacctggccgacgacctgacctggtgcggcgagttcaacaccagcaagatcaactaccagagctgccccgactggagaaaggactgcagcaacaaccccgtgagcgtgttctggaagaccgtgagcagaagattcgccgaggccgcctgcgacgtggtgcacgtgatgctgaacggcagcagaagcaagatcttcgacaagaacagcaccttcggcagcgtggaggtgcacaacctgcagcccgagaaggtgcagaccctggaggcctgggtgatccacggcggcagagaggacagcagagacctgtgccaggaccccaccatcaaggagctggagagcatcatcagcaagagaaacatccagttcagctgcaagaacatctacagacccgacaagttcctgcagtgcgtgaagaaccccgaggacagcagctgcaccagcgagatctag

SEQ ID NO: 120956 - protein, 510 aa, Artificial Sequence
  derived and/or modified sequence
MEDTKESNVKTFCSKNILAILGFSSIIAVIALLAVGLTQNKALPENVKYGIVLDAGSSHTSLYIYKWPAEKENDTGVVHQVEECRVKGPGISKFVQKVNEIGIYLTDCMERAREVIPRSQHQETPVYLGATAGMRLLRMESEELADRVLDVVERSLSNYPFDFQGARIITGQEEGAYGWITINYLLGKFSQKTRWFSIVPYETNNQETFGALDLGGASTQVTFVPQNQTIESPDNALQFRLYGKDYNVYTHSFLCYGKDQALWQKLAKDIQVASNEILRDPCFHPGYKKVVNVSDLYKTPCTKRFEMTLPFQQFEIQGIGNYQQCHQSILELFNTSYCPYSQCAFNGIFLPPLQGDFGAFSAFYFVMKFLNLTSEKVSQEKVTEMMKKFCAQPWEEIKTSYAGVKEKYLSEYCFSGTYILSLLLQGYHFTADSWEHIHFIGKIQGSDAGWTLGYMLNLTNMIPAEQPLSTPLSHSTYVFLMVLFSLVLFTVAIIGLLIFHKPSYFWKDMV

SEQ ID NO: 120957 - DNA, 1533 bp, Artificial Sequence
  derived and/or modified sequence
atggaagacaccaaagaatctaacgtgaaaaccttttgctcgaaaaatatattggcaatcctgggcttctcatcaattatcgcggtaatcgctctcctagccgttggccttacgcagaacaaggcgcttccagagaacgtgaagtacggcatcgttctcgacgccgggtcctctcacactagcttatatatctacaaatggccagctgagaaggagaacgacacaggcgtcgtgcaccaggttgaggagtgtcgcgtaaagggacctgggatctctaaatttgttcagaaggtgaacgaaattggtatttatctaaccgactgtatggaacgagcaagagaggtgatcccccggtcacagcaccaggaaacaccagtgtatctgggagcaacagcaggcatgcggcttttgagaatggagtccgaggagctcgcagaccgggtgctggatgtggtcgagcggtctctgagcaattatccttttgacttccaaggggcgagaataataacaggacaggaggagggcgcctatgggtggatcacgatcaactacctgctgggcaaattctcacagaagacgagatggttttcaattgttccttacgagaccaataatcaagagacatttggggctcttgacctgggtggcgcctctactcaggtgacttttgtgccgcagaaccagacaattgagagccctgacaacgcactccagttccggctgtacggaaaggattacaatgtgtacacgcacagctttctctgctacggcaaagaccaggctctttggcaaaagctagccaaggatatccaggtagcttccaatgagattctgagagacccttgtttccaccctggttataaaaaggtagtaaacgtgagcgatttgtacaagacaccatgtactaaacgcttcgagatgactctcccatttcagcaattcgagatccagggcattggtaattatcagcaatgtcaccagagtattctagaacttttcaacaccagctattgcccatattcacagtgtgcgtttaacgggatttttcttccgcccttacagggtgacttcggggcttttagtgccttctactttgtcatgaaatttctcaatctgacaagtgaaaaggtcagccaggaaaaagtgactgaaatgatgaaaaagttttgcgctcagccttgggaggagatcaagacctcctatgccggtgttaaagagaagtacctgtcggaatactgtttctcaggtacctacattctatctctgttgttacagggatatcacttcacagcagactcctgggagcacatccacttcataggtaagatccagggttcagatgctggctggacactcggctacatgttgaacctcacgaatatgattccagcggaacagcctctttctacaccactctcacattccacctacgtgttcctgatggtcctgttttccctggttctcttcactgtggcgattatcggactgcttatctttcataaaccttcctacttttggaaagatatggtatag

SEQ ID NO: 120958 - DNA, 1533 bp, Artificial Sequence
  derived and/or modified sequence
atggaggacaccaaggagagcaatgtgaagaccttctgcagcaagaacatcctggccatcctgggcttcagcagcatcatcgccgtcatcgccctgctggccgtgggcctgacccagaacaaggccctgcctgaaaatgtgaagtatggaattgtgctggatgctggcagcagccacaccagcctgtacatctacaagtggccagctgagaaggaaaatgacacaggagtggtgcaccaggtggaggagtgccgggtgaagggccctggcatcagcaagtttgtgcagaaggtgaatgaaattggcatctacctgacagactgcatggagcgggcccgggaggtgatccccaggagccagcaccaggagacccctgtgtacctgggcgccacagctggcatgaggctgctgaggatggagagcgaggagctggccgacagagtgctggatgtggtggagaggagcctgagcaactacccctttgacttccagggcgcccgcatcatcaccggccaggaggagggcgcctacggctggatcaccatcaactacctgctgggcaagttcagccagaagacccgctggttcagcatcgtgccctatgagaccaacaaccaggagacctttggagccctggacctgggcggggccagcacccaggtgacctttgtgccccagaaccagaccatcgagagcccagacaatgccctgcagttccggctgtatggcaaggactacaacgtgtacacccacagcttcctgtgctacggcaaggaccaggccctgtggcagaagctggccaaggacatccaggtggccagcaatgagatcctgcgggacccctgcttccaccctggctacaagaaggtggtgaatgtgtctgacctgtacaagaccccctgcaccaagagatttgagatgaccctgcccttccagcagtttgagatccagggcatcggcaactaccagcagtgccaccagagcatcctggagctgttcaacaccagctactgcccctacagccagtgtgccttcaacggcatcttcctgccccccctgcagggcgactttggagccttcagcgccttctactttgtgatgaagttcctgaacctgaccagcgagaaggtgtcccaggagaaggtgacagagatgatgaagaagttctgtgcccagccctgggaggagatcaagaccagctatgctggggtgaaggagaagtacctgtctgagtactgcttcagcggcacctacatcctgagcctgctgctgcagggctaccacttcaccgctgacagctgggagcacatccacttcatcggcaagatccagggcagtgatgctggctggaccctgggctacatgctgaacctgaccaacatgatcccagctgagcagcccctgagcacccccctgagccacagcacctacgtgttcctgatggtgctcttcagcctggtgctcttcaccgtggccatcatcggcctgctgatcttccacaagcccagctacttctggaaggacatggtgtag

SEQ ID NO: 120959 - DNA, 1533 bp, Artificial Sequence
  derived and/or modified sequence
atggaggacaccaaggagagcaacgtgaagaccttctgcagcaagaatattctggccatcctggggttctcaagcattatcgcagtcattgccctgcttgctgttgggctgacccagaacaaagccctgcctgaaaatgtgaagtacggaatcgttctggacgctgggtcctcacatacttcgctgtatatatacaagtggcccgccgaaaaggaaaatgataccggtgtggtacaccaggtggaggaatgccgcgtgaagggccccggcatatccaagtttgtgcaaaaagtgaacgaaattgggatctacctgaccgactgtatggaacgagctcgagaggtgattcccaggagccagcaccaggagacccccgtttatctgggtgccacggcaggaatgcggcttctgaggatggagtctgaagagcttgccgatagggtgttggatgttgtcgagcgctccctaagtaactacccctttgactttcaaggagcacgaattattacagggcaggaggagggcgcctacggttggatcactattaactatctgttaggcaaattcagtcagaaaaccagatggttttcaatcgtgccatacgaaaccaataaccaggaaaccttcggggccctggaccttgggggcgccagtacgcaggtgaccttcgttcctcagaatcagacgattgaaagtccggacaacgctctccagttccgtttatacggcaaagactacaatgtgtatacccatagtttcctctgttacggaaaggaccaagcgctgtggcaaaagctagcaaaagatatccaggtagcaagtaacgagatcctccgggacccctgtttccaccctggctataaaaaagtcgtcaatgttagtgatctttataaaacaccgtgcaccaaacggttcgagatgaccctgccattccagcagttcgagattcagggaattggtaactaccaacagtgccatcaatccatattagagctgtttaacacttcatactgcccttactctcagtgtgccttcaacggcatttttttgcctccgctgcaaggggactttggcgcttttagtgcattttattttgtgatgaaattcctgaatctcaccagtgaaaaggtgagccaagaaaaagttacggaaatgatgaagaagttttgtgcacagccctgggaggaaatcaaaacctcctatgccggcgttaaggagaagtacctgagcgaatactgcttttccgggacctacattcttagcttactgcttcaagggtatcacttcaccgccgatagttgggagcatattcattttattggaaaaatccaggggagcgacgcagggtggactctggggtacatgttgaacctgactaatatgattcccgcggagcagccactgtctacccctctgtcacatagtacatacgtgttcctcatggtgctctttagcctggtcctatttaccgtcgcaattatcggattgcttatcttccacaaaccctcttatttttggaaggatatggtctag

SEQ ID NO: 120960 - DNA, 1533 bp, Artificial Sequence
  derived and/or modified sequence
atggaagatacaaaggagagtaacgtcaagacattctgtagtaagaacatcctggccattcttggcttttcatcaatcatagctgtaattgctctgctcgccgtggggctcactcagaataaggccctgcccgaaaatgtgaagtatggtatcgttcttgatgctggctctagccatacctctctttacatttataagtggccagccgaaaaagagaacgatacaggagttgtgcaccaagtggaagaatgccgggtgaaaggtccgggtattagcaaatttgtacagaaagtgaacgaaattggcatttacctgactgattgcatggagcgtgctcgcgaggtgattcctcgtagtcagcaccaggagacccctgtctatctgggggctactgctggtatgcgcctcttgcgtatggaaagtgaagaactggctgaccgcgtgctggacgtggtcgagcggtccctttctaactatccttttgatttccaaggtgctcggatcattaccgggcaggaggagggggcttacgggtggattactataaactatctgttggggaaattttctcagaagactcgctggttttcgattgttccctacgaaacaaataatcaagaaactttcggtgccctggacctgggcggagccagtacacaggttactttcgtgcctcagaatcagacaatcgaaagccctgacaacgctttacagtttagactctacggaaaagattacaacgtatatacccactccttcttgtgctacgggaaggaccaggccctatggcagaaactcgccaaagatatccaggtcgcctcgaatgaaatcctccgcgacccttgctttcatcctgggtataagaaagttgtcaatgtgtctgacctttacaagacaccttgcaccaagaggttcgagatgactttgcccttccaacagttcgagatacagggtattggcaattaccaacaatgtcaccagtctatactagaactcttcaacacgtcttactgcccttactcccagtgtgctttcaatggcatcttcctcccacctctgcagggagatttcggagcattcagcgccttttattttgtgatgaaatttctgaatctgactagcgaaaaagtgagtcaggagaaggttacggaaatgatgaagaagttctgcgcgcaaccatgggaggaaataaaaaccagctatgccggagtgaaggagaagtacctaagcgaatactgcttttccggcacgtacatcctgagcttactgttacagggctatcattttacagcagatagttgggagcatattcatttcataggtaagatacaggggagcgatgctggctggacacttggatatatgttaaaccttacaaacatgattcctgccgagcagcctctttcaactcctctctctcactctacctacgtttttcttatggtactctttagccttgtactgttcacggtcgctataattggtctgctgattttccacaaaccatcttacttctggaaggatatggtgtag

SEQ ID NO: 120961 - DNA, 1533 bp, Artificial Sequence
  derived and/or modified sequence
atggaggacaccaaggagagcaacgtgaagaccttctgcagcaagaacatcctggccatcctgggcttcagcagcatcatcgccgtgatcgccctgctggccgtgggcctgacccagaacaaggccctgcccgagaacgtgaagtacggcatcgtgctggacgccggcagcagccacaccagcctgtacatctacaagtggcccgccgagaaggagaacgacaccggcgtggtgcaccaggtggaggagtgcagagtgaagggccccggcatcagcaagttcgtgcagaaggtgaacgagatcggcatctacctgaccgactgcatggagagagccagagaggtgatccccagaagccagcaccaggagacccccgtgtacctgggcgccaccgccggcatgagactgctgagaatggagagcgaggagctggccgacagagtgctggacgtggtggagagaagcctgagcaactaccccttcgacttccagggcgccagaatcatcaccggccaggaggagggcgcctacggctggatcaccatcaactacctgctgggcaagttcagccagaagaccagatggttcagcatcgtgccctacgagaccaacaaccaggagaccttcggcgccctggacctgggcggcgccagcacccaggtgaccttcgtgccccagaaccagaccatcgagagccccgacaacgccctgcagttcagactgtacggcaaggactacaacgtgtacacccacagcttcctgtgctacggcaaggaccaggccctgtggcagaagctggccaaggacatccaggtggccagcaacgagatcctgagagacccctgcttccaccccggctacaagaaggtggtgaacgtgagcgacctgtacaagaccccctgcaccaagagattcgagatgaccctgcccttccagcagttcgagatccagggcatcggcaactaccagcagtgccaccagagcatcctggagctgttcaacaccagctactgcccctacagccagtgcgccttcaacggcatcttcctgccccccctgcagggcgacttcggcgccttcagcgccttctacttcgtgatgaagttcctgaacctgaccagcgagaaggtgagccaggagaaggtgaccgagatgatgaagaagttctgcgcccagccctgggaggagatcaagaccagctacgccggcgtgaaggagaagtacctgagcgagtactgcttcagcggcacctacatcctgagcctgctgctgcagggctaccacttcaccgccgacagctgggagcacatccacttcatcggcaagatccagggcagcgacgccggctggaccctgggctacatgctgaacctgaccaacatgatccccgccgagcagcccctgagcacccccctgagccacagcacctacgtgttcctgatggtgctgttcagcctggtgctgttcaccgtggccatcatcggcctgctgatcttccacaagcccagctacttctggaaggacatggtgtag

SEQ ID NO: 120962 - DNA, 2035 bp, Artificial Sequence
  derived and/or modified sequence
gcttcaaggatgcaaaaaattacaacctggaaaaggcttcgagtaactttaggaaaatgagctgctggactcctcagtcaatctgtcctttctagtcaatgaaaaagacagggtttgaggttccttccgaaacggggccggctaatttagcccctcccacgagcccaagggtctgttatatctctgtttccttgaggacctctctcacggagacggaccacagcaagcagaggctgggggggggaaagacgaggaaagaggaggaaaacaaaagctgctacttatggaagatacaaaggagtctaacgtgaagacattttgctccaagaatatcctagccatccttggcttctcctctatcatagctgtgatagctttgcttgctgtggggttgacccagaacaaagcattgccagaaaacgttaagtatgggattgtgctggatgcgggttcttctcacacaagtttatacatctataagtggccagcagaaaaggagaatgacacaggcgtggtgcatcaagtagaagaatgcagggttaaaggtcctggaatctcaaaatttgttcagaaagtaaatgaaataggcatttacctgactgattgcatggaaagagctagggaagtgattccaaggtcccagcaccaagagacacccgtttacctgggagccacggcaggcatgcggttgctcaggatggaaagtgaagagttggcagacagggttctggatgtggtggagaggagcctcagcaactacccctttgacttccagggtgccaggatcattactggccaagaggaaggtgcctatggctggattactatcaactatctgctgggcaaattcagtcagaaaacaaggtggttcagcatagtcccatatgaaaccaataatcaggaaacctttggagctttggaccttgggggagcctctacacaagtcacttttgtaccccaaaaccagactatcgagtccccagataatgctctgcaatttcgcctctatggcaaggactacaatgtctacacacatagcttcttgtgctatgggaaggatcaggcactctggcagaaactggccaaggacattcaggttgcaagtaatgaaattctcagggacccatgctttcatcctggatataagaaggtagtgaacgtaagtgacctttacaagaccccctgcaccaagagatttgagatgactcttccattccagcagtttgaaatccagggtattggaaactatcaacaatgccatcaaagcatcctggagctcttcaacaccagttactgcccttactcccagtgtgccttcaatgggattttcttgccaccactccagggggattttggggcattttcagctttttactttgtgatgaagtttttaaacttgacatcagagaaagtctctcaggaaaaggtgactgagatgatgaaaaagttctgtgctcagccttgggaggagataaaaacatcttacgctggagtaaaggagaagtacctgagtgaatactgcttttctggtacctacattctctccctccttctgcaaggctatcatttcacagctgattcctgggagcacatccatttcattggcaagatccagggcagcgacgccggctggactttgggctacatgctgaacctgaccaacatgatcccagctgagcaaccattgtccacacctctctcccactccacctatgtcttcctcatggttctattctccctggtccttttcacagtggccatcataggcttgcttatctttcacaagccttcatatttctggaaagatatggtatagcaaaagcagctgaaatatgctggctggagtgaggaaaaaaatcgtccagggagcattttcctccatcgcagtgttcaaggccatccttccctgtctgccagggccagtcttgacgagtgtgaagcttccttggcttttactgaagcctttcttttggaggtattcaatatcctttgcctcaaggacttcggcagatactgtctctttcatgagtttttc

SEQ ID NO: 120963 - DNA, 12387 bp, Artificial Sequence
  derived and/or modified sequence
cctgttgctctttgctctaatgagccttgagaaaggattgctggtcatgggaccagaggctttatggggagggaagaactgttcttgactttcagtttttcgagcgggtttcaagtatgggattgtgctggatgcgggttcttctcacacaagtttatacatctataagtggccagcagaaaaggagaatgacacaggcgtggtgcatcaagtagaagaatgcagggttaaaggtcctggaatctcaaaatttgttcagaaagtaaatgaaataggcatttacctgactgattgcatggaaagagctagggaagtgattccaaggtcccagcaccaagagacacccgtttacctgggagccacggcaggcatgcggttgctcaggatggaaagtgaagagttggcagacagggttctggatgtggtggagaggagcctcagcaactacccctttgacttccagggtgccaggatcattactggccaagaggaaggtgcctatggctggattactatcaactatctgctgggcaaattcagtcagaaaacaaggtggttcagcatagtcccatatgaaaccaataatcaggaaacctttggagctttggaccttgggggagcctctacacaagtcacttttgtaccccaaaaccagactatcgagtccccagataatgctctgcaatttcgcctctatggcaaggactacaatgtctacacacatagcttcttgtgctatgggaaggatcaggcactctggcagaaactggccaaggacattcaggttgcaagtaatgaaattctcagggacccatgctttcatcctggatataagaaggtagtgaacgtaagtgacctttacaagaccccctgcaccaagagatttgagatgactcttccattccagcagtttgaaatccagggtattggaaactatcaacaatgccatcaaagcatcctggagctcttcaacaccagttactgcccttactcccagtgtgccttcaatgggattttcttgccaccactccagggggattttggggcattttcagctttttactttgtgatgaagtttttaaacttgacatcagagaaagtctctcaggaaaaggtgactgagatgatgaaaaagttctgtgctcagccttgggaggagataaaaacatcttacgctggagtaaaggagaagtacctgagtgaatactgcttttctggtacctacattctctccctccttctgcaaggctatcatttcacagctgattcctgggagcacatccatttcattggcaagatccagggcagcgacgccggctggactttgggctacatgctgaacctgaccaacatgatcccagctgagcaaccattgtccacacctctctcccactccacctatgtcttcctcatggttctattctccctggtccttttcacagtggccatcataggcttgcttatctttcacaagccttcatatttctggaaagatatggtatagcaaaagcagctgaaatatgctggctggagtgaggaaaaaaatcgtccagggagcattttcctccatcgcagtgttcaaggccatccttccctgtctgccagggccagtcttgacgagtgtgaagcttccttggcttttactgaagcctttcttttggaggtattcaatatcctttgcctcaaggacttcggcagatactgtctctttcatgagtttttcccagctacacctttctcctttgtactttgtgcttgtataggttttaaagacctgacacctttcataatctttgctttataaaagaacaatattgactttgtctagaagaactgagagtcttgagtcctgtgataggaggctgagctggctgaaagaagaatctcaggaactggttcagttgtactctttaagaacccctttctctctcctgtttgccatccattaagaaagccatatgatgcctttggagaaggcagacacacattccattcccagcctgctctgtgggtaggagaattttctacagtaggcaaatatgtgctaaagccaaagagttttataaggaaatatatgtgctcatgcagtcaatacagttctcaatcccacccaaagcaggtatgtcaataaatcacatattcctaggtgatacccaaatgctacagagtggaacactcagacctgagatttgcaaaaagcagatgtaaatatatgcattcaaacatcagggcttactatgaggtaggtggtatatacatgtcacaaataaaaatacagttacaactcagggtcacaaaaaatgcatcttccaatgcatatttttattatggtaaaatatacataaatataattcaccattttaacatttaattcatattaaatacgtacaaatcagtgacatttagtacattcacagtgttgtgccaccatcaccactatttagttccagaacatttgcatcatcaatacattgtctagagacaagactatcctgggtaggcagaaaccatagatcttttgtgtttacagctatggaaaccaactgtaccataaagatagttcactgagttttaaagccaagccacatcttatttttccaaggtttaatttagtgagagggcagcattagtgtggagtggcatgcttttgccctatcgtggaatttacacatcagaatgtgcaggatccaagtctgaaagtgttgccacccgtcacacaacatgggctttgtttgcttattccatgaagcagcagctatagaccttaccatggaaacatgaagagaccctgcacccctttccttaaggattgctgcaagagttacctgttgagcaggattgactggtgatgtttcattctgaccttgtcccaagctctccatctctagatctggggactgactgttgagctgatggggaaagaaaagctctcacacaaaccggaagccaaatgtcccctatctcttgaatgatcaagtcacttttgacaacatccaggtgaatataaaaacttaataaagctgtggaaaggaactcttaatcttcttttctgctacttaggttaaattcactagatcttgattaggaatcaaaattcgaattgggacatgttcaaattctttcttgtggtagttgcctatactgtcatcgctgctgttggttgagcatttgtggtgtaccacgctgtgtgctcaagggtattacattcatcttctcatttaatcctcacaacaatctgaagaaggtaggtattacaattcccacttcatagaaacagaaactgaggttcagagaggttaagtcatttgcccaaatggctgagccaaagcctaccatgtacctaacctttattttctttcccgaacataccaggctgtctcctcataacttccaagcatgcacttaaaactccacatgaatacaaggttcatgggacttggtattcatagaaagggaggcagaaagctggtctgttcctgataggcttgtaatttaatatcattctgttcatgtgctttggatggaagcacatctggcatatgatgctaatcagtggttcccatacccctggcttcctaattttaatgtttgctcacagcatagtagattgacatcaaatagtggccgatgatgatgaaaataaaggtcaaataagttgagccaataacagccgcttttttccttctgtctgcgtatacaaagcactgtcatgcacacaatctattctgaccctcacaacaacccataagggtgtaaatagtatttccattttacaaatgaggatcacacaaactactacatggcagagcagatactccaactcatgtcttctggttgaagcctattgctttttcttttctaaacactttccctcagcaagttggaattagacttcacaagtctccttcagagaacacaaatcttttcttattccattcctgtttggttgcctacgtccaatctccccctccccagagatgccaaaaaaaaaatcctttaaggtatttgggagccaaactcaacttgttaaaatctcaaattatggagacaatcagcagacacaacctaaccccaattattttggcaggaaggttggtttagaggcagatccagcaatctgctttgggccactctgggtggggtaggtgaaataagattggtcactgttaactaattttaatattggattggccattggttatcactgattaccattctcccctggattttcacccaggactcaaaacttggttctgctaaccctgttcctttatgaggaaccttttaaagattcctttataaggtgggagttttttttctatgaacctataggggagaaaaaagatcagcagaagtcattacttttttttttttttttttttttttttgagagagagtctcactccattgcccaggctggagtgcagtggtgctatctcggctcactgcaacctccgcctcctgggttcaagcaattctcctgcctcagcctcccgagtagctgggattgcaggtgcccaccaccacacccggctaatttttgtatttttagtaaagacagggtttcaccatgttggccaggctggtctccaactcccaatctcaggtgatcctattgcctcgggctcccaaagtgctgggattacaggagtgagccaccatgcctggccagaagtggttacttctgtagacaaaagaataatgctacttaatcaggctttctgtgtgacaagaaagagaaagaaaataaagaagtttcaattcatccaattcttaataagaaatatgtaaataaaattttttaaaattacacttcattttaatgttgtatcagtcaaggtccctgcaagagatggatggtatggtacactcaaactgggtaacacaggagagttttcagaaagcaactaaatccaaaatactatcaaggaatcaatataaaaattgttaatatttttctcatactaaattttcaaaatattttgtgtctattacatttacagcacatcttaattaggactagctgtgtgttcacctcacatgtggcttgtagctaccatactggacagcacatgtccaaaaaaatacacgtaaagttaaagtttaaaagacacaggaactaagccctcattgtctttcccttgggaggtagtttaaagagctatagatgctgtaacattcttgctattatttattatatatgacattattcctaaaaaagcttttgagatcctaggttgtattcctcaggttttgttgccttcccatgaagatgtgaaggcagggatgcctgttattcagtccaagatgcatgacaagagaccttgggaaagtttcatctggatttaaagattaattcttgatgcttacattccatactcaaaatgtaaatttgaatattaaaataaagatgattttttttttggagctagtcttgctctgttgcccaggctggaatgcagtggcatgatcatggctcactgcagcctcgacctcccaagctcaagcaaggctacaggtgtgcacctaagtagctaggactacaggtgtgcaccaccatgtctagctatttttttttctgtagagacagggttttcctatgttgtccaggctggtctcgaactcctgccctcaagcaatcctcctgccttggcctcccaaagtgttgagattacaggcgtaagccactgcacctggccaagatgaatattttaatagctcacagaacaaagtttgccacataatgataaaattactatgaaaatatattccctttattgtcagtttaaaagatgaactgagtttcacccaaactggtctggcccctctctgattcaaataccaatagttgctctgattcaaattccaactgttagaacatgacagctgctcataactagctttgcttactaaccatgtttctttccatttgtattaggtcctttactttttataacagcctcaaagtttcatgaattgctgcagtaaacattgattttcatgtttgtgagtctgcaagccagctgggcagctctacttcaggtggtaagggtggatcagacctattccatatacctcttgttctccttgtccagtggtttctagggatatgttctcatgatgaaccccgcagaggctcgtgaaagtgagaggaaactaggatgcctcttaaggtcttggtcaggatggggtctcctgtcacttctgtcacaggctattgtaagtcatatgagcaagctcaataaaatataaacaagtcagataaacagtgggaggaatggcaaagtcatatggccaaggccatgagtgattaattttaacacaggaaaaaagtaaagcattaaatgcgattatttaatatacaatgtcttattaactgaaatataaaatgtgtttactgtaaaatataatctgtttatctcaccaaagaaatattatctttaaaaaatgtcattacttctaagacatcatcagtctgcaacttctttccatagccttaatcaggatgctgtggcagctcccacattagcctcgcattctaaactggtagatgtcctaggaaaccatacatctatgtatttttcttattttatacgtttaggacaatgtatagctaattacccaactttttatttgcatacaaatctaatacaactgaacacaatcagttttatcacaggtataatggatttttcaatagtgaggaggtgcctccatgagccttctctttagaaaagtggcattcaagactcttcatttgaagtgaagattgctatgtcttttgcattgctctattttacataaattaagttataaattgacactataatcaactgacaccatgatcagtgatgatgatcaccctcatcagcactagagttgacttgtttttataacccctttgcatgtatgttgaatagcaaagttcatcagagaacatgtattagtcaatggtaagtaagatactctcatctaagaaataacatcacctcttctaatgaagttctaagaagagagggaagaaaaagtcttgggagctagtcagggaatagtgtgtatttgcaattacctaaactgaactctaccattactcctaacccagttcctcctcctgtgttttacatgattaatgccacccctgcctcaatgaaccaagatcagctccatcactgggacctccccattctgcctgtgcaatatttttcttttttatttctccttctaatattactgttattgctccagtaaagagctgtaatatattttacctggactgataccaggaatggtggtgttgcttccaatctgttgctgctagattaatctttgcaaagcacaggcttaatttcattgctgctcaactaaaaccactggtggctttccattgcctacaaaataaagtcaacctccccatcagacattcaaggctttcaatgatccatggccgccagctctctccaggctcatatcccactccactcctctgatgtttcctacactacactacactatactacactacagccaggtagaatgactgttcacccaacaccactcaggttgtcttctcaacttggaatactcttgcaccttcaaagctcatttcaaatgccccttcatttgtgaagccttctccaaatttccaagtcagaatgtctcttccttgtgctaccacaaccctttaactgagcctccattagtgcactgagaccattctgttcagtgtctgggtgaagcttcctggtgaaaaatatgttacctatttctttctgaaaagttggattcagggatattatcacggacctaaggtaatagttctagccaacctccctgtccactgccaggccgactacaaacccttctgttgctggcgagctggtccgcaccactagttctgcttcactctatttatctcttgatgtaaccatcttctttctccaggttttaagaaccagcccaactcctggttccctgatgaagcttttattcccctagccacatggaacttttcctttttggaacatgcctttagtttctgtgtagtttgccatgcagcacttcattgtacacattattaaaacagaattttaaggattagaatgaaccttaaaagatcatgcatctcaaaatttaatgtacatacaaattacccagggattttgttgaaataaaaattatttaattttaattaatataaataattcagtaggtctggggtgaggcctgaggttttacatttccaacaagctgccaggtaaagccaatacatctgtccaggaatcacactttgcgtatcaaaggtctagatgacattatcattccaaagagtttcttttacaggctctcagatcagtgttcatccactacctgactactgtcattcacaggcattctgttccacagcaggccagctaacgtggtatttacaaagctcactcctcttatacaacaatccaagtgtttcttttgtcagttgtctgtgccccaggagatccctctctgccttgccttgccctctgcctttggagaccagcacctcatactcagtgaaggcctggagtgcttaagagggatttcttccagctctcttgccctggtcttcagtgtattagatgtattacctccatgctctcagtagaggcccataggaaagagtaggtaggttatgccagctcacacgcatcctttaaaaatggtttagaagtttagctggtttcttattactcctgtctatggatgtttccttctgtcactctactagggatgaaacagctaatcatgttcaatagttacatttagattggtttttaaaaactatgattgtattagttcgtttccatgctgctgataaagacatatctgagactggaaacaaaaagggtttaattggacttacagttccacatggctggggaggcctcaaaatcaggtgggaggcaaaaggtacttcttacgtggtggcatcaagagcaaaatgaggaagaagcaaaagcagaaactcttcataaacccaccagatcttgtgggacttattatcacgagaatagcacagaaaagactggcctccatgattcaattacctcccactgcgtccctcccacaacatgtgggaattctgggagatacaattcaagttgagatttgggtggggacacagccaaaccatatcattcctccctgggctcctccaaatttcataatcctcacatttcaaaaccaatcattccttcccaacagttccccaaagtcttaactcatttcagcattaacccaaaagtccacagtccaaagtctcatctgagacaaggcaagtcccttccacttacaagcctgtaaaagcaagctagttacctcctagatacaatggggggtacaggtattgggtaaatacagctgttccaaatgagagaaattggccaaaacaaaggggttacagggtccatgcaagtctgaaatccagtggggcagtcaaattttaaagctccataatgatctcctttgactccatgtctcacattcaggtcatgctgatgcaagagataggttcccatggtcttgtgcagctccgcccctgtggctttgcagagtacagcctccctcctggctgctttctcaggctgatgttgagtgtctgtagcttttccaggcacaagatgcaagttggtggttgatctaccattctggggtctaccattctggggtctaccgttctgggactgtggccttcttctcacagctccactaggcagtgccccaacagggactctgtgtgggggctctgccccacatttcccttccacactgccctaggagaggttccccatgagggctctgcccctgcagcaaacttttgcctggacatccaggtgtttccatatatattctgaaatctaggcagaggttcccaaatctcaattcttgacatctctgcacccacaggctcaacatcacatggaagctgccaatgcttggggcctctaccctctgaagccacagcccaagctctatgttggctcctttcagccatggctggagcagctgggacacagggcaccaagtccctaggctgcacacagcacagagaccctgggcccagcccacaaaaccactttttcctcctgggcctctgggcctgtgatgggaggggctgccatgaaggtctctgacatgacctggagacattttccccatggtcttggggattaacattaggctccttgctgcttatgcaaatttctgcagccagcttgaatttctccttaaaaaaaatgggtttttcttttctactgcatcatcaggctgcagattttccacatttatgctcttgtttcccttttaaaacagaatgtttttaacagcacccaagtcaccttttgaatgctttgctgcttagaaatttattccaccagataccctaagtcatctctctcaagctctaagttccacaaatctctagggcaagggtgaaatgctgccagtctccttgctaaaacataacaagggtcacctttacttcagttcccaacaaggtcttcatctccatctgagaccacctcagcctggaccttattgttcatatcactatcagtatttttgtcaatgccattcacagtctctaggaggttccaaactttcctacattttcctatcttcttctgagccctccagattatttcaacacccagttccaaagttgcttccacattttcgggtatcttttcagcaatgccccactctactggtactattagtccattttcatgctgctgataaagacatacctgagactgggaacaaaaagaggtttaattggacttatagttccacctggctggggaggcctcagaatcatggcaggaggtgaaaggcatttcttacacggcagcagcaagagaaaaatgaagaagcagcaaaagcagaaacccctgataaaaccatcagatctcgtgagacttattcactatcacaagaatagcatgggaaagaccagcccccttgattcaattacctccccctgggtcctgtgggaattctggaaggtacaattcaagttgagatttgggtggggacacagccaaaccatatcaatgattttgtactttaaccagctgaatggaagtacaatctcttgctatatgacacaataattatttgcaaaatgagtaaacatatcataaggaaattatttttacaaggtttgaaacctgaaatgcagtctattatcatacataactaaaaatagagcctcaataaacagattcccagttttgaaaatgcaacatttgtactccacattgtcagttttcttaggtatatttataaatactcctataaaaatgtaaagaaacacataatgtagattgctaattttataataacacaagttgattttgacatccaacttattaattatgaaatgacttttggcctagtaacaatgaaaatgggggcaaatacagataaatggtaattcttagaatgaactactcagcaccaattctaagtttttcttgatggtaaatcataatgttccctttctcctcggttctgcaatctataggcataccataattgtaatcaatagcttaaaaatatgtctctctgtcctattctgtatctgtatctcttggatttttacctttgcaatagtcaactgaaccatcttcttggagtactcatgaagatggaagtctacatggagaatacaggatgaatccactctgtctcctgcagtgaagtctgtttgaaggatgtatttggctgtcttctggacaggccattctaataacagaaacaaacaagttattttaaaacttattggaatattcaaatattaaccaaagtagaaaaatataatacacatccatgtgcccatcacagaacttcactgattatcatcatttagccagtcttgaagaagcaagtgctaattacaatcacaaatgaaacaagattcagacttcatgaagagcactgcgctataataaaagaagaaatgagcacatacattcttttactgacagtcaaatggtgaaggtgggcagaatcattatgtgatgcaacatggcaaaagtatacagacagtgcatccagaggaaggcaccttgctgaatgactagaatggaagtaggagacattttgcaggcccccttcatcctgcagggagaaccagaaccacagcagctctatttgcctattcctctttaaattacaaagttaaaatttgggagtagtagaaaatcaattggttatcttatagagtctcctagaatatttcattggcattgagaaggtggaaaatgcaaattatatactttaaaatgtaatttttgcttttcacatatgcttaaagcctaaaacctcttaataaacttcttctgaaatata

SEQ ID NO: 120964 - protein, 323 aa, Artificial Sequence
  derived and/or modified sequence
MWPLVAALLLGSACCGSAQLLFNKTKSVEFTFCNDTVVIPCFVTNMEAQNTTEVYVKWKFKGRDIYTFDGALNKSTVPTDFSSAKIEVSQLLKGDASLKMDKSDAVSHTGNYTCEVTELTREGETIIELKYRVVSWFSPNENILIVIFPIFAILLFWGQFGIKTLKYRSGGMDEKTIALLVAGLVITVIVIVGAILFVPGEYSLKNATGLGLIVTSTGILILLHYYVFSTAIGLTSFVIAILVIQVIAYILAVVGLSLCIAACIPMHGPLLISGLSILALAQLLGLVYMKFVASNQKTIQPPRKAVEEPLNAFKESKGMMNDE

SEQ ID NO: 120965 - DNA, 972 bp, Artificial Sequence
  derived and/or modified sequence
atgtggccgcttgtagcggcgctgcttttgggaagcgcttgctgcgggagcgcacaactgttattcaacaagacaaaaagcgtggagtttactttctgcaacgacacagttgtgattccctgctttgtgacgaacatggaggcccagaataccacggaggtctacgttaagtggaagttcaaaggtagagatatttatacattcgacggcgccctcaacaaatctacagtgccaaccgatttctcctccgcgaaaattgaagtatcacaattactaaagggcgatgcaagtctgaaaatggataaatccgacgcggtgtctcacacggggaattatacatgcgaggttacggagctgacgcgggaaggagagactatcattgaattaaagtatcgggtagtctcatggttctcaccgaacgagaatatactgatcgtgattttcccaatcttcgccatacttttgttttggggccagtttggaatcaagactcttaaatataggtctggcgggatggacgagaagaccattgcccttctggtggcgggcttggtgatcacagtcatcgtaattgtaggggcaatccttttcgttcctggcgaatactccttgaaaaacgctaccggccttggactgatagtcaccagcactggtatactgattctgctacactattatgtcttttccacagccatcggtttaactagctttgttatcgctatcctggttatccaggtcatcgcttacatccttgccgtcgttggcctgtccttgtgtatagctgcatgcatacccatgcatgggcctttgctcatctccggattgtctattctggctctcgcgcagttgctgggactggtttacatgaaattcgtcgcatccaaccagaaaacaatccagccacctaggaaagcggtggaggagcccttgaacgctttcaaggagtccaaggggatgatgaacgatgagtag

SEQ ID NO: 120966 - DNA, 972 bp, Artificial Sequence
  derived and/or modified sequence
atgtggcccctggtggccgccctgctgctgggcagcgcctgctgcggcagcgcccagctgctcttcaacaagaccaagtctgtggagttcaccttctgcaatgacacagtggtgatcccctgctttgtgaccaacatggaggcccagaacaccacagaggtgtatgtgaagtggaagttcaagggccgggacatctacacctttgatggagccctgaacaagagcacagtgcccacagacttcagcagcgccaagattgaggtgtcccagctgctgaagggagatgccagcctgaagatggacaagagtgatgctgtgagccacactggaaactacacctgtgaggtgacagagctgacccgggagggggagaccatcatcgagctgaagtacagagtggtgtcctggttcagccccaatgaaaacatcctgattgtcatcttccccatctttgccatcctgctcttctggggccagtttggcatcaagaccctgaagtacagaagtggcggcatggatgagaagaccatcgccctgctggtggccggcctggtgatcaccgtgattgtgattgtgggcgccatcctgtttgtgcctggagagtacagcctgaagaatgccaccggcctgggcctgattgtgaccagcacaggcatcctgatcctgctgcactactacgtgttcagcacagccatcggcctgaccagctttgtgattgccatcctggtgatccaggtgattgcctacatcctggccgtggtgggcctgagcctgtgcatcgccgcctgcatccccatgcacggccccctgctgatcagcggcctgagcatcctggccctggcccagctgctgggcctggtgtacatgaagtttgtggccagcaaccagaagaccatccagccccccaggaaggctgtggaggagcccctgaatgccttcaaggagagcaagggcatgatgaatgatgaatag

SEQ ID NO: 120967 - DNA, 972 bp, Artificial Sequence
  derived and/or modified sequence
atgtggcccctggtggccgccctgctgctgggcagcgcctgctgcgggagcgcacagctccttttcaacaagacaaagagcgtcgagttcactttctgtaacgatactgtggtaattccctgtttcgttacaaacatggaagcacaaaatactaccgaggtgtacgtaaagtggaaattcaagggtagagatatctatacttttgacggtgctcttaacaagtctactgtacccacagacttcagttccgctaaaatcgaagtatcccagctccttaagggagatgcttctctgaaaatggacaagtctgacgctgtgtcacacacagggaactatacttgcgaagttaccgaacttacccgagagggagaaacaattattgagcttaaatacagggtcgtgtcctggttctcgccaaatgaaaacatcctcatcgtaatcttcccaattttcgccatcctgctgttttggggccagtttgggattaagacattgaaatatcggtccggtggcatggatgaaaagaccatcgcactcctggttgcaggtttggtgatcacagttattgtgatcgtaggtgcgatccttttcgtgcctggcgaatattctcttaagaacgccaccggactaggtctgattgtaacctccacggggatcctcatcctcctacactactacgtgttctccaccgccatcgggctgacgtcgttcgtgattgccattttagtcatccaggtgatagcatacatcctggcagtcgtggggctgtcactgtgtatagccgcatgcatccctatgcacgggcccctgcttatcagcggcttatctatactggctttggcccaactactcggcttagtgtacatgaaattcgttgcatccaaccaaaaaacaatccagccccctcggaaagcagtagaggaacccctgaacgcctttaaggaatccaaaggtatgatgaatgatgagtag

SEQ ID NO: 120968 - DNA, 972 bp, Artificial Sequence
  derived and/or modified sequence
atgtggcctttggtcgcagcgctattgttgggatcagcttgttgcggctctgctcagttactcttcaataagacaaagtcggtcgagtttaccttctgtaatgataccgtggttattccttgcttcgttacaaatatggaggcccagaacacaaccgaagtttatgttaagtggaaattcaagggaagagacatctatacatttgacggggctctgaacaagtccacggtacccaccgacttttcttcagcgaagatcgaggtctctcagcttttgaagggcgatgcttcccttaagatggataagtccgacgccgtgtcacacaccggcaactacacctgtgaggtgactgagcttaccagagagggagagactatcattgagctgaagtaccgcgtagtgagctggttcagtcccaacgaaaacatcctcatcgtcatttttcctattttcgccatcctgctgttctgggggcaatttggtatcaaaacactgaagtatcggtctggcggaatggacgaaaaaactattgctcttctggtggctggcttggttattacagtgatcgttatagttggggcaatccttttcgttcccggagagtacagtctgaaaaacgcaacaggattaggactcatcgttaccagtaccggaattctgatactgttgcactactacgtgttttccaccgccattggcctcacaagctttgttatcgcaatcttagtgatccaggtgatcgcctacatcctggccgtggtgggactgagtttgtgtattgccgcttgtatcccgatgcacggaccattgcttatctcaggtctgtcgatattggcgctggctcagctgctcggtctggtttacatgaagttcgtggcaagcaatcagaagacgattcagcctccacgaaaagcagtggaagaacctttgaacgcgttcaaagaatccaagggcatgatgaatgacgaatag

SEQ ID NO: 120969 - DNA, 1285 bp, Artificial Sequence
  derived and/or modified sequence
tcctgcctgtgacgcgcggcggcggtcggtcctgcctgtaacggcggcggcggctgctgctccggacacctgcggcggcggcggcgaccccgcggcgggcgcggagatgtggcccctggtagcggcgctgttgctgggctcggcgtgctgcggatcagctcagctactatttaataaaacaaaatctgtagaattcacgttttgtaatgacactgtcgtcattccatgctttgttactaatatggaggcacaaaacactactgaagtatacgtaaagtggaaatttaaaggaagagatatttacacctttgatggagctctaaacaagtccactgtccccactgactttagtagtgcaaaaattgaagtctcacaattactaaaaggagatgcctctttgaagatggataagagtgatgctgtctcacacacaggaaactacacttgtgaagtaacagaattaaccagagaaggtgaaacgatcatcgagctaaaatatcgtgttgtttcatggttttctccaaatgaaaatattcttattgttattttcccaatttttgctatactcctgttctggggacagtttggtattaaaacacttaaatatagatccggtggtatggatgagaaaacaattgctttacttgttgctggactagtgatcactgtcattgtcattgttggagccattcttttcgtcccaggtgaatattcattaaagaatgctactggccttggtttaattgtgacttctacagggatattaatattacttcactactatgtgtttagtacagcgattggattaacctccttcgtcattgccatattggttattcaggtgatagcctatatcctcgctgtggttggactgagtctctgtattgcggcgtgtataccaatgcatggccctcttctgatttcaggtttgagtatcttagctctagcacaattacttggactagtttatatgaaatttgtggcttccaatcagaagactatacaacctcctaggaaagctgtagaggaaccccttaatgcattcaaagaatcaaaaggaatgatgaatgatgaataactgaagtgaagtgatggactccgatttggagagtagtaagacgtgaaaggaatacacttgtgtttaagcaccatggccttgatgattcactgttggggagaagaaacaagaaaagtaactggttgtcacctatgagacccttacgtgattgttagttaagtttttattcaaagcagctgtaatttagttaataaaataattatgatc

SEQ ID NO: 120970 - DNA, 972 bp, Artificial Sequence
  derived and/or modified sequence
atgtggcccctggtggccgccctgctgctgggcagcgcctgctgcggcagcgcccagctgctgttcaacaagaccaagagcgtggagttcaccttctgcaacgacaccgtggtgatcccctgcttcgtgaccaacatggaggcccagaacaccaccgaggtgtacgtgaagtggaagttcaagggcagagacatctacaccttcgacggcgccctgaacaagagcaccgtgcccaccgacttcagcagcgccaagatcgaggtgagccagctgctgaagggcgacgccagcctgaagatggacaagagcgacgccgtgagccacaccggcaactacacctgcgaggtgaccgagctgaccagagagggcgagaccatcatcgagctgaagtacagagtggtgagctggttcagccccaacgagaacatcctgatcgtgatcttccccatcttcgccatcctgctgttctggggccagttcggcatcaagaccctgaagtacagaagcggcggcatggacgagaagaccatcgccctgctggtggccggcctggtgatcaccgtgatcgtgatcgtgggcgccatcctgttcgtgcccggcgagtacagcctgaagaacgccaccggcctgggcctgatcgtgaccagcaccggcatcctgatcctgctgcactactacgtgttcagcaccgccatcggcctgaccagcttcgtgatcgccatcctggtgatccaggtgatcgcctacatcctggccgtggtgggcctgagcctgtgcatcgccgcctgcatccccatgcacggccccctgctgatcagcggcctgagcatcctggccctggcccagctgctgggcctggtgtacatgaagttcgtggccagcaaccagaagaccatccagccccccagaaaggccgtggaggagcccctgaacgccttcaaggagagcaagggcatgatgaacgacgagtag

SEQ ID NO: 120971 - protein, 243 aa, Artificial Sequence
  derived and/or modified sequence
MCSRGWDSCLALELLLLPLSLLVTSIQGHLVHMTVVSGSNVTLNISESLPENYKQLTWFYTFDQKIVEWDSRKSKYFESKFKGRVRLDPQSGALYISKVQKEDNSTYIMRVLKKTGNEQEWKIKLQVLDPVPKPVIKIEKIEDMDDNCYLKLSCVIPGESVNYTWYGDKRPFPKELQNSVLETTLMPHNYSRCYTCQVSNSVSSKNGTVCLSPPCTLARSFGVEWIASWLVVTVPTILGLLLT

SEQ ID NO: 120972 - DNA, 732 bp, Artificial Sequence
  derived and/or modified sequence
atgtgctcgagaggatgggacagctgcctagccttggaactcctgttgctaccactaagcctgcttgttactagcatacagggccacctggttcatatgaccgtggtgtcgggcagtaatgtcaccctaaacatctctgaaagcctacctgaaaattacaagcagctcacctggttttacacttttgatcagaaaatagtggagtgggactctcgcaagagtaagtatttcgagtctaagtttaagggccgcgtgcgcctggacccacagtctggggcgctgtacataagcaaagtgcaaaaagaagataactccacatacatcatgcgtgtgctgaaaaaaacggggaatgaacaggaatggaagatcaagctgcaagtgctggacccggttccaaaacccgtgattaagatcgagaagatcgaggacatggatgacaactgttacctcaagctgtcttgtgtgattccgggcgagtccgtgaactatacatggtatggagacaagcgccccttcccaaaggagctgcaaaattccgtgctggaaacaacgctgatgccgcataattattctcggtgctatacctgtcaagtatccaattccgtgtcgtccaagaatggcactgtgtgcctctcaccaccttgtactctggcccggtcgtttggggtagagtggatcgcgtcttggttagtggtgactgttccaactatcctaggactgctattgacctag

SEQ ID NO: 120973 - DNA, 732 bp, Artificial Sequence
  derived and/or modified sequence
atgtgcagccggggctgggacagctgcctggccctggagctgctgctgctgcccctgagcctgctggtgaccagcatccagggccacctggtgcacatgacagtggtgtctggcagcaatgtgaccctgaacatcagcgagagcctgcctgagaactacaagcagctgacctggttctacacctttgaccagaagatcgtggagtgggacagcaggaagagcaagtactttgagagcaagttcaagggccgggtgcggctggacccccagagcggggccctgtacatcagcaaggtgcagaaggaggacaacagcacctacatcatgagggtgctgaagaagacaggaaatgagcaggagtggaagatcaagctgcaggtgctggaccctgtgcccaagcctgtgatcaagattgagaagattgaggacatggatgacaactgctacctgaagctgagctgtgtgattcctggagagagcgtgaactacacctggtacggggacaagaggcccttccccaaggagctgcagaacagcgtgctggagaccaccctgatgccccacaactacagccgctgctacacctgccaggtgagcaacagcgtgagcagcaagaatggcaccgtgtgcctgagccccccctgcaccctggcccggagctttggagtggagtggatcgcctcctggctggtggtgacagtgcccaccatcctgggcctgctgctgacctag

SEQ ID NO: 120974 - DNA, 732 bp, Artificial Sequence
  derived and/or modified sequence
atgtgcagccggggctgggacagctgcctggccctggagctgctgttgctaccactgagtctgctagtgactagtatccaaggacacctggttcatatgacggtcgtgtcaggtagcaacgtcactctgaatatctccgagagtctgcccgagaactataagcaactaacttggttctatacatttgaccagaagatcgtagaatgggatagccgcaagtctaaatatttcgagtccaaatttaaagggagggtgcggctcgacccacaatctggggccttgtacatttccaaggtgcagaaagaagacaattccacatacatcatgagagttttgaaaaagacgggcaatgaacaggagtggaagatcaaattgcaggtgttggatccggtccctaaacctgttataaagattgaaaagattgaggatatggatgacaattgttacctgaaattatcatgtgttatccccggggaatcagtcaactatacatggtacggcgataagcgcccgttcccgaaagagctgcaaaattctgttctcgaaactaccctcatgcctcacaactatagtcggtgctatacttgtcaggtgtccaatagcgtgtcctctaagaacggcaccgtatgtctgagtcccccgtgtacactagctcgcagttttggtgttgaatggatcgctagctggctcgtggttaccgtgcctaccattctgggactgctgctcacctag

SEQ ID NO: 120975 - DNA, 732 bp, Artificial Sequence
  derived and/or modified sequence
atgtgtagccggggatgggactcatgcttggccttagagctgctcctacttcctctgagccttctcgttacgtccattcaaggacacctggtgcatatgacagtcgtgagtggttcaaacgtgacgctaaacattagcgaaagtttgccggagaattacaaacagctaacttggttctacaccttcgatcaaaagatcgtcgagtgggattcccgcaagagtaaatactttgagtccaagtttaagggaagggttaggcttgatcctcaatctggcgcactgtacattagcaaagtccagaaagaggacaattcaacctatatcatgcgggtattaaagaagacaggaaacgaacaggagtggaagattaaactgcaggttctggaccccgtgcctaagcctgtgatcaaaatagagaagattgaggacatggacgacaattgttatctgaagctcagttgcgtcattccaggcgaaagtgtaaactatacttggtacggagataagcgtccgtttcccaaggaactgcagaatagcgtactcgaaaccacactgatgcctcacaactacagtcgatgttatacatgtcaggtcagcaatagtgtcagcagtaagaacggaaccgtttgtttatcccccccatgcacattggcacgctcattcggtgtggaatggatagcttcctggctggttgtgacagtgccaactatcctcggcttactcctaacttag

SEQ ID NO: 120976 - DNA, 1126 bp, Artificial Sequence
  derived and/or modified sequence
gtttggtaagttccgtttttagccccggcctttttctagccaggctctcaactgtctcctgcgttgctgggaagttctggaaggaagcatgtgctccagaggttgggattcgtgtctggctctggaattgctactgctgcctctgtcactcctggtgaccagcattcaaggtcacttggtacatatgaccgtggtctccggcagcaacgtgactctgaacatctctgagagcctgcctgagaactacaaacaactaacctggttttatactttcgaccagaagattgtagaatgggattccagaaaatctaagtactttgaatccaaatttaaaggcagggtcagacttgatcctcagagtggcgcactgtacatctctaaggtccagaaagaggacaacagcacctacatcatgagggtgttgaaaaagactgggaatgagcaagaatggaagatcaagctgcaagtgcttgaccctgtacccaagcctgtcatcaaaattgagaagatagaagacatggatgacaactgttatctgaaactgtcatgtgtgatacctggcgagtctgtaaactacacctggtatggggacaaaaggcccttcccaaaggagctccagaacagtgtgcttgaaaccacccttatgccacataattactccaggtgttatacttgccaagtcagcaattctgtgagcagcaagaatggcacggtctgcctcagtccaccctgtaccctggcccggtcctttggagtagaatggattgcaagttggctagtggtcacggtgcccaccattcttggcctgttacttacctgagatgagctcttttaactcaagcgaaacttcaaggccagaagatcttgcctgttggtgatcatgctcctcaccaggacagagactgtataggctgaccagaagcatgctgctgaattatcaacgaggattttcaagttaacttttaaatactggttattatttaattttatatccctttgttgttttctagtacacagagatatagagatacacatgcttttttcccacccaaaattgtgacaacattatgtgaatgttttattattttttaaaataaacatttgatataattgtcaattaactgaa

SEQ ID NO: 120977 - DNA, 732 bp, Artificial Sequence
  derived and/or modified sequence
atgtgcagcagaggctgggacagctgcctggccctggagctgctgctgctgcccctgagcctgctggtgaccagcatccagggccacctggtgcacatgaccgtggtgagcggcagcaacgtgaccctgaacatcagcgagagcctgcccgagaactacaagcagctgacctggttctacaccttcgaccagaagatcgtggagtgggacagcagaaagagcaagtacttcgagagcaagttcaagggcagagtgagactggacccccagagcggcgccctgtacatcagcaaggtgcagaaggaggacaacagcacctacatcatgagagtgctgaagaagaccggcaacgagcaggagtggaagatcaagctgcaggtgctggaccccgtgcccaagcccgtgatcaagatcgagaagatcgaggacatggacgacaactgctacctgaagctgagctgcgtgatccccggcgagagcgtgaactacacctggtacggcgacaagagacccttccccaaggagctgcagaacagcgtgctggagaccaccctgatgccccacaactacagcagatgctacacctgccaggtgagcaacagcgtgagcagcaagaacggcaccgtgtgcctgagccccccctgcaccctggccagaagcttcggcgtggagtggatcgccagctggctggtggtgaccgtgcccaccatcctgggcctgctgctgacctag

SEQ ID NO: 120978 - protein, 199 aa, Artificial Sequence
  derived and/or modified sequence
MSSENCFVAENSSLHPESGQENDATSPHFSTRHEGSFQVPVLCAVMNVVFITILIIALIALSVGQYNCPGQYTFSMPSDSHVSSCSEDWVGYQRKCYFISTVKRSWTSAQNACSEHGATLAVIDSEKDMNFLKRYAGREEHWVGLKKEPGHPWKWSNGKEFNNWFNVTGSDKCVFLKNTEVSSMECEKNLYWICNKPYK

SEQ ID NO: 120979 - protein, 164 aa, Artificial Sequence
  derived and/or modified sequence
MSSENCFVAENSSLHPESGQENDATSPHFSTRHEGSFQVPVLCAVMNVVFITILIIALIALSVGQYNCPGQYTFSMPSDSHVSSCSEDWVGYQRKCYFISTVKRSWTSAQNACSEHGATLAVIDSEKDMNFLKRYAGREEHWVGLKKEPGHPWKWSNGKEFNNW

SEQ ID NO: 120980 - DNA, 495 bp, Artificial Sequence
  derived and/or modified sequence
atgtcgagtgagaactgcttcgtagccgagaatagctcactgcacccggaaagcggacaggagaacgatgctacctcccctcacttctccactagacacgaaggctcttttcaggtgcccgtcctttgtgccgttatgaacgttgttttcataacaattttaattatcgcccttatcgcgctgtctgtggggcaatacaattgccccgggcagtacacattctctatgccgagtgattctcacgtttccagttgcagtgaggactgggtcggttatcagcgaaagtgctatttcattagtacagtcaaacgttcatggacgtcggcgcaaaatgcttgtagcgaacacggcgctacactggcagtcattgatagcgaaaaagatatgaactttctgaagagatacgccggcagggaagaacattgggttggcctaaaaaaggaacctgggcatccttggaaatggtcaaacggaaaggaatttaataattggtag

SEQ ID NO: 120981 - DNA, 600 bp, Artificial Sequence
  derived and/or modified sequence
atgagcagtgagaattgtttcgtcgccgagaactcaagcctgcaccccgagagcggacaggaaaatgatgctacctcaccccacttctctacccgccatgagggtagttttcaggtccctgtgctgtgcgcagttatgaatgtcgtgttcatcacgatcctgattatcgccctaatagctctaagtgttggccaatacaactgcccaggccagtatacattctctatgccttctgactcacacgtgagcagctgctcagaagattgggtgggctaccaaaggaagtgctacttcataagtactgtgaagcggagttggacaagtgcgcagaatgcatgctccgaacatggcgcaacactcgctgttattgactcagaaaaagatatgaactttctcaaaagatacgccgggcgtgaagaacactgggtcgggctcaagaaagaaccggggcatccatggaaatggagtaatggtaaggagttcaataattggttcaacgtgactgggtcagataaatgcgtgttccttaagaacacggaggtcagttcaatggaatgcgaaaagaatctctattggatttgcaacaagccttataagtag

SEQ ID NO: 120982 - DNA, 495 bp, Artificial Sequence
  derived and/or modified sequence
atgagcagcgagaactgctttgtggccgagaacagcagcctgcaccctgagagcggccaggagaatgatgccaccagcccccacttcagcaccaggcatgagggcagcttccaggtgcctgtgctgtgtgctgtgatgaatgtggtgttcatcaccatcctgatcatcgccctgattgccctgtctgtgggccagtacaactgccccggccagtacaccttctccatgcccagcgacagccacgtgagcagctgcagcgaggactgggtgggctaccagaggaagtgctacttcatcagcacagtgaagaggtcctggaccagcgcccagaatgcctgcagcgagcacggggccaccctggccgtgattgattctgagaaggacatgaacttcctgaagagatatgccggccgggaggagcactgggtgggcctgaagaaggagcccggccacccctggaagtggagcaatggcaaggagttcaacaactggtag

SEQ ID NO: 120983 - DNA, 600 bp, Artificial Sequence
  derived and/or modified sequence
atgagcagcgagaactgctttgtggccgagaacagcagcctgcaccctgagagcggccaggagaatgatgccaccagcccccacttcagcaccaggcatgagggcagcttccaggtgcctgtgctgtgtgctgtgatgaatgtggtgttcatcaccatcctgatcatcgccctgattgccctgtctgtgggccagtacaactgccccggccagtacaccttctccatgcccagcgacagccacgtgagcagctgcagcgaggactgggtgggctaccagaggaagtgctacttcatcagcacagtgaagaggtcctggaccagcgcccagaatgcctgcagcgagcacggggccaccctggccgtgattgattctgagaaggacatgaacttcctgaagagatatgccggccgggaggagcactgggtgggcctgaagaaggagcccggccacccctggaagtggagcaatggcaaggagttcaacaactggttcaacgtgacaggcagtgacaagtgtgtgttcctgaagaacacagaggtgtcctccatggagtgtgagaagaacctgtactggatctgcaacaagccctacaagtag

SEQ ID NO: 120984 - DNA, 495 bp, Artificial Sequence
  derived and/or modified sequence
atgagcagcgagaactgcttcgtggccgagaacagcagcctgcacccagaaagcgggcaggaaaacgatgccacgtctccacactttagcactagacacgagggaagttttcaggtgccagtgctttgcgcagtgatgaatgtcgtgtttattacaatactgattatcgcattgattgccctgagtgtcggtcagtacaattgtcccggccaatatactttctctatgccctctgatagccacgtttcatcctgctcagaagattgggtggggtatcagcgcaagtgttattttatttcaacagttaaaagaagttggacctctgctcaaaatgcctgttcggagcacggcgctacactggcggtgatcgattcagagaaagatatgaactttttgaagcgctacgctgggcgggaagagcactgggtcggcctgaagaaagagcccggtcacccctggaagtggagcaacggcaaggaattcaacaattggtag

SEQ ID NO: 120985 - DNA, 600 bp, Artificial Sequence
  derived and/or modified sequence
atgagcagcgagaactgcttcgtggccgagaacagcagcctgcaccctgaatctgggcaggagaacgatgcaaccagtccccacttctctacaaggcacgaaggctcatttcaagtgccggtgctttgcgccgtaatgaacgtagttttcatcaccatcctgattatagctctgattgccctctcagtggggcagtacaattgccccggccaatacactttcagtatgccttccgattctcacgtttcgtcttgtagcgaagactgggttggctaccagcgcaagtgttactttataagcacagtcaagagaagctggaccagcgcacagaacgcatgctccgagcacggcgcaactttagccgtcatcgactctgagaaggacatgaacttccttaagcgatacgccggccgggaagagcactgggtcggacttaaaaaagaaccagggcacccctggaagtggagcaacggtaaagagtttaataactggttcaatgtgaccggctctgacaagtgcgtttttctcaagaacacagaagtgtcctccatggagtgtgagaaaaacctctactggatctgcaacaagccctacaaatag

SEQ ID NO: 120986 - DNA, 495 bp, Artificial Sequence
  derived and/or modified sequence
atgagctccgaaaactgttttgtggcagaaaactccagcttacatcctgaatcaggccaggagaacgacgcgacgtcgccgcacttctcaactcgacacgagggcagcttccaagttccagttctctgcgcagtgatgaatgtggtgttcataacgatactgattatagccctgattgcactcagcgtggggcagtataactgccccggtcaatacacattctcaatgccttccgactctcacgtctcctcatgcagtgaagactgggtaggataccagcgtaagtgctatttcataagtacggtgaagcggtcctggacctctgcccagaacgcctgtagtgagcacggtgccactctggccgtgatagatagcgagaaggacatgaatttcctaaagcggtacgccggaagagaggagcactgggtggggctgaagaaagagcctggccatccttggaagtggtcaaatggaaaggagttcaataactggtag

SEQ ID NO: 120987 - DNA, 600 bp, Artificial Sequence
  derived and/or modified sequence
atgagcagcgaaaattgcttcgtggccgagaattcgtccctgcacccagaatccggccaggagaacgacgctacttcaccacattttagtactcgacatgagggttcttttcaggtgccagtgttatgtgccgttatgaacgtggtattcataaccatcctcatcatcgccttaatcgcactgtcggtggggcagtacaattgtcctgggcagtacactttcagcatgccctcagacagccatgtgtcaagctgttctgaggactgggtgggctaccagcggaagtgttattttatatctactgtaaaacggagctggacatcagcccagaatgcctgttctgaacatggggctacactcgctgtgatcgactctgagaaggatatgaactttctgaagagatacgctggcagggaggaacactgggtgggcctcaaaaaagaaccaggtcacccttggaagtggagcaatggcaaggagtttaataattggtttaacgtaaccgggtcggacaagtgtgtgttcctcaagaacactgaggtgtcaagtatggagtgcgaaaaaaacctgtactggatttgcaataagccatataaatag

SEQ ID NO: 120988 - DNA, 1676 bp, Artificial Sequence
  derived and/or modified sequence
agactcaacaagagctccagcaaagactttcactgtagcttgacttgacctgagattaactagggaatcttgagaataaagatgagctctgaaaattgtttcgtagcagagaacagctctttgcatccggagagtggacaagaaaatgatgccaccagtccccatttctcaacacgtcatgaagggtccttccaagttcctgtcctgtgtgctgtaatgaatgtggtcttcatcaccattttaatcatagctctcattgccttatcagtgggccaatacaattgtccaggccaatacacattctcaatgccatcagacagccatgtttcttcatgctctgaggactgggttggctaccagaggaaatgctactttatttctactgtgaagaggagctggacttcagcccaaaatgcttgttctgaacatggtgctactcttgctgtcattgattctgaaaaggacatgaactttctaaaacgatacgcaggtagagaggaacactgggttggactgaaaaaggaacctggtcacccatggaagtggtcaaatggcaaagaatttaacaactggttcaacgttacagggtctgacaagtgtgtttttctgaaaaacacagaggtcagcagcatggaatgtgagaagaatttatactggatatgtaacaaaccttacaaataataaggaaacatgttcacttattgactattatagaatggaactcaaggaaatctgtgtcagtggatgctgctctgtggtccgaagtcttccatagagactttgtgaaaaaaaattttatagtgtcttgggaattttcttccaaacagaactatggaaaaaaaggaagaaattccaggaaaatctgcactgtgggcttttattgccatgagctagaagcatcacaggttgaccaataaccatgcccaagaatgagaagaatgactatgcaacctttggatgcactttatattattttgaatccagaaataatgaaataactaggcgtggacttactatttattgctgaatgactaccaacagtgagagcccttcatgcatttgcactattggaaggagttagatgttggtactagatactgaatgtaaacaaaggaattatggctggtaacataggtttttagtctaattgaatcccttaaactcagggagcatttataaatggacaaatgcttatgaaactaagatttgtaatatttctctctttttagagaaatttgccaatttactttgttatttttccccaaaaagaatgggatgatcatgtatttatttttttacttcctcagctgtagacaggtccttttcgatggtacatatttctttgcctttataatcttttatacagtgtcttacagagaaaagacataagcaaagactatgaggaatatttgcaagacatagaatagtgttggaaaatgtgcaatatgtgatgtggcaaatctctattaggaaatattctgtaatcttcagacctagaataatactagtcttataataggtttgtgactttcctaaatcaattctattacgtgcaatacttcaatacttcatttaaaatatttttatgtgcaataaaatgtatttgtttgtattttgtgttcagtacaattataagctgtttttatatatgtgaaataaaagtagaataaacacaa

SEQ ID NO: 120989 - DNA, 1020 bp, Artificial Sequence
  derived and/or modified sequence
agactcaacaagagctccagcaaagactttcactgtagcttgacttgacctgagattaactagggaatcttgagaataaagatgagctctgaaaattgtttcgtagcagagaacagctctttgcatccggagagtggacaagaaaatgatgccaccagtccccatttctcaacacgtcatgaagggtccttccaagttcctgtcctgtgtgctgtaatgaatgtggtcttcatcaccattttaatcatagctctcattgccttatcagtgggccaatacaattgtccaggccaatacacattctcaatgccatcagacagccatgtttcttcatgctctgaggactgggttggctaccagaggaaatgctactttatttctactgtgaagaggagctggacttcagcccaaaatgcttgttctgaacatggtgctactcttgctgtcattgattctgaaaaggacatgaactttctaaaacgatacgcaggtagagaggaacactgggttggactgaaaaaggaacctggtcacccatggaagtggtcaaatggcaaagaatttaacaactggtaagtctccagaagtctctttatattccccagggtggcatctcaggaaaatcactttccttttctcctttcaaagcactttaaatataaaggctgagctcttcaagagctctaacaatctcttctgaatgcgtatactctggaattctttaataacaggctttattattattctttttctttatccacacttataatacataaaataaatgcttatagtaatttttctcagcaaactctaatgtgagtagtagatctggttaatttggaaatatttcaataataattatgatgatgcaacaaaaacccattttcaatgtcacatttagtctttactaataagacagttgctggaaaataaatccttcttactatttctcagttttcatctccacagaataaagaatagtttcaatgcctaattatgagtttctatacacctgaaaga

SEQ ID NO: 120990 - DNA, 495 bp, Artificial Sequence
  derived and/or modified sequence
atgagcagcgagaactgcttcgtggccgagaacagcagcctgcaccccgagagcggccaggagaacgacgccaccagcccccacttcagcaccagacacgagggcagcttccaggtgcccgtgctgtgcgccgtgatgaacgtggtgttcatcaccatcctgatcatcgccctgatcgccctgagcgtgggccagtacaactgccccggccagtacaccttcagcatgcccagcgacagccacgtgagcagctgcagcgaggactgggtgggctaccagagaaagtgctacttcatcagcaccgtgaagagaagctggaccagcgcccagaacgcctgcagcgagcacggcgccaccctggccgtgatcgacagcgagaaggacatgaacttcctgaagagatacgccggcagagaggagcactgggtgggcctgaagaaggagcccggccacccctggaagtggagcaacggcaaggagttcaacaactggtag

SEQ ID NO: 120991 - DNA, 600 bp, Artificial Sequence
  derived and/or modified sequence
atgagcagcgagaactgcttcgtggccgagaacagcagcctgcaccccgagagcggccaggagaacgacgccaccagcccccacttcagcaccagacacgagggcagcttccaggtgcccgtgctgtgcgccgtgatgaacgtggtgttcatcaccatcctgatcatcgccctgatcgccctgagcgtgggccagtacaactgccccggccagtacaccttcagcatgcccagcgacagccacgtgagcagctgcagcgaggactgggtgggctaccagagaaagtgctacttcatcagcaccgtgaagagaagctggaccagcgcccagaacgcctgcagcgagcacggcgccaccctggccgtgatcgacagcgagaaggacatgaacttcctgaagagatacgccggcagagaggagcactgggtgggcctgaagaaggagcccggccacccctggaagtggagcaacggcaaggagttcaacaactggttcaacgtgaccggcagcgacaagtgcgtgttcctgaagaacaccgaggtgagcagcatggagtgcgagaagaacctgtactggatctgcaacaagccctacaagtag

SEQ ID NO: 120992 - protein, 359 aa, Artificial Sequence
  derived and/or modified sequence
MAEAITYADLRFVKAPLKKSISSRLGQDPGADDDGEITYENVQVPAVLGVPSSLASSVLGDKAAVKSEQPTASWRAVTSPAVGRILPCRTTCLRYLLLGLLLTCLLLGVTAICLGVRYLQVSQQLQQTNRVLEVTNSSLRQQLRLKITQLGQSAEDLQGSRRELAQSQEALQVEQRAHQAAEGQLQACQADRQKTKETLQSEEQQRRALEQKLSNMENRLKPFFTCGSADTCCPSGWIMHQKSCFYISLTSKNWQESQKQCETLSSKLATFSEIYPQSHSYYFLNSLLPNGGSGNSYWTGLSSNKDWKLTDDTQRTRTYAQSSKCNKVHKTWSWWTLESESCRSSLPYICEMTAFRFPD

SEQ ID NO: 120993 - protein, 120 aa, Artificial Sequence
  derived and/or modified sequence
MAEAITYADLRFVKAPLKKSISSRLGQDPGADDDGEITYENVQVPAVLGVPSSLASSVLGDKAAVKSEQPTASWRAVTSPAVGRILPCECACAGQPRGQVLAPVPAADGAGPRGVQLLPG

SEQ ID NO: 120994 - protein, 119 aa, Artificial Sequence
  derived and/or modified sequence
MAEAITYADLRFVKAPLKKSISSRLGQDPGADDDGEITYENVQVPAVLGVPSSLASSVLGDKAAVKSEQPTASWRAVTSPAVGRILPCRTTCLRYLLLGLLLTCLLLGVTAICLGVRCE

SEQ ID NO: 120995 - protein, 359 aa, Artificial Sequence [sequence omitted]

SEQ ID NO: 120996 - DNA, 1080 bp, Artificial Sequence
  derived and/or modified sequence
atggctgaggcaattacatacgcggatttgcggttcgtgaaggcacctttaaagaagagcatatcctcaaggctcgggcaggaccccggggccgatgatgacggcgaaattacctatgaaaacgtacaggtccctgcagtcctaggtgtgccgtcatctctcgcgtcttctgttctgggtgacaaagcggcggttaaatcagagcagccaaccgcgtcatggcgagcagttacgagcccggctgtaggccgcatcctgccttgcagaaccacttgcctgcgctacctgctcctggggctcctgttgacatgcctgttgctgggggtgaccgctatttgtcttggcgtgcgatacctgcaggtctcccaacagctccagcagaccaacagagtattagaagtcacaaacagctcactcagacagcagctgagactgaaaatcacacaactcggccagtcagcagaagacctgcaggggagtcgcagagagttagctcaatcacaggaagccctgcaagttgagcagcgcgcccaccaagctgcggagggccagttgcaggcttgtcaggccgatagacaaaaaacgaaggaaaccttacagtctgaagagcagcaaagaagagctctggaacagaagttgtctaacatggaaaatcgtttgaagcccttttttacgtgcggctctgcagatacatgctgccccagcggatggattatgcatcaaaaatcatgcttttacattagcttgacaagcaagaactggcaggagagccaaaagcaatgtgagacactaagctccaaattagcaactttcagcgagatatacccccaatcccacagttactacttccttaatagcttgttaccgaacgggggatcgggcaatagctattggactggactgagttctaacaaagactggaaattgacggatgacacacagagaacccgaacctacgcgcagagctctaagtgcaacaaagtgcataagacgtggagctggtggacacttgagtcagagtcttgtaggtcctccctgccatatatctgtgagatgaccgcattcagatttcctgattag

SEQ ID NO: 120997 - DNA, 1080 bp, Artificial Sequence
  derived and/or modified sequence
atggccgaggctatcacgtacgccgacctccgcttcgtcaaggcccccctgaagaaaagtattagcagcaggctgggtcaagaccccggagctgacgatgacggggagatcacctacgagaatgttcaagtgcccgcggtgcttggcgtgccctctagcctggcttcctctgtgttgggcgataaggctgccgttaaaagcgagcagcctacggccagctggcgtgcagtgacatccccagccgtgggccgtattctcccatgcaggactacttgcctaaggtatctgcttctgggattgttactcacctgcctgcttttaggtgtcaccgcgatttgcctcggagtccgttacctacaggtttcccagcaactccagcagaccaaccgggttctcgaggtgaccaattccagtctgcgccaacagctacggctaaaaatcacacaattaggccaaagtgccgaggatctgcaaggcagcagaagagagcttgcacagtcacaggaggcactgcaggtggaacagagggcccaccaggcagccgaaggtcagttacaggcgtgtcaggccgaccgccagaaaaccaaagaaactctgcagagtgaggagcagcagcggagagcactggagcagaagctctcaaacatggagaacagactgaaaccattttttacatgtggctccgccgatacgtgctgccccagcggatggataatgcaccagaagtcctgtttctacatatcactgacttctaaaaattggcaggagagtcagaaacagtgtgaaactctgtcttcgaagcttgccacattctcagaaatctatccccagtctcattcttactactttttaaacagcctgctgcccaatggcggcagcggcaactcctattggaccgggctgtcaagcaacaaggactggaagctgacagacgacacccagcgtacacggacatacgcacagtcaagtaagtgcaataaggtgcataagacatggagttggtggactcttgaatcagagtcatgcaggagttctctcccgtatatttgcgaaatgaccgcgtttcggttccctgattag

SEQ ID NO: 120998 - DNA, 1080 bp, Artificial Sequence
  derived and/or modified sequence
atgcagacgagaaatccccagagtcatggggagaatggtgccagcccttggtcttggggagaccgcctcggccccgggccggacccaggtgctgatgatgatggggaaattacatatgagaatgttcaggttcccgcagtattgggagttccttcttccctggcatcctccgtgctgggcgacaaggctgctgtgaaaagcgagcagcccaccgctagttggcgggccgtcactagcccagctgtgggccggattttgccatgtagaacgacatgcctgaggtacctgctgcttggactcctgttgacgtgtcttctgctgggtgtgaccgctatatgcctgggagtgcgctacctgcaggtgtcccagcagctccaacagacgaatagggttctcgaagtgacaaacagctccctgcgtcagcagcttaggctcaagataacccagctgggccaaagcgcagaggacctacagggcagtcgacgggagctggctcaaagtcaggaggctctccaggttgagcaacgggcccaccaggcagcggagggccagctgcaggcttgccaggccgacaggcagaagacaaaggaaacgttgcagtccgaggagcagcagaggagagcacttgagcagaagctgtccaatatggaaaaccggctcaagccgttctttacctgtgggtcggcggacacatgctgcccgagtggctggatcatgcaccagaagagctgcttctatattagtctgacctctaagaactggcaggaatctcagaagcagtgtgaaacactatcctctaagctcgcgacattctcggagatctacccacagtcccactcgtattacttcttgaattccctcctgccaaacggcgggtctggtaactcctactggactggcctgtccagcaacaaggactggaaattaacagatgatacccagcgaacaaggacctacgctcagtcatccaaatgtaacaaagttcataaaacctggagttggtggactctggagtcggaatcttgtagatcctctctgccttatatatgcgaaatgacggccttccgtttcccagattag

SEQ ID NO: 120999 - DNA, 1080 bp, Artificial Sequence
  derived and/or modified sequence
atggccgaggccatcacctacgccgacctgcgctttgtgaaggcccccctgaagaagagcatcagcagccggctgggccaggaccctggagcagatgatgatggagagatcacctatgaaaatgtgcaggtgcctgctgtgctgggcgtgcccagcagcctggccagctctgtgctgggggacaaggctgctgtgaagtctgagcagcccacagcctcctggagggctgtgaccagccctgctgtgggccgcatcctgccctgcaggaccacctgcctgcgctacctgctgctgggcctgctgctgacctgcctgctgctgggcgtgacagccatctgcctgggcgtgcgctacctgcaggtgtcccagcagctgcagcagaccaacagagtgctggaggtgaccaacagcagcctgcggcagcagctgcggctgaagatcacccagctgggccagagcgctgaggacctgcagggcagcagaagagagctggcccagagccaggaggccctgcaggtggagcagagggcccaccaggccgctgagggccagctgcaggcctgccaggccgaccggcagaagaccaaggagaccctgcagagcgaggagcagcagaggcgggccctggagcagaagctgagcaacatggagaaccggctgaagcccttcttcacctgtggcagcgctgacacctgctgccccagcggctggatcatgcaccagaagagctgcttctacatcagcctgaccagcaagaactggcaggagagccagaagcagtgtgagaccctgagcagcaagctggccaccttcagcgagatctacccccagagccacagctactacttcctgaacagcctgctgcccaacggcggcagcggcaacagctactggacaggcctgagcagcaacaaggactggaagctgacagatgacacccagaggaccaggacctacgcccagagcagcaagtgcaacaaggtgcacaagacctggagctggtggaccctggagagcgagagctgccgcagcagcctgccctacatctgtgagatgacagccttccgcttcccagactag

SEQ ID NO: 121000 - DNA, 1080 bp, Artificial Sequence
  derived and/or modified sequence
atgcagaccaggaacccccagagccatggagaaaatggagccagcccctggagctggggagaccggctgggccctggccctgaccctggagcagatgatgatggagagatcacctatgaaaatgtgcaggtgcctgctgtgctgggcgtgcccagcagcctggccagctctgtgctgggggacaaggctgctgtgaagtctgagcagcccacagcctcctggagggctgtgaccagccctgctgtgggccgcatcctgccctgcaggaccacctgcctgcgctacctgctgctgggcctgctgctgacctgcctgctgctgggcgtgacagccatctgcctgggcgtgcgctacctgcaggtgtcccagcagctgcagcagaccaacagagtgctggaggtgaccaacagcagcctgcggcagcagctgcggctgaagatcacccagctgggccagagcgctgaggacctgcagggcagcagaagagagctggcccagagccaggaggccctgcaggtggagcagagggcccaccaggccgctgagggccagctgcaggcctgccaggccgaccggcagaagaccaaggagaccctgcagagcgaggagcagcagaggcgggccctggagcagaagctgagcaacatggagaaccggctgaagcccttcttcacctgtggcagcgctgacacctgctgccccagcggctggatcatgcaccagaagagctgcttctacatcagcctgaccagcaagaactggcaggagagccagaagcagtgtgagaccctgagcagcaagctggccaccttcagcgagatctacccccagagccacagctactacttcctgaacagcctgctgcccaacggcggcagcggcaacagctactggacaggcctgagcagcaacaaggactggaagctgacagatgacacccagaggaccaggacctacgcccagagcagcaagtgcaacaaggtgcacaagacctggagctggtggaccctggagagcgagagctgccgcagcagcctgccctacatctgtgagatgacagccttccgcttcccagactag

SEQ ID NO: 121001 - DNA, 1080 bp, Artificial Sequence
  derived and/or modified sequence
atggccgaggccatcacctacgccgacctgcggttcgtgaaggccccccttaagaaatctatctccagccggttagggcaggacccgggagccgacgatgacggcgagattacatacgagaatgtacaggtgcccgccgtcctcggagtcccgagttctcttgccagtagtgtgctcggcgacaaggcagccgttaaatccgaacaacccaccgcatcctggcgggctgtcacttcccccgccgtgggacgcatcctgccctgcaggactacgtgtttgaggtacctgttgcttggacttctcctgacctgtctattacttggcgtgactgcgatttgtctgggcgtccgttatttgcaggtttcccagcagctgcaacagaccaacagggtcctggaggtaaccaacagcagtctgcggcagcaactgcggttgaagatcacgcaacttggccagtcagctgaggacctgcagggcagcagaagggagttggctcaaagccaggaagcattgcaggtggagcaacgagcacaccaggcagcagaaggtcagctgcaagcttgtcaggccgaccggcagaagacaaaggagactcttcagagtgaggagcagcaacgcagagctcttgagcagaagctgtccaacatggaaaatagactgaaaccattttttacatgcggctccgccgacacatgttgcccaagcggatggatcatgcaccaaaaaagttgtttttatatctcactcacaagcaagaactggcaggaaagtcagaagcagtgcgaaacgctgagcagtaagctcgcaacttttagcgagatctaccctcagtcccacagctattattttttgaacagccttttaccaaatggaggcagcggcaattcttactggactggactgtcctcaaataaggattggaaacttacagatgatacacagcgtacgcgcacctatgcacagtcatcaaagtgcaataaggtgcataagacgtggtcatggtggacattggaatccgagagctgtcgatcctctctgccctacatttgtgaaatgaccgctttccgattccctgattag

SEQ ID NO: 121002 - DNA, 1080 bp, Artificial Sequence
  derived and/or modified sequence
atggccgaggccatcacctacgccgacctgcggttcgtgaaggccccactcaagaaatccatctcctcacgactcggacaggaccctggcgctgacgatgacggggaaatcacatacgagaacgtgcaggtgccagcagttctaggtgtgcccagctccctggcttctagcgtgttgggcgataaagccgcggtgaagagcgaacagcccactgcctcttggcgggcagtcacgagtcctgcagtggggcgtatcctgccttgtcgcactacctgcctaagatatctgctgttggggttgctccttacttgcctgctgctaggggttacagccatatgcctcggagttaggtaccttcaggtttcgcagcaactgcaacagacgaatcgcgttctcgaagtcaccaactcatccctccggcagcagctgcggctcaagatcacacagttgggccagtccgccgaggacctccagggctcacgaagagaactcgctcaaagccaagaagctctccaggtggaacagcgagcccatcaagccgctgaggggcagctgcaagcctgtcaggctgacagacaaaagacgaaagagaccctgcaaagcgaagagcagcagcggagagccctcgaacagaagctttccaatatggagaaccgcctgaagccttttttcacgtgcggcagtgccgacacatgctgtccctccggatggatcatgcaccagaaaagctgtttctacattagcttgacctcaaagaattggcaggaaagtcaaaagcagtgtgagacacttagcagcaagctggcaactttttccgagatctatcctcagtcgcattcctactatttcctgaactcattgttgcctaatgggggatcaggcaatagctactggaccgggctgtcatccaataaggactggaagctgacagatgatactcagcgaactcgtacctacgctcagtccagcaaatgcaataaagtccataaaacgtggtcttggtggaccctagaatcagagtcatgtaggtcgtcactgccttacatatgtgaaatgacagctttccgcttccctgattag

SEQ ID NO: 121003 - DNA, 1080 bp, Artificial Sequence
  derived and/or modified sequence
atgcagacccggaacccccagagccacggcgagaacggcgccagcccttggtcatggggggatagactgggacctggacccgatcctggggcggacgacgacggagaaattacttacgaaaacgtccaagtccccgccgtgctgggcgtccccagcagccttgcatcttccgtgctgggcgacaaggccgctgtcaagagcgagcagcctacagctagctggagagcggtgactagccccgcagtgggaagaatacttccttgtcgcacaacatgcttacgctacttgctgctgggtttactgttgacttgtctgctgctgggagtcaccgctatatgtctgggagtgaggtacttgcaggtttctcagcaactccagcagaccaaccgcgtgctggaggtgacaaactcatcgctacgacagcagctgcgtctgaaaatcactcagctgggacagagtgctgaggacttgcagggctccagaagggaactggcccagagtcaggaagccctccaggttgaacagcgagcacaccaggctgctgaaggccagttacaggcctgccaggctgacaggcaaaagaccaaagagaccctgcagtctgaagagcagcaacgcagggcgctggagcagaaactgagcaatatggagaaccggctcaagccattctttacatgcggcagtgctgatacttgttgccccagtgggtggatcatgcatcagaagagttgtttttatatctctctcacaagcaaaaattggcaggagtcacagaagcaatgcgagaccctcagttccaaactggctaccttctccgaaatctacccacaatcccactcctactacttcttaaacagtcttctgcctaatggggggagcggaaactcttattggactggcctcagcagtaacaaggattggaaactgactgacgatactcagcgcacccgtacttacgcccaaagctctaaatgtaataaagtccataaaacttggagctggtggacccttgaaagtgagtcctgtcggagtagcctgccgtacatctgcgagatgacggcctttcgtttccccgattag

SEQ ID NO: 121004 - DNA, 1080 bp, Artificial Sequence
  derived and/or modified sequence
atggccgaggccattacctacgcagaccttaggtttgtgaaggccccactcaagaagagtatctcatctagacttggacaggatccaggggctgatgacgacggggagattacatatgaaaacgtccaggtaccggctgtgctcggcgttccttcctccctggcaagcagcgtcttgggagacaaagccgctgttaagtctgaacaacccacggcttcttggcgcgctgtcacctctcccgctgttggaaggatactaccttgccggactacctgcctcaggtacctgctgttgggcctgctgcttacctgcctgctgctgggcgttactgcaatctgtcttggcgtgcggtaccttcaggttagtcaacagctgcagcaaaccaatcgcgttttggaggtgactaacagcagcctgagacaacagctaaggcttaagattacccaattgggacagtctgccgaggatctgcagggctcaaggcgagagcttgcacaaagccaagaggccctgcaggtggagcagagagcccaccaagctgctgaagggcaactgcaggcttgtcaggcggatcgccaaaaaacaaaagagacgttgcagagtgaggaacagcaaagaagggccctggagcaaaaactgtcgaacatggaaaaccggctgaagccctttttcacctgtggctccgctgatacctgttgtcctagtggctggataatgcatcagaagtcctgcttctatatttccctgactagtaaaaactggcaggaatcgcagaagcagtgcgagacgctgtcgtcgaagttggccaccttcagcgaaatttatccccaaagccactcttactacttcttgaatagtttactgccaaatggcggatcgggaaattcatactggactggactttctagtaacaaagattggaaacttaccgatgacacccagaggacccgcacctacgcacagagcagcaagtgcaacaaagtgcacaagacgtggtcctggtggacactagagtctgagagctgccgctcttctttaccatatatttgtgaaatgactgccttccgatttccagactag

SEQ ID NO: 121005 - DNA, 1080 bp, Artificial Sequence
  derived and/or modified sequence
atggccgaggctatcacctacgcagatctccgctttgtcaaggcacccctgaagaagtctatcagcagcaggctgggacaggaccccggtgcagacgatgatggggagatcacgtacgagaacgtgcaagtgccagctgtgctaggcgtcccttctagtttagcatcttctgtgcttggggacaaggccgcagtgaagagtgagcagcccacggcatcctggcgggcagtaaccagccctgcggttgggcgtatcctgccgtgccgcaccacatgtctccgctatctcctgctggggctgttgttgacgtgtctcctcttaggggttaccgctatctgtttgggtgtccgctacctccaggtgtcacagcagctgcagcagacaaacagggtgctggaggtgacaaattccagcctgaggcagcagctgcgccttaagatcacacagcttggacagagtgccgaggacctccagggaagtagaagagaactcgctcagtcccaggaggctctgcaggttgagcagcgcgctcatcaagctgcagagggccagctgcaggcttgtcaggcagatagacagaagacgaaagaaacccttcagagtgaggagcagcaacggcgagcactggagcaaaagctttcgaatatggagaaccgattgaaaccattcttcacatgtggctcggcagatacgtgttgtccgagtgggtggatcatgcatcaaaaatcctgtttctacattagtttgacatcaaagaattggcaggaatctcagaagcagtgtgagactttgtctagcaaactggccactttcagcgagatttatccacaatcacactcatattattttctaaattcgttgctccctaatggtggctccgggaactcttactggacaggcctgagttcaaataaggactggaagctgactgacgatacacaaagaacgagaacttacgcccagagcagcaaatgcaataaagtccacaagacatggtcttggtggaccctcgaatcagagagctgccgctcttctctcccttacatttgcgagatgacagcttttaggttccctgactag

SEQ ID NO: 121006 - DNA, 1080 bp, Artificial Sequence
  derived and/or modified sequence
atgcagacccgcaacccacagagccacggagagaacggcgctagtccatggtcctggggtgacaggctcgggccaggtcctgatccgggagcagacgatgacggtgaaataacctacgagaatgttcaggtgcccgcagtactcggtgttccctcatccctggccagcagtgtgctgggagacaaagcagcagtgaagagtgaacagcccactgcctcctggagagcggttacttctcctgcagtcggtcgaattctgccctgtaggacgacatgccttcgctatctgctcttgggactcctccttacttgcctattactgggcgttacagcaatctgcctcggtgtgaggtatctccaggtatcacagcaacttcagcagaccaaccgggttctggaagtgaccaactcctcattaaggcagcagctgaggttgaagatcacccagctgggccaatccgccgaggacctccaaggtagccgcagagagttggcgcaaagtcaagaggccctgcaggtcgaacaacgggctcatcaggcggcagaagggcaactacaagcttgtcaagcggatcgacagaaaacgaaagagactctccagtctgaggaacagcagagacgggctctggagcagaaactctcaaacatggaaaaccgacttaagccattcttcacttgtggatcagccgacacctgttgccccagtggatggatcatgcaccagaaatcatgcttttacatttcgcttacatccaagaattggcaggagagccagaaacagtgcgagacactgtccagcaagcttgccaccttctccgagatctatcctcagtcgcatagttattatttccttaattctctcttgcccaacggtggctcaggcaactcttactggactggactctcctccaacaaagactggaaactcactgacgatacccagcgtacaagaacctatgcgcagtcgtcaaaatgtaacaaagtccacaagacctggtcatggtggacattagaatcggaatcttgtcgcagctccctgccgtacatttgcgaaatgacagccttcaggtttcctgactag

SEQ ID NO: 121007 - DNA, 1548 bp, Artificial Sequence
  derived and/or modified sequence
aattgctaagccgtgcagtcacagagggaacacagagcctagttgtaaacggacagagacgagaggggcaagggaggacagtggatgacagggaagacgagtgggggcagagctgctcaggaccatggctgaggccatcacctatgcagatctgaggtttgtgaaggctcccctgaagaagagcatctccagccggttaggacaggacccaggggctgatgatgatggggaaatcacctacgagaatgttcaagtgcccgcagtcctaggggtgccctcaagcttggcttcttctgtactaggggacaaagcagcggtcaagtcggagcagccaactgcgtcctggagagccgtgacgtcaccagctgtcgggcggattctcccctgccgcacaacctgcctgcgatacctcctgctcggcctgctcctcacctgcctgctgttaggagtgaccgccatctgcctgggagtgcgctatctgcaggtgtctcagcagctccagcagacgaacagggttctggaagtcactaacagcagcctgaggcagcagctccgcctcaagataacgcagctgggacagagtgcagaggatctgcaggggtccaggagagagctggcgcagagtcaggaagcactacaggtggaacagagggctcatcaggcggccgaagggcagctacaggcctgccaggcagacagacagaagacgaaggagaccttgcaaagtgaggagcaacagaggagggccttggagcagaagctgagcaacatggagaacagactgaagcccttcttcacatgcggctcagcagacacctgctgtccgtcgggatggataatgcatcagaaaagctgcttttacatctcacttacttcaaaaaattggcaggagagccaaaaacaatgtgaaactctgtcttccaagctggccacattcagtgaaatttatccacaatcacactcttactacttcttaaattcactgttgccaaatggtggttcagggaattcatattggactggcctcagctctaacaaggattggaagttgactgatgatacacaacgcactaggacttatgctcaaagctcaaaatgtaacaaggtacataaaacttggtcatggtggacactggagtcagagtcatgtagaagttctcttccctacatctgtgagatgacagctttcaggtttccagattaggacagtcctttgcactgagttgacactcatgccaacaagaacctgtgcccctccttcctaacctgaggcctggggttcctcagaccatctccttcattctgggcagtgcccagccaccggctgacccacacctgacacttccagccagtctgctgcctgctccctcttcctgaaactggactgttcctgggaaaagggtgaagccacctctagaagggactttggcctccccccaagaacttcccatggtagaatggggtgggggaggagggcgcacgggctgagcggataggggcggcccggagccagccaggcagttttattgaaatctttttaaataattg

SEQ ID NO: 121008 - DNA, 2035 bp, Artificial Sequence
  derived and/or modified sequence
caccaccaatcatccgagctgttggcatgtgtcacagggccaattgctaagccgtgcagtcacagagggaacacagagcctagttgtaaacggacagagacgagaggggcaagggaggacagtggatgacagggaagacgagtgggggcagagctgctcaggaccatggctgaggccatcacctatgcagatctgaggtttgtgaaggctcccctgaagaagagcatctccagccggttaggacaggacccaggggctgatgatgatggggaaatcacctacgagaatgttcaagtgcccgcagtcctaggggtgccctcaagcttggcttcttctgtactaggggacaaagcagcggtcaagtcggagcagccaactgcgtcctggagagccgtgacgtcaccagctgtcgggcggattctcccctgccgcacaacctgcctgcgatacctcctgctcggcctgctcctcacctgcctgctgttaggagtgaccgccatctgcctgggagtgcgctatctgcaggtgtctcagcagctccagcagacgaacagggttctggaagtcactaacagcagcctgaggcagcagctccgcctcaagataacgcagctgggacagagtgcagaggatctgcaggggtccaggagagagctggcgcagagtcaggaagcactacaggtggaacagagggctcatcaggcggccgaagggcagctacaggcctgccaggcagacagacagaagacgaaggagaccttgcaaagtgaggagcaacagaggagggccttggagcagaagctgagcaacatggagaacagactgaagcccttcttcacatgcggctcagcagacacctgctgtccgtcgggatggataatgcatcagaaaagctgcttttacatctcacttacttcaaaaaattggcaggagagccaaaaacaatgtgaaactctgtcttccaagctggccacattcagtgaaatttatccacaatcacactcttactacttcttaaattcactgttgccaaatggtggttcagggaattcatattggactggcctcagctctaacaaggattggaagttgactgatgatacacaacgcactaggacttatgctcaaagctcaaaatgtaacaaggtacataaaacttggtcatggtggacactggagtcagagtcatgtagaagttctcttccctacatctgtgagatgacagctttcaggtttccagattaggacagtcctttgcactgagttgacactcatgccaacaagaacctgtgcccctccttcctaacctgaggcctggggttcctcagaccatctccttcattctgggcagtgcccagccaccggctgacccacacctgacacttccagccagtctgctgcctgctccctcttcctgaaactggactgttcctgggaaaagggtgaagccacctctagaagggactttggcctccccccaagaacttcccatggtagaatggggtgggggaggagggcgcacgggctgagcggataggggcggcccggagccagccaggcagttttattgaaatctttttaaataattgcacgtgttagtctcatgtgtcagcaatgctgtgtctggttcagtgatccccacgggaacgcgagccggggggtcgactggaagtgctctgtcccttgagtccatgctggggctcccctacacggggagaagagccggtcagcccatctggaactggcactgtccagcaagtgtgctctgttcttacagggtgtcctgaaggccaaagttggaggcctgagaccacgggctccactgctaagagcgtgccccaggcagctgcaggctgggtgtgggtggcttggcgtggtgccctcggtggcagaggagactgcccgcctcacagttcaggttgcggtagcgggcaacagctggtgtggggcgggggcacatggacaggaagccaaagctgaaggggccgaggcagcagccaggacagggcagcccctcatcgggctcccggggagc

SEQ ID NO: 121009 - DNA, 1424 bp, Artificial Sequence
  derived and/or modified sequence
atgcaaaccaggaacccccagtctcatggggagaacggagcctcaccctggagctggggagatcgtctgggccctggcccagacccaggggctgatgatgatggggaaatcacctacgagaatgttcaagtgcccgcagtcctaggggtgccctcaagcttggcttcttctgtactaggggacaaagcagcggtcaagtcggagcagccaactgcgtcctggagagccgtgacgtcaccagctgtcgggcggattctcccctgccgcacaacctgcctgcgatacctcctgctcggcctgctcctcacctgcctgctgttaggagtgaccgccatctgcctgggagtgcgctatctgcaggtgtctcagcagctccagcagacgaacagggttctggaagtcactaacagcagcctgaggcagcagctccgcctcaagataacgcagctgggacagagtgcagaggatctgcaggggtccaggagagagctggcgcagagtcaggaagcactacaggtggaacagagggctcatcaggcggccgaagggcagctacaggcctgccaggcagacagacagaagacgaaggagaccttgcaaagtgaggagcaacagaggagggccttggagcagaagctgagcaacatggagaacagactgaagcccttcttcacatgcggctcagcagacacctgctgtccgtcgggatggataatgcatcagaaaagctgcttttacatctcacttacttcaaaaaattggcaggagagccaaaaacaatgtgaaactctgtcttccaagctggccacattcagtgaaatttatccacaatcacactcttactacttcttaaattcactgttgccaaatggtggttcagggaattcatattggactggcctcagctctaacaaggattggaagttgactgatgatacacaacgcactaggacttatgctcaaagctcaaaatgtaacaaggtacataaaacttggtcatggtggacactggagtcagagtcatgtagaagttctcttccctacatctgtgagatgacagctttcaggtttccagattaggacagtcctttgcactgagttgacactcatgccaacaagaacctgtgcccctccttcctaacctgaggcctggggttcctcagaccatctccttcattctgggcagtgcccagccaccggctgacccacacctgacacttccagccagtctgctgcctgctccctcttcctgaaactggactgttcctgggaaaagggtgaagccacctctagaagggactttggcctccccccaagaacttcccatggtagaatggggtgggggaggagggcgcacgggctgagcggataggggcggcccggagccagccaggcagttttattgaaatctttttaaataattg

SEQ ID NO: 121010 - DNA, 1080 bp, Artificial Sequence
  derived and/or modified sequence
atggccgaggccatcacctacgccgacctgagattcgtgaaggcccccctgaagaagagcatcagcagcagactgggccaggaccccggcgccgacgacgacggcgagatcacctacgagaacgtgcaggtgcccgccgtgctgggcgtgcccagcagcctggccagcagcgtgctgggcgacaaggccgccgtgaagagcgagcagcccaccgccagctggagagccgtgaccagccccgccgtgggcagaatcctgccctgcagaaccacctgcctgagatacctgctgctgggcctgctgctgacctgcctgctgctgggcgtgaccgccatctgcctgggcgtgagatacctgcaggtgagccagcagctgcagcagaccaacagagtgctggaggtgaccaacagcagcctgagacagcagctgagactgaagatcacccagctgggccagagcgccgaggacctgcagggcagcagaagagagctggcccagagccaggaggccctgcaggtggagcagagagcccaccaggccgccgagggccagctgcaggcctgccaggccgacagacagaagaccaaggagaccctgcagagcgaggagcagcagagaagagccctggagcagaagctgagcaacatggagaacagactgaagcccttcttcacctgcggcagcgccgacacctgctgccccagcggctggatcatgcaccagaagagctgcttctacatcagcctgaccagcaagaactggcaggagagccagaagcagtgcgagaccctgagcagcaagctggccaccttcagcgagatctacccccagagccacagctactacttcctgaacagcctgctgcccaacggcggcagcggcaacagctactggaccggcctgagcagcaacaaggactggaagctgaccgacgacacccagagaaccagaacctacgcccagagcagcaagtgcaacaaggtgcacaagacctggagctggtggaccctggagagcgagagctgcagaagcagcctgccctacatctgcgagatgaccgccttcagattccccgactag

SEQ ID NO: 121011 - DNA, 1080 bp, Artificial Sequence
  derived and/or modified sequence
atgcagaccagaaacccccagagccacggcgagaacggcgccagcccctggagctggggcgacagactgggccccggccccgaccccggcgccgacgacgacggcgagatcacctacgagaacgtgcaggtgcccgccgtgctgggcgtgcccagcagcctggccagcagcgtgctgggcgacaaggccgccgtgaagagcgagcagcccaccgccagctggagagccgtgaccagccccgccgtgggcagaatcctgccctgcagaaccacctgcctgagatacctgctgctgggcctgctgctgacctgcctgctgctgggcgtgaccgccatctgcctgggcgtgagatacctgcaggtgagccagcagctgcagcagaccaacagagtgctggaggtgaccaacagcagcctgagacagcagctgagactgaagatcacccagctgggccagagcgccgaggacctgcagggcagcagaagagagctggcccagagccaggaggccctgcaggtggagcagagagcccaccaggccgccgagggccagctgcaggcctgccaggccgacagacagaagaccaaggagaccctgcagagcgaggagcagcagagaagagccctggagcagaagctgagcaacatggagaacagactgaagcccttcttcacctgcggcagcgccgacacctgctgccccagcggctggatcatgcaccagaagagctgcttctacatcagcctgaccagcaagaactggcaggagagccagaagcagtgcgagaccctgagcagcaagctggccaccttcagcgagatctacccccagagccacagctactacttcctgaacagcctgctgcccaacggcggcagcggcaacagctactggaccggcctgagcagcaacaaggactggaagctgaccgacgacacccagagaaccagaacctacgcccagagcagcaagtgcaacaaggtgcacaagacctggagctggtggaccctggagagcgagagctgcagaagcagcctgccctacatctgcgagatgaccgccttcagattccccgactag

SEQ ID NO: 121012 - protein, 226 aa, Artificial Sequence
  derived and/or modified sequence
MPGGPGVLQALPATIFLLFLLSAVYLGPGCQALWMHKVPASLMVSLGEDAHFQCPHNSSNNANVTWWRVLHGNYTWPPEFLGPGEDPNGTLIIQNVNKSHGGIYVCRVQEGNESYQQSCGTYLRVRQPPPRPFLDMGEGTKNRIITAEGIILLFCAVVPGTLLLFRKRWQNEKLGLDAGDEYEDENLYEGLNLDDCSMYEDISRGLQGTYQDVGSLNIGDVQLEKP

SEQ ID NO: 121013 - DNA, 1258 bp, Artificial Sequence
  derived and/or modified sequence
tccactcacagcctgaagcatacccggcaggggctgtccccaggcccaacaagcaaagggcccagtagcgagggccactggagcccatctccggggggctgggcaggaagtagggtggggtttggggtagggatctggtaccctgggactgctgcaactcaaactaaccaacccactgggagaagatgcctgggggtccaggagtcctccaagctctgcctgccaccatcttcctcctcttcctgctgtctgctgtctacctgggccctgggtgccaggccctgtggatgcacaaggtcccagcatcattgatggtgagcctgggggaagacgcccacttccaatgcccgcacaatagcagcaacaacgccaacgtcacctggtggcgcgtcctccatggcaactacacgtggccccctgagttcttgggcccgggcgaggaccccaatggtacgctgatcatccagaatgtgaacaagagccatgggggcatatacgtgtgccgggtccaggagggcaacgagtcataccagcagtcctgcggcacctacctccgcgtgcgccagccgccccccaggcccttcctggacatgggggagggcaccaagaaccgaatcatcacagccgaggggatcatcctcctgttctgcgcggtggtgcctgggacgctgctgctgttcaggaaacgatggcagaacgagaagctcgggttggatgccggggatgaatatgaagatgaaaacctttatgaaggcctgaacctggacgactgctccatgtatgaggacatctcccggggcctccagggcacctaccaggatgtgggcagcctcaacataggagatgtccagctggagaagccgtgacacccctactcctgccaggctgcccccgcctgctgtgcacccagctccagtgtctcagctcacttccctgggacattctcctttcagcccttctgggggcttccttagtcatattcccccagtggggggtgggagggtaacctcactcttctccaggccaggcctccttggactcccctgggggtgtcccactcttcttccctctaaactgccccacctcctaacctaatccccccgccccgctgcctttcccaggctcccctcaccccagcgggtaatgagcccttaatcgctgcctctaggggagctgattgtagcagcctcgttagtgtcaccccctcctccctgatctgtcagggccacttagtgataataaattcttcccaactgca

SEQ ID NO: 121014 - DNA, 681 bp, Artificial Sequence
  derived and/or modified sequence
atgcccggaggcccgggcgtgctccaggcactcccggcgactatcttcttactgtttttgctctccgcggtgtaccttggacccgggtgccaggctctgtggatgcacaaggtaccggcttcactgatggtttctcttggggaagacgctcatttccaatgtcctcacaactctagcaataacgccaatgttacctggtggagggttctacacgggaattatacctggcccccggaatttctgggaccgggggaggaccccaatggtactctcattattcagaacgtgaataagtctcatgggggtatttacgtctgcagggtgcaggagggaaatgagtcttaccagcaatcatgcggcacatatctacgcgtgcgccagcctccaccccgcccatttttagacatgggggagggaactaagaaccgaatcataactgccgagggcatcatcttgctcttctgcgcagtggtgcctgggacgttgctcctctttcgaaaaaggtggcaaaatgaaaaactgggcctggacgcaggtgacgaatacgaggatgagaacctgtacgagggtctgaacctcgatgattgttcaatgtacgaagatataagcaggggcctgcagggaacataccaggacgtcgggagtttaaacatcggcgatgtgcaactggaaaaaccttag

SEQ ID NO: 121015 - DNA, 681 bp, Artificial Sequence
  derived and/or modified sequence
atgcctgggggccctggggtgctgcaggccctgcctgccaccatcttcctgctcttcctgctgtctgctgtgtacctgggccctggctgccaggccctgtggatgcacaaggtgcctgccagcctgatggtgtccctgggggaggatgcccacttccagtgcccccacaacagcagcaacaatgccaacgtgacctggtggagggtgctgcacggcaactacacctggcccccagagttcctgggccctggagaggaccccaacggcaccctcatcatccagaatgtgaacaagagccacggcggcatctacgtgtgccgggtgcaggagggcaatgaaagctaccagcagagctgtggcacctacctgcgggtgcggcagcccccaccccggcccttcctggacatgggagagggcaccaagaaccgcatcatcacagctgagggcatcatcctgctcttctgtgctgtggtgcccggcaccctgctgctcttcaggaagcgctggcagaatgagaagctgggcctggatgctggagatgaatatgaagatgagaacctgtatgagggcctgaacctggatgactgcagcatgtatgaggacatcagccggggcctgcagggcacctaccaggatgtgggcagcctgaacattggagatgtgcagctggagaagccctag

SEQ ID NO: 121016 - DNA, 681 bp, Artificial Sequence
  derived and/or modified sequence
atgcccggcggccccggcgtgctgcaggccctgcccgccaccatcttcctcctcttcctcctgagtgctgtctacctcgggccagggtgccaggccctttggatgcacaaggtacccgcttccttaatggtcagcttgggggaggatgctcattttcagtgtccgcacaacagcagcaacaatgccaatgtgacctggtggagagttttgcacgggaactacacctggcctccggagtttctcggaccgggcgaggacccaaatggaaccctcattatacaaaacgtaaataaaagccatggaggcatttatgtgtgccgcgtccaggaaggtaacgaatcctaccagcagtcctgcggcacctatctgagagtccgtcagcctcctcctcggccatttctcgacatgggagaaggcaccaaaaatcggattattacagccgaggggatcattctgttgttttgcgccgtggtccccggaacactactgttgtttaggaagcgatggcagaatgagaaactaggactcgacgcgggcgatgaatatgaagacgagaatttgtatgaggggctcaacctggacgattgcagtatgtacgaggatatctctcgtggcctccagggtacatatcaagatgtagggagtctcaatattggagatgtgcagttggaaaagccttag

SEQ ID NO: 121017 - DNA, 681 bp, Artificial Sequence
  derived and/or modified sequence
atgcctggcggtcctggggtgcttcaggctctgccagctaccatctttttactcttcctgttgagcgccgtgtacctcggcccagggtgccaagccctatggatgcataaggtgcctgcctcactgatggtgagccttggcgaggacgcccactttcaatgcccccacaatagcagcaacaacgctaacgtgacctggtggagggtgctgcacggtaactatacatggccccctgagtttctgggccctggggaagatcccaacggcacactaatcatccagaacgttaacaaatcacacggcggtatctacgtatgtcgggtgcaggagggcaacgagtcctaccaacagagttgcggcacttatttgcgggtgaggcaacctccccctagacccttcctcgatatgggggaagggactaagaatcggattatcacagcggaggggatcattctactcttttgcgctgtggtccccggaacactgctgctgtttagaaagcgctggcagaatgagaagctgggcctggatgcaggggacgaatatgaagacgaaaacctctacgaaggtctgaacttagatgactgttcaatgtatgaggacatcagccgaggtctacaggggacataccaggacgtggggtcactgaacattggagatgtgcagctggagaaaccatag

SEQ ID NO: 121018 - DNA, 681 bp, Artificial Sequence
  derived and/or modified sequence
atgcccggcggccccggcgtgctgcaggccctgcccgccaccatcttcctgctgttcctgctgagcgccgtgtacctgggccccggctgccaggccctgtggatgcacaaggtgcccgccagcctgatggtgagcctgggcgaggacgcccacttccagtgcccccacaacagcagcaacaacgccaacgtgacctggtggagagtgctgcacggcaactacacctggccccccgagttcctgggccccggcgaggaccccaacggcaccctgatcatccagaacgtgaacaagagccacggcggcatctacgtgtgcagagtgcaggagggcaacgagagctaccagcagagctgcggcacctacctgagagtgagacagcccccccccagacccttcctggacatgggcgagggcaccaagaacagaatcatcaccgccgagggcatcatcctgctgttctgcgccgtggtgcccggcaccctgctgctgttcagaaagagatggcagaacgagaagctgggcctggacgccggcgacgagtacgaggacgagaacctgtacgagggcctgaacctggacgactgcagcatgtacgaggacatcagcagaggcctgcagggcacctaccaggacgtgggcagcctgaacatcggcgacgtgcagctggagaagccctag

SEQ ID NO: 121019 - protein, 742 aa, Artificial Sequence
  derived and/or modified sequence
MGGRVFLAFCVWLTLPGAETQDSRGCARWCPQNSSCVNATACRCNPGFSSFSEIITTPTETCDDINECATPSKVSCGKFSDCWNTEGSYDCVCSPGYEPVSGAKTFKNESENTCQDVDECSSGQHQCDSSTVCFNTVGSYSCRCRPGWKPRHGIPNNQKDTVCEDMTFSTWTPPPGVHSQTLSRFFDKVQDLGRDSKTSSAEVTIQNVIKLVDELMEAPGDVEALAPPVRHLIATQLLSNLEDIMRILAKSLPKGPFTYISPSNTELTLMIQERGDKNVTMGQSSARMKLNWAVAAGAEDPGPAVAGILSIQNMTTLLANASLNLHSKKQAELEEIYESSIRGVQLRRLSAVNSIFLSHNNTKELNSPILFAFSHLESSDGEAGRDPPAKDVMPGPRQELLCAFWKSDSDRGGHWATEGCQVLGSKNGSTTCQCSHLSSFAILMAHYDVEDWKLTLITRVGLALSLFCLLLCILTFLLVRPIQGSRTTIHLHLCICLFVGSTIFLAGIENEGGQVGLRCRLVAGLLHYCFLAAFCWMSLEGLELYFLVVRVFQGQGLSTRWLCLIGYGVPLLIVGVSAAIYSKGYGRPRYCWLDFEQGFLWSFLGPVTFIILCNAVIFVTTVWKLTQKFSEINPDMKKLKKARALTITAIAQLFLLGCTWVFGLFIFDDRSLVLTYVFTILNCLQGAFLYLLHCLLNKKVREEYRKWACLVAGGSKYSEFTSTTSGTGHNQTRALRASESGI

SEQ ID NO: 121020 - DNA, 2229 bp, Artificial Sequence
  derived and/or modified sequence
atgggcggtcgcgtcttccttgcattctgtgtgtggctgacactccccggtgccgagacacaggacagccgcggatgcgcacgctggtgtccccagaatagtagttgtgtcaatgccacagcctgtcgatgtaatcctggctttagcagcttctccgaaatcattacaacaccaaccgaaacttgtgatgacatcaacgaatgtgctacccccagcaaagtcagctgcggcaagttcagcgattgctggaacactgagggttcttacgactgtgtctgtagccccggatacgaacccgtgtctggtgcaaagaccttcaaaaatgaaagtgaaaatacgtgccaggacgtggatgagtgttcctccggacagcaccagtgcgatagttcgactgtttgcttcaataccgtcggaagttactcttgtcgctgtagaccaggatggaagccccgacacggcatacctaataaccagaaagacactgtatgtgaagacatgacattctctacctggacaccccctcccggtgtccattcacaaaccctgtcaagatttttcgacaaagtgcaggatctgggccgtgacagtaagaccagctctgccgaggtcaccatccagaacgttatcaagctggtggatgaattgatggaagccccaggtgacgtggaggcattggcaccccctgtgcggcatttgattgctacccagttactcagcaatctggaggacattatgcgaatcctcgccaagtctcttcccaaaggtcctttcacctacatctctccaagtaacacagagttaaccctgatgatccaggaaaggggagacaaaaacgtgaccatgggccagtctagtgccagaatgaaactcaactgggccgtcgctgccggtgccgaggatccgggaccggcagtggctggaattctcagcattcaaaacatgacaaccctcctggcaaacgctagtctcaacttgcactccaaaaagcaggcagagcttgaggaaatctatgagagctcaatccggggggtccaactgcgccggctctctgcggtgaattccatcttcctgtctcataacaacactaaagagttaaattcccccatcctcttcgccttctcccacctggaaagctccgacggagaagccggtagggaccccccagccaaggatgtgatgcctggccccagacaggaactgctctgtgctttttggaagtcggatagcgatcgcggcggccactgggccacagaagggtgccaggttctcggctccaaaaatgggagcaccacttgccaatgcagtcacctaagctcctttgccatactgatggcacattatgacgtcgaggattggaaattaacacttataacacgcgttgggctggcactgagcttgttctgtctgttgctttgtattttgacttttctgttagtgcgaccaatccagggaagccgcactaccatacatctgcatctatgcatctgtctgtttgtcgggagtacaattttccttgccgggatagagaatgaaggtgggcaagtgggactcaggtgtaggctggtggccggactattgcattattgctttttagctgccttctgctggatgtctctggagggtttggaactctacttcctggtggtgagggtctttcaggggcagggactgtccaccagatggctgtgcttgatcggttatggagttccgctgttgattgtaggagtgagcgctgctatctacagcaagggatacggccgacccaggtactgttggctcgatttcgaacagggctttctgtggtcatttttgggaccagtaacattcatcatcctttgcaatgctgttattttcgtcacaactgtgtggaaacttacacagaagttctcggagattaaccctgacatgaagaaactgaaaaaagctcgcgccctgacgataaccgcgattgcccagctttttttgcttggttgtacatgggtctttggcctgtttattttcgatgaccgcagcctggtccttacttacgtgttcaccattttgaactgcctccagggtgccttcctctacttgctccactgcctgcttaataagaaagtccgtgaagagtaccgaaagtgggcctgtcttgtagcaggtggttcaaaatacagtgagttcacctccaccacttccggtaccggccacaaccagacgcgggcactgcgagcaagtgaatcaggtatttag

SEQ ID NO: 121021 - DNA, 2229 bp, Artificial Sequence
  derived and/or modified sequence
atgggcggccgggtcttcctggccttctgtgtgtggctgaccctgcccggggctgagacccaggacagccggggctgtgcccgctggtgcccccagaacagcagctgtgtgaatgccacagcctgccgctgcaaccctggcttcagcagcttcagcgagatcatcaccacccccacagagacctgtgatgacatcaatgaatgtgccacccccagcaaggtgtcctgtgggaagttcagtgactgctggaacacagagggcagctatgactgtgtgtgcagccctggctatgagcctgtgtctggggccaagaccttcaagaatgaaagtgagaacacctgccaggatgtggatgaatgtagcagcggccagcaccagtgtgacagcagcacagtgtgcttcaacacagtgggcagctacagctgccgctgccggcccggctggaagcccaggcatggcatccccaacaaccagaaggacacagtgtgtgaggacatgaccttcagcacctggaccccacctcctggggtgcacagccagaccctgagccgcttctttgacaaggtgcaggacctgggccgggacagcaagaccagcagcgctgaggtgaccatccagaatgtcatcaagctggtggatgagctgatggaggcccctggagatgtggaggccctggcccctcctgtgcgccacctgattgccacccagctgctgagcaacctggaggacatcatgaggatcctggccaagagcctgcccaagggccccttcacctacatcagccccagcaacacagagctgaccctgatgatccaggagcggggggacaagaatgtgaccatgggccagagcagcgccaggatgaagctgaactgggccgtggccgccggggctgaagatcctggccctgctgtggccggcatcctgagcatccagaacatgaccaccctgctggccaatgccagcctgaacctgcacagcaagaagcaggccgagctggaggagatctatgagagcagcatccggggcgtgcagctgcggcggctgtctgctgtgaacagcatcttcctgagccacaacaacaccaaggagctgaacagccccatcctgtttgccttcagccacctggagagcagtgatggagaggccggccgggaccccccagccaaggatgtgatgcctggcccccggcaggagctgctgtgtgccttctggaagagtgacagcgaccggggcggccactgggccacagagggctgccaggtgctgggcagcaagaatggcagcaccacctgccagtgcagccacctgagcagctttgccatcctgatggcccactatgatgtggaggactggaagctgaccctcatcaccagggtgggcctggccctgagcctcttctgcctgctgctgtgcatcctgaccttcctgctggtgcggcccatccagggcagcaggaccaccatccacctgcacctgtgcatctgcctgtttgtgggcagcaccatcttcctggccggcattgaaaatgaaggaggccaggtgggcctgcgctgccgcctggtggccggcctgctgcactactgcttcctggccgccttctgctggatgagcctggagggcctggagctgtacttcctggtggtgcgggtcttccagggccagggcctgagcacccgctggctgtgcctgattggctatggagtgcccctgctgattgtgggcgtgtctgctgccatctacagcaagggctacggccggccccgctactgctggctggactttgagcagggcttcctgtggagcttcctgggccctgtgaccttcatcatcctgtgcaatgctgtgatctttgtgaccaccgtgtggaagctgacccagaagttcagcgagatcaacccagacatgaagaagctgaagaaggcccgggccctgaccatcacagccatcgcccagctgttcctgctgggctgcacctgggtgtttggcctcttcatctttgatgacaggagcctggtgctgacctacgtgttcaccatcctgaactgcctgcagggcgccttcctgtacctgctgcactgcctgctgaacaagaaggtgcgggaggagtacaggaagtgggcctgcctggtggccggcggcagcaagtacagcgagttcaccagcaccaccagcggcaccggccacaaccagacccgggccctgcgggccagcgagagcggcatctag

SEQ ID NO: 121022 - DNA, 2229 bp, Artificial Sequence
  derived and/or modified sequence
atgggcggccgggtgttcctggccttctgcgtgtggctgaccctgccaggtgctgagacccaagattcacgtggatgcgctcggtggtgtccacaaaatagctcctgtgttaacgccactgcctgcagatgcaacccaggcttctcaagcttcagtgagattattacaaccccaacagagacatgcgatgacatcaacgagtgcgccacccctagtaaggtctcctgtggtaaattcagcgactgttggaacacggaagggtcatatgattgcgtgtgcagtcccggctatgaacctgtgtctggcgcaaaaacattcaagaacgagagtgaaaatacttgccaggatgtggacgagtgctctagcgggcagcaccagtgtgacagctcaacagtgtgtttcaataccgtcggcagctacagctgcaggtgccgccccggatggaaaccaaggcacggcattcctaacaatcagaaggacacagtctgcgaggacatgacttttagcacctggaccccccctccaggagtccactctcagacgctgagcaggtttttcgacaaggtgcaggacctaggccgagattcgaaaacatcgagcgctgaagtcacaatccagaacgttattaagctggtagacgagctcatggaggctcctggcgacgtcgaagctctggcccccccggtgagacatctcattgcgacccagctcctttctaacttagaggacatcatgcgaatcctggccaagtctctacctaaagggcccttcacctatatcagccccagcaataccgagcttaccctcatgattcaggaacggggagacaaaaatgtgacaatgggccagtcttccgccagaatgaagctgaattgggccgttgcagctggggcagaggatcccggcccagccgttgctggtatcctgagcatccagaatatgacgactctcctcgccaatgcctccctcaatctgcattccaagaagcaagcagaactggaagaaatttacgagtcttctatcagaggcgtgcaactacgaagactgagcgccgtaaattccatctttctgtcacacaacaacaccaaggaactaaattcgcctattctttttgccttctctcacttagagagctccgacggggaggctggtagagacccaccagcaaaagacgtgatgccagggccccggcaggaactcttatgcgctttctggaaaagcgacagcgatcgcggtgggcactgggccacagagggctgtcaagtcttagggtcaaaaaatggctctacaacgtgccaatgcagccatttgagctcctttgctatccttatggcacactatgatgtagaggactggaaactcaccctgatcacacgagttggcctggcactcagcctcttctgccttctgctgtgtattctgacattcttactggtgaggcctatccaggggagcagaactaccatacatctgcacctttgcatctgccttttcgtagggtccaccatttttttggccggaatcgagaacgagggaggccaagtcgggttacggtgccggctcgttgccgggttgctgcactattgtttcctcgcagccttttgctggatgagtctcgagggactcgagctatattttctcgtggtgagggtcttccagggacagggcctcagcacccggtggctctgtcttatcggttacggcgtacctctcctcattgtcggagtcagtgctgccatatactcaaagggatatggaagacctaggtactgttggctggactttgaacaggggttcctgtggtctttcctgggtcccgtaacctttatcatcttatgcaatgctgtcattttcgtgacaacagtttggaaactgacacagaaattcagcgagatcaatccagacatgaaaaagttaaagaaagcgcgagcactgactatcactgccatcgcgcaactctttttattgggatgtacatgggtttttggtttgtttatttttgatgaccgaagcctagtcctgacttacgtgtttaccatactcaattgcctgcagggcgcatttttatatctcctccactgtctcttaaataagaaagtcagagaagaatacaggaagtgggcctgtctggtggcaggcggatctaagtactcagagtttacatcgaccacctcaggcacaggtcataaccaaacaagggccctcagagcttccgagtctggcatttag

SEQ ID NO: 121023 - DNA, 2229 bp, Artificial Sequence
  derived and/or modified sequence
atgggagggagggtattcctcgctttctgtgtttggctaacccttcccggagccgagacccaagacagcaggggctgcgcaaggtggtgtccccagaattcttcctgcgtgaatgccacagcctgtcgctgcaaccccggattttctagttttagtgagattataactacaccgactgaaacatgcgacgacattaacgagtgcgccactccctcaaaggtctcatgtggcaagttcagcgattgctggaatacagagggcagttatgattgcgtgtgctccccgggatacgagccagtgtctggagcaaaaactttcaagaacgaatctgaaaacacttgtcaagatgtggatgagtgttccagcggccagcaccaatgcgattcctcaacggtgtgtttcaacactgtcgggtcttatagttgccgttgtcgccctgggtggaaacctcgacacggaatacccaataatcaaaaggacacagtgtgtgaggacatgactttctctacctggactccacccccaggcgtgcattctcagactttatctagattcttcgacaaggtgcaggacctgggtcgcgactccaagacatccagcgcggaagtgacgatccagaacgtgataaagttagtggacgagttgatggaggcgccaggagacgtggaggccttggcccctcccgtgaggcacctgatagctacacagctgctgtctaaccttgaggacatcatgagaatcctggccaagtccctgcctaagggcccattcacgtacatttctcccagtaataccgagttgacactgatgattcaggaacgtggagacaagaatgtgacaatgggtcaaagctccgctcggatgaaattaaactgggcagtggccgcaggagccgaggatcccggaccggcagtcgccggaattctgagcattcagaatatgactactcttctggcaaacgcgtcactcaacctgcatagtaagaagcaagccgagctagaggaaatctacgagagttccattaggggtgtccaattgcggagactctccgctgttaactctatctttctgtctcataataacactaaagaactgaactcaccaatactgtttgctttttctcatctggaatcttcagacggcgaggctgggagggaccccccagcgaaggatgtgatgcccggtccacgacaggaactcctctgcgccttctggaagtcagactcggatcggggaggtcactgggccaccgaagggtgtcaggtgttggggtctaagaacggctcaacaacatgccagtgtagccatctcagctcctttgccattctgatggcacactacgacgtggaagactggaaattgactctcatcacgcgcgtcggcctcgcccttagcctcttctgtctgctgctctgtatactgacattcctattggtgcggcctatccagggaagccgaacaaccatccacctgcatctgtgcatctgtctgttcgtcggtagtacgatcttcctcgctggaattgagaatgaaggcggtcaggtgggtctgcggtgcaggctggtggctgggctcctccattattgcttccttgcagctttttgctggatgtccctcgagggtctcgagctgtactttctggttgtgagggtttttcaagggcagggcctctcaacacgctggttatgccttattggctatggcgtgccgttgctcatcgttggagtcagcgcagccatctattcgaaaggctacggacgacctagatactgctggctggacttcgagcagggatttttgtggtcattcctcggccctgttaccttcatcattctctgtaacgctgttattttcgttactacggtctggaaactcacccaaaaattctcagagatcaatcccgacatgaaaaagttaaaaaaagcacgcgctctgacaatcacagccattgcgcagcttttcctactcggttgcacctgggtgttcggacttttcatattcgatgatcgctcacttgtgctaacgtacgtttttacgatcctgaactgtttgcagggggcattcctgtacctgctgcattgtctgttaaataagaaggtgcgcgaggaatatcggaaatgggcctgcctggtggccggaggttccaagtactccgagtttacatctaccacttccgggacaggacacaaccagaccagggccttgcgtgcctcagagagcggtatctag

SEQ ID NO: 121024 - DNA, 2950 bp, Artificial Sequence
  derived and/or modified sequence
cgccccccctccttcataaagtcctggcctcgggacagcctgcacagctgcctagcctgtggagacgggacagccctgtcccactcactctttcccctgccgctcctgccggcagctccaaccatgggaggccgcgtctttctcgcattctgtgtctggctgactctgccgggagctgaaacccaggactccaggggctgtgcccggtggtgccctcagaactcctcgtgtgtcaatgccaccgcctgtcgctgcaatccagggttcagctctttttctgagatcatcaccaccccgacggagacttgtgacgacatcaacgagtgtgcaacaccgtcgaaagtgtcatgcggaaaattctcggactgctggaacacagaggggagctacgactgcgtgtgcagcccgggatatgagcctgtttctggggcaaaaacattcaagaatgagagcgagaacacctgtcaagatgtggacgagtgcagctccgggcagcatcagtgtgacagctccaccgtctgcttcaacaccgtgggttcatacagctgccgctgccgcccaggctggaagcccagacacggaatcccgaataaccaaaaggacactgtctgtgaagatatgactttctccacctggaccccgccccctggagtccacagccagacgctttcccgattcttcgacaaagtccaggacctgggcagagactccaagacaagctcagccgaggtcaccatccagaatgtcatcaaattggtggatgaactgatggaagctcctggagacgtagaggccctggcgccacctgtccggcacctcatagccacccagctgctctcaaaccttgaagatatcatgaggatcctggccaagagcctgcctaaaggccccttcacctacatttccccttcgaacacagagctgaccctgatgatccaggagcggggggacaagaacgtcactatgggtcagagcagcgcacgcatgaagctgaattgggctgtggcagctggagccgaggatccaggccccgccgtggcgggcatcctctccatccagaacatgacgacattgctggccaatgcctccttgaacctgcattccaagaagcaagccgaactggaggagatatatgaaagcagcatccgtggtgtccaactcagacgcctctctgccgtcaactccatctttctgagccacaacaacaccaaggaactcaactcccccatccttttcgccttctcccaccttgagtcctccgatggggaggcgggaagagaccctcctgccaaggacgtgatgcctgggccacggcaggagctgctctgtgccttctggaagagtgacagcgacaggggagggcactgggccaccgagggctgccaggtgctgggcagcaagaacggcagcaccacctgccaatgcagccacctgagcagctttgcgatccttatggctcattatgacgtggaggactggaagctgaccctgatcaccagggtgggactggcgctgtcactcttctgcctgctgctgtgcatcctcactttcctgctggtgcggcccatccagggctcgcgcaccaccatacacctgcacctctgcatctgcctcttcgtgggctccaccatcttcctggccggcatcgagaacgaaggcggccaggtggggctgcgctgccgcctggtggccgggctgctgcactactgtttcctggccgccttctgctggatgagcctcgaaggcctggagctctactttcttgtggtgcgcgtgttccaaggccagggcctgagtacgcgctggctctgcctgatcggctatggcgtgcccctgctcatcgtgggcgtctcggctgccatctacagcaagggctacggccgccccagatactgctggttggactttgagcagggcttcctctggagcttcttgggacctgtgaccttcatcattttgtgcaatgctgtcattttcgtgactaccgtctggaagctcactcagaagttttctgaaatcaatccagacatgaagaaattaaagaaggcgagggcgctgaccatcacggccatcgcgcagctcttcctgttgggctgcacctgggtctttggcctgttcatcttcgacgatcggagcttggtgctgacctatgtgtttaccatcctcaactgcctgcagggcgccttcctctacctgctgcactgcctgctcaacaagaaggttcgggaagaataccggaagtgggcctgcctagttgctggggggagcaagtactcagaattcacctccaccacgtctggcactggccacaatcagacccgggccctcagggcatcagagtccggcatatgaaggcgcatggttctggacggcccagcagctcctgtggccacagcagctttgtacacgaagaccatccatcctcccttcgtccaccactctactccctccaccctccctccctgatcccgtgtgccaccaggagggagtggcagctatagtctggcaccaaagtccaggacacccagtggggtggagtcggagccactggtcctgctgctggctgcctctctgctccaccttgtgacccagggtggggacaggggctggcccagggctgcaatgcagcatgttgccctggcacctgtggccagtactcgggacagactaagggcgcttgtcccatcctggacttttcctctcatgtctttgctgcagaactgaagagactaggcgctggggctcagcttccctcttaagctaagactgatgtcagaggccccatggcgaggccccttggggccactgcctgaggctcacggtacagaggcctgccctgcctggccgggcaggaggttctcactgttgtgaaggttgtagacgttgtgtaatgtgtttttatctgttaaaatttttcagtgttgacacttaaaattaaacacatgcatac

SEQ ID NO: 121025 - DNA, 2229 bp, Artificial Sequence
  derived and/or modified sequence
atgggcggcagagtgttcctggccttctgcgtgtggctgaccctgcccggcgccgagacccaggacagcagaggctgcgccagatggtgcccccagaacagcagctgcgtgaacgccaccgcctgcagatgcaaccccggcttcagcagcttcagcgagatcatcaccacccccaccgagacctgcgacgacatcaacgagtgcgccacccccagcaaggtgagctgcggcaagttcagcgactgctggaacaccgagggcagctacgactgcgtgtgcagccccggctacgagcccgtgagcggcgccaagaccttcaagaacgagagcgagaacacctgccaggacgtggacgagtgcagcagcggccagcaccagtgcgacagcagcaccgtgtgcttcaacaccgtgggcagctacagctgcagatgcagacccggctggaagcccagacacggcatccccaacaaccagaaggacaccgtgtgcgaggacatgaccttcagcacctggacccccccccccggcgtgcacagccagaccctgagcagattcttcgacaaggtgcaggacctgggcagagacagcaagaccagcagcgccgaggtgaccatccagaacgtgatcaagctggtggacgagctgatggaggcccccggcgacgtggaggccctggccccccccgtgagacacctgatcgccacccagctgctgagcaacctggaggacatcatgagaatcctggccaagagcctgcccaagggccccttcacctacatcagccccagcaacaccgagctgaccctgatgatccaggagagaggcgacaagaacgtgaccatgggccagagcagcgccagaatgaagctgaactgggccgtggccgccggcgccgaggaccccggccccgccgtggccggcatcctgagcatccagaacatgaccaccctgctggccaacgccagcctgaacctgcacagcaagaagcaggccgagctggaggagatctacgagagcagcatcagaggcgtgcagctgagaagactgagcgccgtgaacagcatcttcctgagccacaacaacaccaaggagctgaacagccccatcctgttcgccttcagccacctggagagcagcgacggcgaggccggcagagacccccccgccaaggacgtgatgcccggccccagacaggagctgctgtgcgccttctggaagagcgacagcgacagaggcggccactgggccaccgagggctgccaggtgctgggcagcaagaacggcagcaccacctgccagtgcagccacctgagcagcttcgccatcctgatggcccactacgacgtggaggactggaagctgaccctgatcaccagagtgggcctggccctgagcctgttctgcctgctgctgtgcatcctgaccttcctgctggtgagacccatccagggcagcagaaccaccatccacctgcacctgtgcatctgcctgttcgtgggcagcaccatcttcctggccggcatcgagaacgagggcggccaggtgggcctgagatgcagactggtggccggcctgctgcactactgcttcctggccgccttctgctggatgagcctggagggcctggagctgtacttcctggtggtgagagtgttccagggccagggcctgagcaccagatggctgtgcctgatcggctacggcgtgcccctgctgatcgtgggcgtgagcgccgccatctacagcaagggctacggcagacccagatactgctggctggacttcgagcagggcttcctgtggagcttcctgggccccgtgaccttcatcatcctgtgcaacgccgtgatcttcgtgaccaccgtgtggaagctgacccagaagttcagcgagatcaaccccgacatgaagaagctgaagaaggccagagccctgaccatcaccgccatcgcccagctgttcctgctgggctgcacctgggtgttcggcctgttcatcttcgacgacagaagcctggtgctgacctacgtgttcaccatcctgaactgcctgcagggcgccttcctgtacctgctgcactgcctgctgaacaagaaggtgagagaggagtacagaaagtgggcctgcctggtggccggcggcagcaagtacagcgagttcaccagcaccaccagcggcaccggccacaaccagaccagagccctgagagccagcgagagcggcatctag

SEQ ID NO: 121026 - protein, 37 aa, Artificial Sequence
  derived and/or modified sequence
MGDEKDSWKVKTLDEILQEKKRRKEQEEKAEIKRLKN

SEQ ID NO: 121027 - protein, 420 aa, Artificial Sequence
  derived and/or modified sequence
MGDEKDSWKVKTLDEILQEKKRRKEQEEKAEIKRLKNSDDRDSKRDSLEEGELRDHCMEITIRNSPYRREDSMEDRGEEDDSLAIKPPQQMSRKEKVHHRKDEKRKEKCRHHSHSAEGGKHARVKEREHERRKRHREEQDKARREWERQKRREMAREHSRRERDRLEQLERKRERERKMREQQKEQREQKERERRAEERRKEREARREVSAHHRTMREDYSDKVKASHWSRSPPRPPRERFELGDGRKPGEARPAPAQKPAQLKEEKMEERDLLSDLQDISDSERKTSSAESSSAESGSGSEEEEEEEEEEEEEGSTSEESEEEEEEEEEEEEETGSNSEEASEQSAEEVSEEEMSEDEERENENHLLVVPESRFDRDSGESEEAEEEVGLPERRGVPVPEQDRGGHLWSGLQSKRQENR

SEQ ID NO: 121028 - DNA, 1263 bp, Artificial Sequence
  derived and/or modified sequence
atgggtgacgagaaagattcatggaaggtgaagacactggatgaaattttgcaggagaagaaaagacggaaagagcaggaggagaaggctgagatcaaaaggctgaaaaacagcgatgaccgcgactccaaacgggactccctggaagaaggggagttacgggaccattgcatggaaataacaattcggaattctccgtaccggcgcgaggattctatggaagatcggggagaggaggatgacagcctggccatcaaaccaccccagcaaatgtcacggaaggagaaagtgcaccaccgaaaggatgagaaacgaaaagaaaaatgccgccaccactcacacagtgctgaggggggcaagcatgctagagtaaaggaaagggaacatgaacggaggaaacgtcacagagaggaacaggacaaggcccggagggaatgggagagacagaagcgccgcgagatggcgagagagcacagccgcagggagagagataggttagaacaactggagagaaagcgcgaacgtgagagaaaaatgcgcgaacaacagaaagagcagagagagcagaaagaaagggaaaggcgggcggaggaacgtcgaaaagaacgggaagcccgtagagaagtgtctgcgcaccaccgcactatgagggaggattatagcgacaaagtgaaggcttcccactggtctcgctcacccccccggcccccacgggagcggtttgaacttggggatggtaggaaacccggcgaggcacgcccagcccccgcgcagaaacccgcccagctgaaggaggagaagatggaagagcgcgacctgcttagcgatctgcaggatatttccgattcagagcgcaagacttctagcgcggagtctagttctgccgaatcaggctccggcagcgaagaggaagaagaagaagaagaagaggaagaagaagagggcagcacctcggaggagtccgaagaagaggaagaagaagaggaggaggaggaggaagagaccggcagcaatagtgaggaagccagtgagcagagcgcagaagaagtgtccgaagaggagatgtctgaagatgaggagcgcgagaacgaaaaccacctgctagtggtgcctgaatcgcggttcgacagagactccggcgaaagcgaagaggccgaagaggaggtgggacttccagagagacgcggagtccctgtccccgaacaggacagaggagggcacctgtggagtggactgcagtccaagaggcaggagaacaggtag

SEQ ID NO: 121029 - DNA, 1263 bp, Artificial Sequence
  derived and/or modified sequence
atgggagatgagaaggacagctggaaggtgaagaccctggatgagatcctgcaggagaagaagaggaggaaggagcaggaggagaaggccgagatcaagaggctgaagaacagtgatgaccgggacagcaagagggacagcctggaggagggggagctgcgggaccactgcatggagatcaccatccggaacagcccctaccgccgggaggacagcatggaggacagaggagaagaagatgacagcctggccatcaagccaccccagcagatgagcaggaaggagaaggtgcaccacaggaaggatgagaagaggaaggagaagtgccgccaccacagccacagcgctgagggcggcaagcacgcccgggtgaaggagcgggagcatgaaagaaggaagaggcaccgggaggagcaggacaaggcccggcgggagtgggagcggcagaagagaagagagatggcccgggagcacagccggcgggagcgggaccggctggagcagctggagaggaagcgggagcgggagaggaagatgagggagcagcagaaggagcagcgggagcagaaggagcgggagcggcgggcagaggagaggaggaaggagcgggaggcccggcgggaggtgtctgcccaccacaggaccatgagggaggactacagcgacaaggtgaaggccagccactggagccgcagccccccccggcccccccgggagagatttgagctgggagatggcaggaagccaggagaggcccggcctgccccagcccagaagccagcccagctgaaggaggagaagatggaggagcgggacctgctgagtgacctgcaggacatcagtgacagcgagaggaagaccagcagcgctgagagcagcagcgctgagagcggcagcggcagcgaggaggaggaggaggaggaggaggaggaggaggaggagggcagcaccagcgaggagagcgaggaggaggaggaggaggaggaggaggaggaggaggagaccggcagcaacagcgaggaggccagcgagcagagcgctgaggaggtgtctgaggaggagatgtctgaagatgaggagcgggagaatgaaaaccacctgctggtggtgcctgagagcagatttgaccgggacagcggggagagcgaggaggccgaggaggaggtgggcctgcctgagcggcggggcgtgcctgtgcctgagcaggacagaggaggccacctgtggagcggcctgcagagcaagaggcaggagaacagatag

SEQ ID NO: 121030 - DNA, 1263 bp, Artificial Sequence
  derived and/or modified sequence
atgggcgacgagaaggacagctggaaggtgaagaccctggacgagatcctgcaggaaaaaaagaggaggaaagaacaggaggagaaggccgagattaagaggctaaaaaacagtgacgatcgagacagcaaacgagatagcctggaagaaggcgagctgagagaccattgcatggagattactattcgaaacagcccgtacagaagggaagattccatggaggatcggggcgaggaggacgacagtcttgcaataaaaccccctcagcagatgagcaggaaggaaaaagtgcatcaccgtaaggatgagaagcggaaagaaaagtgccgtcatcatagtcacagtgcagagggggggaagcacgctcgggtgaaagagcgggaacacgaaaggcgaaaacggcaccgtgaggaacaggataaggcgagacgtgagtgggaacgccagaagcgaagggaaatggcccgggaacatagtcggcgtgagcgggataggttggaacagctcgaacgaaagcgcgaacgcgagagaaaaatgcgcgaacagcaaaaagaacagcgcgagcagaaggagagggaaaggagagctgaagaaagaaggaaggagcgtgaggccaggcgcgaggtctctgcccaccataggacgatgagggaggattattctgacaaggtgaaggcctctcactggtctagaagtccaccacggccaccaagagaaaggttcgagttgggagacggccgaaagcctggcgaggccaggccagctcccgcacagaaacctgctcagcttaaagaagaaaagatggaggagagagacttgctgtccgatctgcaggacatttcagactcggagagaaagacatctagcgcagaaagctcatccgctgagagcgggtcaggtagcgaagaagaagaggaggaggaagaggaggaagaagaagaaggctctacctccgaggagagcgaagaagaggaagaggaggaggaagaggaggaggaggaaaccggatccaattccgaagaggcctcagaacagagcgccgaagaggtgtctgaggaggaaatgagtgaggacgaggaacgggagaacgaaaatcatttgctggtagtgccagagtctcgttttgatcgggattctggtgagtcggaggaggcagaagaggaggttgggctgcctgaaaggcggggagttcccgtgccagagcaagaccgtggtgggcatttgtggagtgggctgcagtctaagagacaggaaaacagatag

SEQ ID NO: 121031 - DNA, 1263 bp, Artificial Sequence
  derived and/or modified sequence
atgggagacgagaaggatagctggaaagtcaagacgctggacgagatactgcaagaaaagaagagaaggaaggaacaggaggaaaaagccgagatcaagcggcttaagaatagcgacgaccgagatagtaagcgcgattccttagaagagggcgagcttagggaccattgcatggaaatcacgattcggaactcgccttaccggagagaggattccatggaggaccggggagaagaggacgacagtctggctattaagccaccacagcagatgagtaggaaggagaaagtacatcatcggaaggacgaaaagagaaaagaaaaatgcaggcaccactcccactcagcggaggggggaaaacacgccagagtgaaggaacgggaacatgaaaggcgtaaacgacatcgcgaggagcaggacaaagccagacgggagtgggagagacagaagcgcagagagatggcccgagaacactcccgtcgcgagagagatcgactcgaacagctggaaagaaaaagggagcgtgagagaaagatgagagaacagcagaaggagcaaagagagcagaaagagagagaacggagagccgaggaaaggagaaaggagagggaggccagaagggaggtgagtgcccaccatcggaccatgcgcgaggattacagtgataaagtgaaagcttctcactggagcagaagcccaccacgaccacccagggagcggttcgagctgggagacggaaggaaaccaggcgaggcgaggccagccccagcacagaagccagcgcagctgaaggaggagaaaatggaagagagggatttgctgtccgaccttcaggacatcagcgactctgagcgaaagactagctccgcagagtcaagttctgcggagtccgggagcggcagcgaggaggaagaagaggaggaagaagaggaagaagaagagggaagcacttctgaggaaagtgaggaggaggaagaagaagaggaggaagaagaggaggaaacaggaagtaactcggaggaagcttcagaacagtccgccgaggaggtctctgaggaggaaatgtctgaggacgaggagagagagaatgagaatcatctgttggtggtgccagagagtcggttcgaccgtgatagtggcgagagtgaggaggcagaagaggaagtaggcttaccggaacggcgaggtgtgcccgtgcccgagcaggacaggggaggtcacttgtggtccgggctccagagtaagaggcaggagaacagatag

SEQ ID NO: 121032 - DNA, 1263 bp, Artificial Sequence
  derived and/or modified sequence
atgggcgacgagaaggacagctggaaggtgaagaccctggacgagatcctgcaggagaagaagagaagaaaggagcaggaggagaaggccgagatcaagagactgaagaacagcgacgacagagacagcaagagagacagcctggaggagggcgagctgagagaccactgcatggagatcaccatcagaaacagcccctacagaagagaggacagcatggaggacagaggcgaggaggacgacagcctggccatcaagcccccccagcagatgagcagaaaggagaaggtgcaccacagaaaggacgagaagagaaaggagaagtgcagacaccacagccacagcgccgagggcggcaagcacgccagagtgaaggagagagagcacgagagaagaaagagacacagagaggagcaggacaaggccagaagagagtgggagagacagaagagaagagagatggccagagagcacagcagaagagagagagacagactggagcagctggagagaaagagagagagagagagaaagatgagagagcagcagaaggagcagagagagcagaaggagagagagagaagagccgaggagagaagaaaggagagagaggccagaagagaggtgagcgcccaccacagaaccatgagagaggactacagcgacaaggtgaaggccagccactggagcagaagcccccccagaccccccagagagagattcgagctgggcgacggcagaaagcccggcgaggccagacccgcccccgcccagaagcccgcccagctgaaggaggagaagatggaggagagagacctgctgagcgacctgcaggacatcagcgacagcgagagaaagaccagcagcgccgagagcagcagcgccgagagcggcagcggcagcgaggaggaggaggaggaggaggaggaggaggaggaggagggcagcaccagcgaggagagcgaggaggaggaggaggaggaggaggaggaggaggaggagaccggcagcaacagcgaggaggccagcgagcagagcgccgaggaggtgagcgaggaggagatgagcgaggacgaggagagagagaacgagaaccacctgctggtggtgcccgagagcagattcgacagagacagcggcgagagcgaggaggccgaggaggaggtgggcctgcccgagagaagaggcgtgcccgtgcccgagcaggacagaggcggccacctgtggagcggcctgcagagcaagagacaggagaacagatag

SEQ ID NO: 121033 - protein, 438 aa, Artificial Sequence
  derived and/or modified sequence
MSVSARSAAAEERSVNSSTMEVAQQKNLEGYVGFANLPNQVYRKSVKRGFEFTLMVVGESGLGKSTLINSLFLTDLYSPEYPGPSHRIKKTVQVEQSKVLIKEGGVQLLLTIVDTPGFGDAVDNSNCWQPVIDYIDSKFEDYLNAESRVNRRQMPDNRVQCCLYFIAPSGHGLKPLDIEFMKRLHEKVNIIPLIAKADTLTPEECQQFKKQIMKEIQEHKIKIYEFPETDDEEENKLVKKIKDRLPLAVVGSNTIIEVNGKRVRGRQYPWGVAEVENGEHCDFTILRNMLIRTHMQDLKDVTNNVHYENYRSRKLAAVTYNGVDNNKNKGQLTKSPLAQMEEERREHVAKMKKMEMEMEQVFEMKVKEKVQKLKDSEAELQRRHEQMKKNLEAQHKELEEKRRQFEDEKANWEAQQRILEQQNSSRTLEKNKKKGKIF

SEQ ID NO: 121034 - protein, 384 aa, Artificial Sequence
  derived and/or modified sequence
MVVGESGLGKSTLINSLFLTDLYSPEYPGPSHRIKKTVQVEQSKVLIKEGGVQLLLTIVDTPGFGDAVDNSNCWQPVIDYIDSKFEDYLNAESRVNRRQMPDNRVQCCLYFIAPSGHGLKPLDIEFMKRLHEKVNIIPLIAKADTLTPEECQQFKKQIMKEIQEHKIKIYEFPETDDEEENKLVKKIKDRLPLAVVGSNTIIEVNGKRVRGRQYPWGVAEVENGEHCDFTILRNMLIRTHMQDLKDVTNNVHYENYRSRKLAAVTYNGVDNNKNKGQLTKSPLAQMEEERREHVAKMKKMEMEMEQVFEMKVKEKVQKLKDSEAELQRRHEQMKKNLEAQHKELEEKRRQFEDEKANWEAQQRILEQQNSSRTLEKNKKKGKIF

SEQ ID NO: 121035 - protein, 381 aa, Artificial Sequence
  derived and/or modified sequence
VTHETIVEQQKNLEGYVGFANLPNQVYRKSVKRGFEFTLMVVGESGLGKSTLINSLFLTDLYSPEYPGPSHRIKKTVQVEQSKVLIKEGGVQLLLTIVDTPGFGDAVDNSNCWQPVIDYIDSKFEDYLNAESRVNRRQMPDNRVQCCLYFIAPSGHGLKPLDIEFMKRLHEKVNIIPLIAKADTLTPEECQQFKKQIMKEIQEHKIKIYEFPETDDEEENKLVKKIKDRLPLAVVGSNTIIEVNGKRVRGRQYPWGVAEVENGEHCDFTILRNMLIRTHMQDLKDVTNNVHYENYRSRKLAAVTYNGVDNNKNKGQLTKSPLAQMEEERREHVAKMKKMEMEMEQVFEMKVKEKVQKLKDSEAEVISLISHLLADIVFLFK

SEQ ID NO: 121036 - DNA, 1317 bp, Artificial Sequence
  derived and/or modified sequence
atgagcgtgagcgccagaagcgccgccgccgaggagagaagcgtgaacagcagcaccatggaggtggcccagcagaagaacctggagggctacgtgggcttcgccaacctgcccaaccaggtgtacagaaagagcgtgaagagaggcttcgagttcaccctgatggtggtgggcgagagcggcctgggcaagagcaccctgatcaacagcctgttcctgaccgacctgtacagccccgagtaccccggccccagccacagaatcaagaagaccgtgcaggtggagcagagcaaggtgctgatcaaggagggcggcgtgcagctgctgctgaccatcgtggacacccccggcttcggcgacgccgtggacaacagcaactgctggcagcccgtgatcgactacatcgacagcaagttcgaggactacctgaacgccgagagcagagtgaacagaagacagatgcccgacaacagagtgcagtgctgcctgtacttcatcgcccccagcggccacggcctgaagcccctggacatcgagttcatgaagagactgcacgagaaggtgaacatcatccccctgatcgccaaggccgacaccctgacccccgaggagtgccagcagttcaagaagcagatcatgaaggagatccaggagcacaagatcaagatctacgagttccccgagaccgacgacgaggaggagaacaagctggtgaagaagatcaaggacagactgcccctggccgtggtgggcagcaacaccatcatcgaggtgaacggcaagagagtgagaggcagacagtacccctggggcgtggccgaggtggagaacggcgagcactgcgacttcaccatcctgagaaacatgctgatcagaacccacatgcaggacctgaaggacgtgaccaacaacgtgcactacgagaactacagaagcagaaagctggccgccgtgacctacaacggcgtggacaacaacaagaacaagggccagctgaccaagagccccctggcccagatggaggaggagagaagagagcacgtggccaagatgaagaagatggagatggagatggagcaggtgttcgagatgaaggtgaaggagaaggtgcagaagctgaaggacagcgaggccgagctgcagagaagacacgagcagatgaagaagaacctggaggcccagcacaaggagctggaggagaagagaagacagttcgaggacgagaaggccaactgggaggcccagcagagaatcctggagcagcagaacagcagcagaaccctggagaagaacaagaagaagggcaagatcttctag

SEQ ID NO: 121037 - DNA, 1317 bp, Artificial Sequence
  derived and/or modified sequence
atgtctgttagcgccaggtccgcggcagctgaagagcggagcgtgaattcgagtaccatggaggttgctcagcagaagaatctcgaagggtacgtgggattcgctaatctgcctaatcaggtctaccgcaagagcgtgaaaagggggtttgaattcacactgatggtggtgggagagagcgggttaggaaagtctaccctgatcaactctctttttctcacggatctgtattcgccagagtatcccggtccaagccaccggatcaagaagaccgtgcaagttgagcagtctaaggtgctgataaaagagggtggagtgcaacttctactcaccatagttgacactcctggctttggcgatgctgtggacaactcaaactgctggcaacccgtcatcgattatattgacagcaagttcgaagattacctcaatgcagagagccgggtgaaccgccggcagatgcctgataaccgcgtgcagtgctgtctttattttatcgccccatccggacatggcctgaagccgttggacatagagttcatgaagcgcttacacgaaaaagtgaacataatccctttaatcgctaaagccgataccctcacccctgaggaatgtcagcagttcaaaaaacagatcatgaaggaaattcaggaacacaagattaaaatctacgaatttcctgagaccgatgacgaggaggagaacaagctcgtgaagaaaattaaagaccggcttcccctggctgtcgtgggcagcaacaccatcatcgaggttaatggcaaaagagtgagaggtaggcagtacccttggggcgtcgctgaagtggaaaacggggaacactgtgatttcactatcctgcggaatatgctcatacgaacccacatgcaggatctgaaggatgtgaccaataatgtgcattacgagaactataggtctcggaagttggcggctgtaacttacaatggggtggacaacaataagaataaggggcagcttacgaaatcccccctggcccagatggaggaggagcgaagggagcatgttgcgaaaatgaagaagatggagatggagatggaacaggtgttcgaaatgaaagtgaaagagaaagtgcagaagcttaaggactcagaggccgagctgcagagaaggcatgagcagatgaaaaagaatctcgaggcccaacataaggagctggaggagaaacgtcgacagttcgaggatgaaaaggcgaattgggaggctcaacagcggatacttgaacagcagaacagcagtcgcacccttgaaaaaaataagaagaaggggaagatcttctag

SEQ ID NO: 121038 - DNA, 1317 bp, Artificial Sequence
  derived and/or modified sequence
atgtctgtgtctgcccggtctgctgctgctgaggagaggtctgtgaacagcagcaccatggaggtggcccagcagaagaacctggagggctacgtgggctttgccaacctgcccaaccaggtgtacaggaagtctgtgaagaggggctttgagttcaccctgatggtggtgggggagagcggcctgggcaagagcaccctcatcaacagcctcttcctgacagacctgtacagccctgagtacccaggccccagccaccgcatcaagaagacagtgcaggtggagcagagcaaggtgctgatcaaggagggcggcgtgcagctgctgctgaccatcgtggacaccccaggctttggagatgctgtggacaacagcaactgctggcagcccgtcatcgactacatcgacagcaagtttgaggactacctgaatgctgagagccgggtgaacagacggcagatgccagacaacagagtgcagtgctgcctgtacttcatcgcccccagcggccacggcctgaagcccctggacatcgagttcatgaagaggctgcacgagaaggtgaacatcatccccctcatcgccaaggctgacaccctgaccccagaggagtgccagcagttcaagaagcagatcatgaaggagatccaggagcacaagatcaagatctatgagttccctgagacagatgatgaggaggagaacaagctggtgaagaagatcaaggaccggctgcccctggccgtggtgggcagcaacaccatcatcgaggtgaatggcaagagggtgcggggccggcagtacccctggggcgtggccgaggtggagaatggagagcactgtgacttcaccatcctgaggaacatgctgatccgcacccacatgcaggacctgaaggatgtgaccaacaacgtgcactatgagaactaccgcagcaggaagctggccgctgtgacctacaatggagtggacaacaacaagaacaagggccagctgaccaagagccccctggcccagatggaggaggagcggcgggagcacgtggccaagatgaagaagatggagatggagatggagcaggtgtttgagatgaaggtgaaggagaaggtgcagaagctgaaggacagcgaggccgagctgcagaggagacatgagcagatgaagaagaacctggaggcccagcacaaggagctggaggagaagaggcggcagtttgaagatgagaaggccaactgggaggcccagcagaggatcctggagcagcagaacagcagcaggaccctggagaagaacaagaagaagggcaagatcttctag

SEQ ID NO: 121039 - DNA, 1317 bp, Artificial Sequence
  derived and/or modified sequence
atgagcgtgagcgcccggagcgccgccgccgaggagcggagcgtgaacagctctacaatggaggtggcccaacagaagaatctggagggttacgttggtttcgcaaatctgccaaatcaagtgtacaggaagtccgtcaagagaggcttcgagttcacattgatggtcgtaggggaatccggtctcgggaagagcaccctgattaatagcctgtttctcactgacctttactccccagaataccccggcccaagccaccgaatcaagaagactgtgcaggtggagcagtcaaaggtattaatcaaggaagggggagtacagctgcttctgaccattgtggatacccccggctttggggacgctgtagacaactccaattgttggcaaccagtgatcgactacatagatagcaaattcgaggattacctcaatgcagagtcacgggttaatcgacgtcaaatgccagataaccgggtccagtgttgcctgtactttatcgccccaagcgggcacggactcaagcccctcgacattgaattcatgaagcggctgcatgagaaggtgaacatcatcccactcatcgccaaagctgatactctgactccagaagaatgtcagcaattcaagaaacagatcatgaaggagatccaagagcacaagatcaaaatatatgagttccccgaaactgatgacgaagaagaaaacaaacttgtgaagaagataaaggatcgacttcccctagcagtggttggaagcaacaccataattgaagtcaatgggaaacgggtgcgcgggcgacagtatccttggggcgtagccgaagtcgagaacggagagcactgtgatttcaccatccttagaaacatgctaataaggacacacatgcaagaccttaaggatgttacgaacaacgttcactatgaaaactataggtcaagaaagctggcagcagtaacttacaacggcgtcgacaacaacaaaaacaagggacagctgaccaaatcacctctggcccagatggaggaagaacggcgggaacacgtggccaagatgaaaaaaatggaaatggaaatggaacaagtgttcgagatgaaggtgaaggaaaaagttcagaagcttaaggattcagaggcggaattacagcgccgccatgaacagatgaagaagaacctcgaggcccagcataaagagctcgaagaaaaacgccggcagtttgaggatgaaaaagcaaattgggaagcgcaacagagaatattggaacagcagaattcctcaaggaccctagaaaagaataagaaaaaagggaagatcttctag

SEQ ID NO: 121040 - DNA, 1317 bp, Artificial Sequence
  derived and/or modified sequence
atgtctgtgtcggcaagatcagccgcagcggaggagcgttcggtgaacagtagcaccatggaagtggctcagcagaagaatctggagggctatgtcggcttcgccaatttacccaaccaggtgtaccgaaaatccgtgaagcgaggcttcgaatttactctcatggtcgtgggcgagtctggactggggaagtccaccctgattaacagcctcttcctcaccgatctgtattccccagagtatcccggtcctagccaccgcataaagaagacagttcaggtggaacagtcgaaagtgcttattaaggagggaggcgtgcaactactcctgactatagttgacacacccggattcggcgatgccgtagacaacagtaactgttggcaaccggtcatcgactatattgacagtaagtttgaagattaccttaacgcggagagtagggtgaaccgtaggcaaatgccagacaatagggttcagtgttgcctgtatttcatagcccctagtggccacggcctcaagcccctggacatagagttcatgaagcggttacatgagaaggttaatattattcctctgatcgcgaaagccgacacacttacccccgaagaatgtcagcagttcaaaaagcagattatgaaggagatccaggagcacaaaattaagatttatgagtttcccgagaccgatgatgaggaagagaacaagctcgtgaaaaagatcaaagaccgcttacctttggctgtggtagggtctaacactataatcgaggtgaacggaaagagggtgagggggaggcagtacccgtggggggtggccgaggtagaaaatggcgaacactgcgactttaccattcttagaaatatgctgattcggactcatatgcaggacctgaaagacgtaacaaacaacgtacactacgagaactatcggtcccggaaactcgctgcagtgacgtataacggcgtggacaataacaaaaacaaaggacagctgaccaagtcccctcttgcgcagatggaggaggaaaggagggagcacgtggccaagatgaagaagatggaaatggagatggaacaagtatttgagatgaaagtgaaggagaaggtgcagaagctcaaagactccgaggcggagctgcagaggagacatgaacaaatgaaaaaaaatctagaagcacagcacaaggagttggaagagaaaaggaggcagttcgaagacgagaaagccaattgggaggctcagcaaagaatcttggagcagcagaactcaagtcggactctagagaagaacaagaagaagggcaaaattttctag

SEQ ID NO: 121041 - DNA, 2522 bp, Artificial Sequence
  derived and/or modified sequence
agcctcgtctgagggggcgggggacggaggagggagcgggagtcgagcgagagcctgtggaggagtccgcctgctgtagcgtgcgtaagcaaggcagctacgccgggcggctacgctgcggaatcggcgtaggcgcctttggagaatcggcgggctgcgctccgctggggctggtcgcggagggggggaggggatgtcggtcagtgcgagatccgctgctgctgaggagaggagcgtcaacagcagcaccatggaggttgcccaacagaagaaccttgaaggctatgtgggatttgccaatctcccaaatcaagtatacagaaaatcggtgaagagaggttttgaattcacgcttatggtagtgggtgaatctggattgggaaagtcgacattaatcaactcattattcctcacagatttgtattctccagagtatccaggtccttctcatagaattaaaaagactgtacaggtggaacaatccaaagttttaatcaaagaaggtggtgttcagttgctgctcacaatagttgataccccaggatttggagatgcagtggataatagtaattgctggcagcctgttatcgactacattgatagtaaatttgaggactacctaaatgcagaatcacgagtgaacagacgtcagatgcctgataacagggtgcagtgttgtttatacttcattgctccttcaggacatggacttaaaccattggatattgagtttatgaagcgtttgcatgaaaaagtgaatatcatcccacttattgccaaagcagacacactcacaccagaggaatgccaacagtttaaaaaacagataatgaaagaaatccaagaacataaaattaaaatatacgaatttccagaaacagatgatgaagaagaaaataaacttgttaaaaagataaaggaccgtttacctcttgctgtggtaggtagtaatactatcattgaagttaatggcaaaagggtcagaggaaggcagtatccttggggtgttgctgaagttgaaaatggtgaacattgtgattttacaatcctaagaaatatgttgataagaacacacatgcaggacttgaaagatgttactaataatgtccactatgagaactacagaagcagaaaacttgcagctgtgacttataatggagttgataacaacaagaataaagggcagctgactaagagccctctggcacaaatggaagaagaaagaagggagcatgtagctaaaatgaagaagatggagatggagatggagcaggtgtttgagatgaaggtcaaagaaaaagttcaaaaactgaaggactctgaagctgagctccagcggcgccatgagcaaatgaaaaagaatttggaagcacagcacaaagaattggaggaaaaacgtcgtcagttcgaggatgagaaagcaaactgggaagctcaacaacgtattttagaacaacagaactcttcaagaaccttggaaaagaacaagaagaaagggaagatcttttaaactctctattgaccaccagttaacgtattagttgccaatatgccagcttggacatcagtgtttgttggatccgtttgaccaatttgcaccagttttatccataatgatggatttaacagcatgacaaaaattatttttttttttgttcttgatggagattaagatgccttgaattgtctagggtgttctgtacttagaaagtaagagctctaagtacctttcctacattttctttttttattaaacagatatcttcagtttaatgcaagagaacattttactgttgtacaatcatgttctggtggtttgattgtttacaggatattccaaaataaaaggactctggaagattttcattgaggataaattgccataatatgatgcaaactgtgcttctctatgataattacaatacaaaggttccattcagtgcagcatatacaataatgtaatttagtctaacacagttgaccctattttttgacacttccattgtttaaaaatacacatggaaaaaaaaaaaaccctatatgcttactgtgcacctagagcttttttataacaacgtctttttgtttgtttgttttggattctttaaatatatattattctcatttagtgccctctttagccagaatctcattactgcttcatttttgtaataacatttaatttagatattttccatatattggcactgctaaaatagaatatagcatctttcatatggtaggaaccaacaaggaaactttcctttaactccctttttacactttatggtaagtagcagggggggaaatgcatttatagatcatttctaggcaaaattgtgaagctaatgaccaacctgtttctacctatatgcagtctctttattttactagaaatgggaatcatggcctcttgaagagaaaaaagtcaccattctgcatttagctgtattcatatattgcatttctgtattttttgtttgtattgtaaaaaattcacataataaacgatgttgtgatgt

SEQ ID NO: 121042 - DNA, 1464 bp, Artificial Sequence
  derived and/or modified sequence
agtgcgagatccgctgctgctgaggagaggagcgtcaacagcagcaccatggttcctctgtggatttcttctgttggaatctggaacactggaatgatggaaatgtgttctttacaaagtagctcaacagaagaaccttgaaggctatgtgggatttgccaatctcccaaatcaagtatacagaaaatcggtgaagagaggttttgaattcacgcttatggtagtgggtgaatctggattgggaaagtcgacattaatcaactcattattcctcacagatttgtattctccagagtatccaggtccttctcatagaattaaaaagactgtacaggtggaacaatccaaagttttaatcaaagaaggtggtgttcagttgctgctcacaatagttgataccccaggatttggagatgcagtggataatagtaattgctggcagcctgttatcgactacattgatagtaaatttgaggactacctaaatgcagaatcacgagtgaacagacgtcagatgcctgataacagggtgcagtgttgtttatacttcattgctccttcaggacatggacttaaaccattggatattgagtttatgaagcgtttgcatgaaaaagtgaatatcatcccacttattgccaaagcagacacactcacaccagaggaatgccaacagtttaaaaaacagataatgaaagaaatccaagaacataaaattaaaatatacgaatttccagaaacagatgatgaagaagaaaataaacttgttaaaaagataaaggaccgtttacctcttgctgtggtaggtagtaatactatcattgaagttaatggcaaaagggtcagaggaaggcagtatccttggggtgttgctgaagttgaaaatggtgaacattgtgattttacaatcctaagaaatatgttgataagaacacacatgcaggacttgaaagatgttactaataatgtccactatgagaactacagaagcagaaaacttgcagctgtgacttataatggagttgataacaacaagaataaagggcagctgactaagagccctctggcacaaatggaagaagaaagaagggagcatgtagctaaaatgaagaagatggagatggagatggagcaggtgtttgagatgaaggtcaaagaaaaagttcaaaaactgaaggactctgaagctgagctccagcggcgccatgagcaaatgaaaaagaatttggaagcacagcacaaagaattggaggaaaaacgtcgtcagttcgaggatgagaaagcaaactgggaagctcaacaacgtattttagaacaacagaactcttcaagaaccttggaaaagaacaagaagaaagggaagatcttttaaactctctattgaccaccagttaacgtattagttgccaatatgccagcttggacatcagtgtttgttggatccgtttgaccaatttgcaccag

SEQ ID NO: 121043 - protein, 524 aa, Artificial Sequence
  derived and/or modified sequence
MELGPEPPHRRRLLFACSPPPASQPVVKALFGASAAGGLSPVTNLTVTMDQLQGLGSDYEQPLEVKNNSNLQRMGSSESTDSGFCLDSPGPLDSKENLENPMRRIHSLPQKLLGCSPALKRSHSDSLDHDIFQLIDPDENKENEAFEFKKPVRPVSRGCLHSHGLQEGKDLFTQRQNSAPARMLSSNERDSSEPGNFIPLFTPQSPVTATLSDEDDGFVDLLDGENLKNEEETPSCMASLWTAPLVMRTTNLDNRCKLFDSPSLCSSSTRSVLKRPERSQEESPPGSTKRRKSMSGASPKESTNPEKAHETLHQSLSLASSPKGTIENILDNDPRDLIGDFSKGYLFHTVAGKHQDLKYISPEIMASVLNGKFANLIKEFVIIDCRYPYEYEGGHIKGAVNLHMEEEVEDFLLKKPIVPTDGKRVIVVFHCEFSSERGPRMCRYVRERDRLGNEYPKLHYPELYVLKGGYKEFFMKCQSYCEPPSYRPMHHEDFKEDLKKFRTKSRTWAGEKSKREMYSRLKKL

SEQ ID NO: 121044 - DNA, 1575 bp, Artificial Sequence
  derived and/or modified sequence
atggagctcggaccagaaccaccccatcggcggcggcttctgttcgcatgctctcccccgcctgcctcacagcctgttgtgaaggctttgttcggggcaagcgcagcaggcggcctgtcacctgtaacaaatctaaccgtgacgatggaccagttacagggcctggggagcgactatgaacagccactcgaagtaaagaacaattcaaacctgcagcgcatgggatcctccgagtccacagattcaggtttctgtctggatagccccggccctctggattccaaagaaaatctcgaaaaccccatgaggcgaatccattccctgccccaaaagttgctgggatgctcacctgccctgaaaagatcccattccgactcattggatcatgatatctttcagctcatcgacccagatgagaataaggaaaacgaggccttcgaatttaaaaagccagtaaggcctgttagccgtggatgccttcactctcatggactgcaggaggggaaagacctcttcacccagcgtcaaaatagcgcgcctgcccggatgctctcgagcaacgagcgggatagcagcgaacccgggaatttcattccccttttcactcctcagtccccagttacagctaccctgtcagacgaggacgacggcttcgtggacctgcttgacggcgagaacctcaaaaacgaggaggagactccatcctgtatggcctcattgtggacagccccgttagtcatgcgcaccactaatctggacaatcggtgtaaattgtttgacagcccctctctttgcagttcttctactcgatctgtgttgaagcggccagaacgctctcaggaggagtcacctcccggtagtactaagaggcggaagagcatgtcgggcgcaagtccaaaagagtccaccaaccctgagaaggcacacgaaacacttcaccagagcttgtccttagcctcctccccaaagggtacaatcgagaatatcctggataatgatccgcgggatctcattggcgatttctccaaggggtacctgttccacacggtcgctggaaaacaccaggaccttaaatatatttctccggaaatcatggctagcgtgctcaatgggaaattcgctaatctgataaaggaatttgtgattatcgactgcagatacccgtatgagtacgaaggcggacacatcaaaggtgccgttaacctccatatggaggaggaggttgaagactttttgctaaagaagcctatcgtcccaaccgatggcaaaagggtgattgtcgtgtttcattgcgaattcagctctgagcgaggcccacgtatgtgccgctatgtgcgagaaagggacagattaggcaatgagtatccaaaactccactatcccgagttgtatgtgctgaagggaggctataaagaattctttatgaagtgccagtcttattgcgagcctccctcttacaggccgatgcaccacgaagactttaaagaggacctcaagaagtttcggaccaaaagtaggacatgggcgggagagaagtcaaagagagagatgtattctaggctgaaaaagctgtag

SEQ ID NO: 121045 - DNA, 1575 bp, Artificial Sequence
  derived and/or modified sequence
atggagctgggccctgagcccccccacagaagaaggctgctgtttgcctgcagccccccaccagccagccagcctgtggtgaaggccctgtttggagccagcgctgctgggggcctgagccctgtgaccaacctgactgtgaccatggaccagctgcagggcctgggcagtgactatgagcagcccctggaggtgaagaacaacagcaacctgcagaggatgggcagcagcgagagcacagacagcggcttctgcctggacagccctggccccctggacagcaaggagaacctggagaaccccatgaggcgcatccacagcctgccccagaagctgctgggctgcagccctgccctgaagaggagccacagcgacagcctggaccatgacatcttccagctgattgatcctgatgagaacaaggaaaatgaggcctttgagttcaagaagcctgtgcggcctgtgtcccggggctgcctgcacagccacggcctgcaggagggcaaggacctcttcacccagaggcagaacagcgccccagccaggatgctgagcagcaatgaaagagacagcagcgagcccggcaacttcatccccctcttcaccccccagagccctgtgacagccaccctgagtgatgaagatgatggctttgtggacctgctggatggagagaacctgaagaatgaggaggagacccccagctgcatggccagcctgtggacagcccccctggtgatgaggaccaccaacctggacaaccgctgcaagctgtttgacagccccagcctgtgcagcagcagcaccaggtctgtgctgaagaggcctgagaggagccaggaggagagccccccaggcagcaccaagaggaggaagtccatgtctggggccagccccaaggagagcaccaaccctgagaaggcccacgagaccctgcaccagagcctgagcctggccagcagccccaagggcaccatcgagaacatcctggacaatgacccccgggacctgattggagacttcagcaagggctacctgttccacacagtggccggcaagcaccaggacctgaagtacatcagccctgagatcatggcctctgtgctgaatggcaagtttgccaacctgatcaaggagtttgtgatcatcgactgccgctacccctatgaatatgaaggaggccacatcaagggagctgtgaacctgcacatggaggaggaggtggaggacttcctgctgaagaagcccatcgtgcccacagatggcaagagggtcatcgtggtgttccactgtgagttcagcagcgagcggggccccaggatgtgccgctacgtgcgggagcgggaccggctgggcaatgagtaccccaagctgcactacccagagctgtatgtgctgaagggcggctacaaggagttcttcatgaagtgccagagctactgtgagcccccatcctaccggcccatgcaccacgaggacttcaaggaggacctgaagaagttccgcaccaagagcaggacctgggccggggagaagagcaagcgggagatgtacagccggctgaagaagctgtag

SEQ ID NO: 121046 - DNA, 1575 bp, Artificial Sequence
  derived and/or modified sequence
atggagctgggccccgagcccccccaccggcggcggctgctgttcgcctgtagccccccgcccgcaagtcagccagtagtaaaagcgctgttcggggcgagcgctgcaggaggcctaagccctgtcactaatctaaccgtgaccatggaccagctgcaaggactagggtccgattatgaacagcccctcgaggttaaaaataatagcaacttgcagcggatgggtagttccgaaagcacagactccggattctgcctcgactcgcctggccctcttgacagcaaggagaatcttgagaacccgatgcgccgcattcatagtttacctcagaaactactgggctgcagccccgctctgaagaggagtcatagcgatagtctagaccacgacatcttccagctaattgacccagatgagaacaaggaaaatgaagccttcgaatttaaaaaaccagtcagaccggtgagccgcggctgcctgcattctcacggcctacaggaggggaaagatctttttactcagcggcaaaattcggctcctgcacgaatgctgtcttcaaacgagagagactctagcgagcctgggaacttcataccgctgttcacaccccagtcccccgttaccgccacactttccgacgaagacgatggattcgtggacctcctggatggcgaaaatctgaagaatgaggaagagacaccatcatgtatggctagcttgtggaccgctcctctggttatgaggaccaccaacctcgataatcgatgcaaactgttcgactctccctctctatgctcttctagtaccagaagtgtcctcaagaggccagagcgctctcaagaagagtccccgcctgggagcacaaagaggagaaaatcaatgtctggcgcttctcctaaggaaagcacaaacccggaaaaagcccacgagacgttgcaccagtcgctttccctggccagtagtccaaagggcactatcgaaaacattctggacaacgaccctagagatctgataggggatttctctaagggatatctctttcacactgtagccggcaagcaccaagacttgaagtatatatcacctgaaatcatggcctcggtcttgaacggaaaattcgccaacctgattaaggagtttgtgattattgactgtagatacccttacgagtatgaaggtgggcacattaaaggagccgttaacctccacatggaggaggaagtggaagactttctcctcaaaaagcccatcgtgccgacagacgggaagcgcgttatcgtggtatttcattgtgagttctcatctgaacgggggcctcgtatgtgccgctatgtgagggaaagagaccgtttgggtaatgagtaccctaaactgcactaccccgagctgtacgtgctaaagggtggctataaggaattttttatgaaatgccagtcttactgtgaaccccctagttacagacccatgcatcatgaagattttaaggaagacctgaaaaagtttcgcacgaagtcccggacctgggcgggcgagaaaagcaaaagagagatgtattctcgactaaaaaaactgtag

SEQ ID NO: 121047 - DNA, 1575 bp, Artificial Sequence
  derived and/or modified sequence
atggagctcggcccagagcctccccataggaggagacttctctttgcttgttcacctccgccagctagtcagcccgtggttaaagccctttttggggcaagtgctgcaggcggactcagccctgttacaaatttgaccgtaactatggaccagctgcaggggctcggcagtgattacgagcagcctctggaagtgaaaaataactccaatttgcagaggatggggtcatccgagtctaccgattcaggtttttgtttggacagccccggacccctagacagcaaggagaacttggagaacccaatgcgacgcatccatagcctaccccaaaagttgctgggctgcagtccggctctgaagaggtcacactctgactctctggatcatgacatcttccagctcattgaccctgacgaaaataaggagaatgaggcgttcgaatttaaaaagccagtgagacctgtctcaaggggctgcctgcatagccacggtctacaggaaggtaaggacctgttcactcagaggcagaattctgcccctgctaggatgttgtcgagcaatgagagggactcctcagagccagggaacttcatcccactgtttaccccccagtcaccagtaaccgccactctcagtgatgaagatgacggtttcgtggatctgctggacggtgagaacctgaagaacgaagaggaaacccccagctgtatggcatcactctggactgcccctctcgttatgagaacaaccaacttagacaatagatgcaaattgtttgattctcctagtctctgctcctcctcaactcgatccgtccttaagcgcccagagagatcccaggaagagtctccccctggtagtacaaaaagacgcaaatccatgtccggtgcaagtccaaaagagagcaccaaccccgagaaagctcacgagaccctacaccaatcactcagccttgctagttcccccaaagggacaattgaaaatatactggacaatgacccgagagatcttattggcgactttagcaagggctacctgttccacaccgtcgcagggaagcatcaggatctcaaatacatctcgcctgagatcatggccagcgtgctcaatgggaaatttgctaatctgattaaagaatttgtgataatcgactgcagatatccttacgaatacgagggaggtcatataaagggggcagtcaacctgcatatggaggaggaggtggaagactttctattgaaaaagccaattgtccctaccgacgggaaacgggtcatcgtggtgttccattgtgaatttagttccgagcggggaccacgaatgtgcaggtacgtccgtgagagggataggctcgggaacgagtaccctaaactgcactatcccgagctttatgttctaaaaggaggttacaaggagttctttatgaagtgtcagagctactgtgaaccgccttcctacaggcccatgcaccatgaagactttaaagaagatctgaaaaagtttcgtacgaagtcaagaacttgggccggagagaaaagcaagagagagatgtactcgcggctgaagaaactgtag

SEQ ID NO: 121048 - DNA, 3783 bp, Artificial Sequence
  derived and/or modified sequence
gtcggcttggttttctgctacccggagctgggcaagcgggtgggagaacagcgaagacagcgtgagcctgggccgttgcctcgaggctctcgcccggcttctcttgccgacccgccacgtttgtttggatttaatcttcaggttgccggcgcccgcccgcccgctggcctcgcggtgtgagagggaagcacccgtgcctgtggctggtggctggcgcctggagggtccgcacacccgcccggccgcgccgcttgcccgcggcagccgcgtccctgaaccgcggagtcgtgtttgtgtttgacccgcgggcgccggtggcgcgcggccgaggccggtgtcggcggggcggggcggtcgcggcggaggcagaggaagagggagcgggagctctgcgaggccgggcgccgccatggaactgggcccggagcccccgcaccgccgccgcctgctcttcgcctgcagcccccctcccgcgtcgcagcccgtcgtgaaggcgctatttggcgcttcagccgccgggggactgtcgcctgtcaccaacctgaccgtcactatggaccagctgcagggtctgggcagtgattatgagcaaccactggaggtgaagaacaacagtaatctgcagagaatgggctcctccgagtcaacagattcaggtttctgtctagattctcctgggccattggacagtaaagaaaaccttgaaaatcctatgagaagaatacattccctacctcagaagctgttgggatgtagtccagctctgaagaggagccattctgattctcttgaccatgacatctttcagctcatcgacccagatgagaacaaggaaaatgaagcctttgagtttaagaagccagtaagacctgtatctcgtggctgcctgcactctcatggactccaggagggtaaagatctcttcacacagaggcagaactctgccccagctcggatgctttcctcaaatgaaagagatagcagtgaaccagggaatttcattcctctttttacaccccagtcacctgtgacagccactttgtctgatgaggatgatggcttcgtggaccttctcgatggagagaatctgaagaatgaggaggagaccccctcgtgcatggcaagcctctggacagctcctctcgtcatgagaactacaaaccttgacaaccgatgcaagctgtttgactccccttccctgtgtagctccagcactcggtcagtgttgaagagaccagaacgatctcaagaggagtctccacctggaagtacaaagaggaggaagagcatgtctggggccagccccaaagagtcaactaatccagagaaggcccatgagactcttcatcagtctttatccctggcatcttcccccaaaggaaccattgagaacattttggacaatgacccaagggaccttataggagacttctccaagggttatctctttcatacagttgctgggaaacatcaggatttaaaatacatctctccagaaattatggcatctgttttgaatggcaagtttgccaacctcattaaagagtttgttatcatcgactgtcgatacccatatgaatacgagggaggccacatcaagggtgcagtgaacttgcacatggaagaagaggttgaagacttcttattgaagaagcccattgtacctactgatggcaagcgtgtcattgttgtgtttcactgcgagttttcttctgagagaggtccccgcatgtgccggtatgtgagagagagagatcgcctgggtaatgaataccccaaactccactaccctgagctgtatgtcctgaaggggggatacaaggagttctttatgaaatgccagtcttactgtgagccccctagctaccggcccatgcaccacgaggactttaaagaagacctgaagaagttccgcaccaagagccggacctgggcaggggagaagagcaagagggagatgtacagtcgtctgaagaagctctgagggcggcaggaccagccagcagcagcccaagcttccctccatccccctttaccctctttgctgcagagaaacttaagcaaaggggacagctgtgtgacatttggagagggggcctgggacttccatgccttaaacctacctcccacactcccaaggttggagcccagggcatcttgctggctacgcctcttctgtccctgttagacgtcctccgtccatatcagaactgtgccacaatgcagttctgagcaccgtgtcaagctgctctgagccacagtgggatgaaccagccggggccttatcgggctccagccatctcatgaggggagaggagacggaggggagtagagaagttacacagaaatgctgctggccaaatagcaaagacaacctgggaaggaaaggtctttgtgggataatccatatgtttaatttattcaacttcatcaatcactttattttatttttttttctaactcctggagacttattttactgcttcattaggttgaaatactgccattctaggtagggttttattatcccagggactacctcggcttttaatttaaaaaaaaaaaagaagtgggtaagaaaatgcaaacctgttataagttatcggacagaaagctaggtgctctgtcacccccaggaggcgctgtggtactggggctgctgctatttaagccaagaactgaggtcctggtgagagcgttggacccaggcttggctgcctgacataagctaaatctcccagacccaccactggctaccgatatctatttggtgggaggtgtggccctgttcttcctcaccccagttccatgacattggctggtataggagccacagtcaggaaagcacttgaggcagcatctgttgggccacccccggctcagtgctggaatgttgcagtgtaggtttcccagggaaggggggtgggggtaggtgggctccacaggatgggggaggagcatgtccactgagtatcttccttatgttgctgtgatattgatagcttttattttctaatttttaaaaaatggtcatattatgagtcaaagagtatcaaatcagtgttggatggaccacccaagggtgaggagaggggctggaagccctgggcattaggagaagggagtgggtgctggcatggacatgactggatagaattttctcaggagggagcttggtggattttgaaggtaaaactttctgggtttatcatgttttaattttagagacagggagtgatgaatcatcaccggttgtccccttatctaactccataaaagtgggaatttcaaaagaacacctcatccaaggagctggggcagacttcattgattctagagagacctgtttcagtgcctactcatccctgccctctggtgccagcctccttaccatcacggcttcactgaggtgtaggtgggtttttcttaaacaggagacagtctctcccctcttacctcaacttcttggggtgggaatcagtgatactggagatggctagttgctgtgttacgggtttgagttacatttggctataaaacaatcttgttgggaaaaatgtgggggagaggacttcttcctacacgcgcattgagacagattccaactggttaatgatattgtttgtaagaaagagattctgttggttgactgcctaaagagaaaggtgggatggccttcagattataccagcttagctagcattactaaccaactgttggaagctctgaaaataaaagatcttgaacccatgctctctgcctagttcttgatggatttaagga

SEQ ID NO: 121049 - DNA, 1575 bp, Artificial Sequence
  derived and/or modified sequence
atggagctgggccccgagcccccccacagaagaagactgctgttcgcctgcagccccccccccgccagccagcccgtggtgaaggccctgttcggcgccagcgccgccggcggcctgagccccgtgaccaacctgaccgtgaccatggaccagctgcagggcctgggcagcgactacgagcagcccctggaggtgaagaacaacagcaacctgcagagaatgggcagcagcgagagcaccgacagcggcttctgcctggacagccccggccccctggacagcaaggagaacctggagaaccccatgagaagaatccacagcctgccccagaagctgctgggctgcagccccgccctgaagagaagccacagcgacagcctggaccacgacatcttccagctgatcgaccccgacgagaacaaggagaacgaggccttcgagttcaagaagcccgtgagacccgtgagcagaggctgcctgcacagccacggcctgcaggagggcaaggacctgttcacccagagacagaacagcgcccccgccagaatgctgagcagcaacgagagagacagcagcgagcccggcaacttcatccccctgttcaccccccagagccccgtgaccgccaccctgagcgacgaggacgacggcttcgtggacctgctggacggcgagaacctgaagaacgaggaggagacccccagctgcatggccagcctgtggaccgcccccctggtgatgagaaccaccaacctggacaacagatgcaagctgttcgacagccccagcctgtgcagcagcagcaccagaagcgtgctgaagagacccgagagaagccaggaggagagcccccccggcagcaccaagagaagaaagagcatgagcggcgccagccccaaggagagcaccaaccccgagaaggcccacgagaccctgcaccagagcctgagcctggccagcagccccaagggcaccatcgagaacatcctggacaacgaccccagagacctgatcggcgacttcagcaagggctacctgttccacaccgtggccggcaagcaccaggacctgaagtacatcagccccgagatcatggccagcgtgctgaacggcaagttcgccaacctgatcaaggagttcgtgatcatcgactgcagatacccctacgagtacgagggcggccacatcaagggcgccgtgaacctgcacatggaggaggaggtggaggacttcctgctgaagaagcccatcgtgcccaccgacggcaagagagtgatcgtggtgttccactgcgagttcagcagcgagagaggccccagaatgtgcagatacgtgagagagagagacagactgggcaacgagtaccccaagctgcactaccccgagctgtacgtgctgaagggcggctacaaggagttcttcatgaagtgccagagctactgcgagccccccagctacagacccatgcaccacgaggacttcaaggaggacctgaagaagttcagaaccaagagcagaacctgggccggcgagaagagcaagagagagatgtacagcagactgaagaagctgtag

SEQ ID NO: 121050 - protein, 906 aa, Artificial Sequence
  derived and/or modified sequence
MCRIAGALRTLLPLLAALLQASVEASGEIALCKTGFPEDVYSAVLSKDVHEGQPLLNVKFSNCNGKRKVQYESSEPADFKVDEDGMVYAVRSFPLSSEHAKFLIYAQDKETQEKWQVAVKLSLKPTLTEESVKESAEVEEIVFPRQFSKHSGHLQRQKRDWVIPPINLPENSRGPFPQELVRIRSDRDKNLSLRYSVTGPGADQPPTGIFIINPISGQLSVTKPLDREQIARFHLRAHAVDINGNQVENPIDIVINVIDMNDNRPEFLHQVWNGTVPEGSKPGTYVMTVTAIDADDPNALNGMLRYRIVSQAPSTPSPNMFTINNETGDIITVAAGLDREKVQQYTLIIQATDMEGNPTYGLSNTATAVITVTDVNDNPPEFTAMTFYGEVPENRVDIIVANLTVTDKDQPHTPAWNAVYRISGGDPTGRFAIQTDPNSNDGLVTVVKPIDFETNRMFVLTVAAENQVPLAKGIQHPPQSTATVSVTVIDVNENPYFAPNPKIIRQEEGLHAGTMLTTFTAQDPDRYMQQNIRYTKLSDPANWLKIDPVNGQITTIAVLDRESPNVKNNIYNATFLASDNGIPPMSGTGTLQIYLLDINDNAPQVLPQEAETCETPDPNSINITALDYDIDPNAGPFAFDLPLSPVTIKRNWTITRLNGDFAQLNLKIKFLEAGIYEVPIIITDSGNPPKSNISILRVKVCQCDSNGDCTDVDRIVGAGLGTGAIIAILLCIIILLILVLMFVVWMKRRDKERQAKQLLIDPEDDVRDNILKYDEEGGGEEDQDYDLSQLQQPDTVEPDAIKPVGIRRMDERPIHAEPQYPVRSAAPHPGDIGDFINEGLKAADNDPTAPPYDSLLVFDYEGSGSTAGSLSSLNSSSSGGEQDYDYLNDWGPRFKKLADMYGGGDD

SEQ ID NO: 121051 - DNA, 2721 bp, Artificial Sequence
  derived and/or modified sequence
atgtgtagaatcgctggggccttgcgaactctcttacctctcttggctgccctgctccaggcgtccgtggaagcaagcggggagattgccctgtgtaagaccggattcccggaggacgtatactccgctgtgctcagcaaggatgtgcatgagggccaaccactgttgaacgtgaagttcagcaattgtaacggcaagagaaaagttcaatatgaatcttccgagccagccgattttaaagtggacgaagacggtatggtctacgccgtacgctctttccctctttcctcggaacacgcgaaattccttatctatgcacaagataaggagacccaggagaaatggcaggtggccgttaaactgtccttaaagcctaccctgacggaagagagtgttaaagagtcagccgaggtagaggagattgtgttcccacggcagttttctaagcacagcggccatctgcagaggcagaagagagactgggtcatccccccaattaacttaccggaaaattctcgcggtccatttcctcaggagctcgttcgcatcagaagcgatagagacaagaatctgagtctaaggtactctgtgaccggacctggggccgaccagccccccactggcatttttatcattaatccgataagcggccagctgtctgttactaaacctctggatagagaacagatcgcccgatttcatctgcgagctcacgcggtggatattaacggcaaccaggtggagaaccctattgacattgtgatcaacgtgattgatatgaatgacaaccggcccgaattcctgcatcaggtctggaatgggaccgtgcccgagggctccaagcccggaacctacgtgatgactgtaacggctatcgacgccgacgatcccaatgcattgaacgggatgctgcggtatagaatcgtctctcaagcccccagcaccccctcccctaatatgttcaccatcaacaatgagacgggagacataattacagtcgcggcaggccttgaccgggaaaaggttcagcaatacactctaatcatccaggcgacagatatggaaggcaaccccacgtacgggctatctaataccgcaacagcggttatcaccgttaccgacgtaaacgacaatccgccagaattcactgcaatgaccttctacggggaagtcccagaaaacagagtggatatcatcgtcgcaaatctcaccgtgaccgataaggatcaaccccatacccctgcctggaatgcggtgtacagaatatccggcggagacccaacgggaagattcgcaattcaaactgatcctaacagcaatgatggtttagttacggtggttaaaccaattgacttcgaaacaaatcgaatgtttgtcctgactgtcgctgctgagaaccaggtacctctcgctaaggggatacagcacccccctcagagcaccgctaccgtttcggtcacagttattgatgtgaatgaaaatccatatttcgccccaaaccctaagatcattagacaggaagaaggcctgcatgcaggaactatgctcactacattcactgcgcaagaccctgaccgctatatgcagcagaacatccgctacaccaaacttagcgaccccgctaactggttgaagatcgatccagttaacggccagattacgaccattgcggtgctggatcgggaaagtccgaacgtgaagaacaatatttataacgccactttcctcgcatccgataacggaatccctcccatgtctgggaccggcacgctgcagatttatctgttggacattaacgataacgctccccaggtgctgcctcaggaggccgaaacctgcgaaactccagacccgaactctattaatataacagcattggactatgacatcgatcccaatgctggcccctttgcctttgatctgcctctcagccccgtaactatcaaacgtaactggaccatcacccggcttaatggcgattttgctcagctaaacctgaaaataaagtttctggaggcaggcatttacgaggtgcctattatcatcaccgactctggtaatccacccaagtctaatatatccatcctcagggtgaaagtgtgtcaatgcgatagcaatggcgattgtacagacgtggatcggatagttggcgccggcctcggaaccggcgccattatcgcaattctgctgtgcatcattattctgttaattttggtgctcatgtttgttgtttggatgaagagacgcgataaggaaagacaggccaaacagctgctcatagaccccgaggatgatgtgagggataacattctaaaatacgatgaggagggggggggagaggaagaccaggactacgatctaagtcagctccaacagccagacacagtggagccggacgctattaaacccgtcggcattagacgcatggacgaacgacctattcacgctgagccccagtaccccgtgagatcggccgctccccacccaggagatatcggcgacttcattaatgaaggcctgaaagccgccgataatgacccaaccgccccaccttacgacagcttgcttgtattcgattatgaaggctctggctcaaccgccggcagcctttcgtcactgaattcctcgagttccggcggggagcaagattatgactatcttaatgactggggtccacgtttcaaaaaattggctgatatgtacggaggcggggacgactag

SEQ ID NO: 121052 - DNA, 2721 bp, Artificial Sequence
  derived and/or modified sequence
atgtgcagaattgctggggccctgcggaccctgctgcccctgctggccgccctgctgcaggcctctgtggaggccagcggggagatcgccctgtgcaagacaggcttcccagaagatgtgtacagcgctgtgctgagcaaggatgtgcatgagggccagcccctgctgaatgtgaagttcagcaactgcaatggcaagaggaaggtgcagtatgagagcagcgagcctgctgacttcaaggtggatgaagatggcatggtgtatgctgtgcgctccttccccctgagcagcgagcacgccaagttcctgatctatgcccaggacaaggagacccaggagaagtggcaggtggccgtgaagctgagcctgaagcccaccctgacagaggagagcgtgaaggagagcgctgaggtggaggagatcgtgttcccccggcagttcagcaagcacagcggccacctgcagaggcagaagagggactgggtgatcccccccatcaacctgcctgagaacagccggggccccttcccccaggagctggtgcgcatccgcagtgaccgggacaagaacctgagcctgcgctacagcgtgacaggccctggagctgaccagcccccaacaggcatcttcatcatcaaccccatcagcggccagctgtctgtgaccaagcccctggaccgggagcagatcgcccgcttccacctgcgggcccatgctgtggacatcaatggaaaccaggtggagaaccccattgatattgtcatcaacgtcatcgacatgaatgacaacagacctgagttcctgcaccaggtgtggaatggaacagtgcctgagggcagcaagccaggcacctacgtgatgacagtgacagccattgatgctgatgaccccaatgccctgaatggcatgctgcgctaccgcatcgtgtcccaggcccccagcacccccagccccaacatgttcaccatcaacaatgaaacaggagacatcatcaccgtggccgccggcctggaccgggagaaggtgcagcagtacaccctcatcatccaggccacagacatggagggcaaccccacctacggcctgagcaacacagccacagctgtgatcaccgtgacagatgtgaatgacaaccccccagagttcaccgccatgaccttctacggggaggtgcctgaaaatagagtggacatcatcgtggccaacctgactgtgacagacaaggaccagccccacaccccagcctggaatgctgtgtaccgcatctctggaggagaccccaccggccgctttgccatccagacagaccccaacagcaatgatggcctggtgacagtggtgaagcccatcgactttgagaccaacaggatgtttgtgctgactgtggccgctgagaaccaggtgcccctggccaagggcatccagcaccccccccagagcacagccaccgtgtctgtgacagtgattgatgtgaatgaaaacccctactttgcccccaaccccaagatcatccggcaggaggagggcctgcacgccggcaccatgctgaccaccttcaccgcccaggaccctgaccgctacatgcagcagaacatccgctacaccaagctgagtgaccctgccaactggctgaagattgatcctgtgaatggccagatcaccaccatcgctgtgctggaccgggagagccccaacgtgaagaacaacatctacaatgccaccttcctggccagtgacaatggcatcccccccatgagcggcaccggcaccctgcagatctacctgctggacatcaatgacaatgccccccaggtgctgccccaggaggccgagacctgtgagaccccagaccccaacagcatcaacatcacagccctggactatgacatcgaccccaatgccggcccctttgcctttgacctgcccctgagccctgtgaccatcaagaggaactggaccatcacccggctgaatggagactttgcccagctgaacctgaagatcaagttcctggaggccggcatctatgaggtgcccatcatcatcacagattctggcaacccccccaagagcaacatcagcatcctgcgggtgaaggtgtgccagtgtgacagcaatggagactgcacagatgtggacagaattgtgggcgccggcctgggcaccggggccatcatcgccatcctgctgtgcatcatcatcctgctgatcctggtgctgatgtttgtggtgtggatgaagaggcgggacaaggagcggcaggccaagcagctgctgattgatcctgaagatgatgtgcgggacaacatcctgaagtatgatgaggagggcggcggggaggaggaccaggactatgacctgagccagctgcagcagcctgacacagtggagccagatgccatcaagcctgtgggcatccggaggatggatgagcggcccatccacgccgagccccagtaccctgtgcgctctgctgccccccaccctggggacatcggggacttcatcaatgaaggcctgaaggctgctgacaatgaccccacagccccaccctatgacagcctgctggtgtttgattatgagggcagcggcagcacagctggcagcctgagcagcctgaacagcagcagcagcggcggggagcaggactatgactacctgaatgactggggcccccgcttcaagaagctggccgacatgtatggaggaggagatgactag

SEQ ID NO: 121053 - DNA, 2721 bp, Artificial Sequence
  derived and/or modified sequence
atgtgccggatcgccggcgccctgcggaccctgctgcccctgctggcagcccttttgcaggcttcagtggaagcttccggtgagatagccctctgcaagacgggcttccccgaagacgtttactcggccgttctatccaaggatgtacacgaaggacaaccactgctcaatgtcaaatttagtaactgtaacgggaaacgtaaggttcagtatgagagttcggaacccgcggacttcaaagtcgatgaagatgggatggtatacgctgtgaggagctttcccctgtcgtctgagcacgcaaaatttctgatttatgcccaggataaggaaactcaagagaagtggcaggttgctgtcaaactttctctaaaacccaccctgaccgaagagtcagtgaaagagtccgccgaagtagaagaaattgtgttcccaagacagttctcaaagcacagcgggcatctgcaacgccaaaaacgcgattgggtgatccctcctattaacttgcccgagaattcccgaggccccttcccgcaggagctcgtcagaatacgatccgatcgcgataagaatctctcactcaggtatagtgtgacagggcctggcgccgaccaacctcctaccgggatattcattattaaccctatttccggtcagctctccgtaacaaagccactggatagagagcagattgcccgcttccacctgagggcccatgcagtggacattaacggaaatcaggtggagaacccaattgatatcgtcattaacgttatcgacatgaatgataaccgccctgagttcctgcatcaggtttggaatggcacagttcctgaagggagtaaacctggtacatacgtaatgaccgtgactgccatcgacgccgacgacccaaacgccctgaacgggatgctgcggtatagaattgtgagccaggcgccctccacgccctcgccaaatatgtttacaattaacaatgagaccggggatatcattaccgtggcagcaggtctcgatcgcgaaaaagtgcaacaatacaccctcatcattcaggccacggacatggagggaaatcctacctatggccttagtaatacggcgacagctgtcatcaccgtcacagacgtgaatgacaatccgcctgagttcaccgccatgactttttatggagaagtgccagagaaccgcgtggacatcattgtggctaatcttacggtgaccgacaaggaccagcctcataccccagcttggaacgcagtttaccgcatcagcggtggagatcccaccggaaggtttgcgatccagactgatcccaattcgaatgatggacttgtcacagtcgttaaaccaatagattttgagaccaatcggatgtttgtcttgactgtagctgccgaaaatcaggtcccacttgctaaaggaatccagcaccctccccaatccaccgctactgtctccgtaacggtaattgatgtgaacgagaatccgtacttcgccccaaaccctaagataattaggcaagaggaaggtctgcacgcagggaccatgctgacaacatttactgcccaggatcccgaccggtatatgcaacagaatattaggtacaccaagctatctgaccccgcaaattggctgaaaattgatcccgtcaatggacagattaccactatagctgtgctggaccgcgagagccctaatgtgaagaacaatatatataacgcgacttttctggctagtgataatggcattccacctatgtctggaactggcactttacagatttaccttctcgacatcaacgataatgccccgcaggtattacctcaggaggctgaaacctgcgaaacaccagatcctaattccatcaacatcacagcactcgactatgatattgatcccaatgccggcccatttgctttcgacctgcctcttagtcctgttaccataaaaaggaactggaccataacccgattgaacggtgacttcgcccagttaaaccttaaaataaagtttctggaagcaggcatttacgaagtccccatcataatcactgacagcggtaatccccccaaaagcaacatttctatcctgcgtgtgaaggtctgtcagtgtgactctaatggtgactgtaccgacgtggaccgcatcgttggtgctggactgggaactggcgccattatcgccattctgctgtgcattattatattactcattttggttcttatgttcgttgtatggatgaaacggcgggacaaggagaggcaagccaaacaactgcttattgacccagaagacgacgtgcgtgacaacatacttaaatacgatgaagagggagggggggaggaagatcaagattacgatctttctcagctccaacaacccgacactgttgaaccggatgctattaagccagtgggcatcaggagaatggacgaaaggcccattcacgccgagccgcagtacccagtcagatcagcggctcctcaccccggcgatattggtgactttataaatgaagggttgaaagctgccgataatgacccaacagcacctccgtacgactccttgcttgtattcgactatgaggggagcggatctactgcgggcagcctgagctctcttaactcttcatcttcgggtggcgagcaagattatgactaccttaatgactggggccctcgcttcaagaagctcgctgacatgtatggtgggggtgatgattag

SEQ ID NO: 121054 - DNA, 2721 bp, Artificial Sequence
  derived and/or modified sequence
atgtgccgcattgccggagccctgaggaccctcttacctctgctggccgcactgttacaggcgagtgtggaagcctcaggagaaatcgccttgtgtaaaacgggcttccctgaggatgtgtatagcgcggtgctgtctaaagatgtccatgagggccagccattactgaacgttaaattttctaattgcaatggaaaacgtaaggtccaatatgaatcctctgaacccgcagattttaaagtggacgaggatggtatggtgtacgctgtacggagcttcccactcagctctgaacatgctaagttcctcatatacgcccaagacaaggaaacccaggaaaagtggcaggtcgccgtgaaattgtcactcaaaccaacactgaccgaggaaagcgtcaaggagagcgccgaggtagaggagatagtgttcccacgccaatttagcaagcatagcgggcacctacagagacagaaaagagattgggtgataccccctatcaacctccctgagaatagtcggggaccgttccctcaggagttggtcagaatccgcagtgacagggacaaaaacctgagcctgcgctattctgtgacagggccaggagcagatcagccgcctactgggattttcataattaatcctatctctggacagctaagcgtaacaaaaccgctcgatcgggaacagattgccagattccaccttcgcgcacacgcggtggacatcaacggaaaccaagtcgagaaccccattgacatcgtgataaatgtgattgatatgaacgataaccggccagaatttctccatcaggtctggaacgggacagtgccagaaggtagtaaaccaggcacttacgtgatgactgttacagcaatcgatgccgatgatcccaacgctcttaacggaatgctcaggtatcgtatcgtgtctcaggccccttccacaccatcccctaacatgttcacaattaacaatgaaacaggggacatcattaccgtcgctgctggactggatagagaaaaggtgcagcaatacaccttgatcattcaggcaacggatatggagggtaaccccacgtacggcctgtcaaacacagctaccgccgtgataacggtcaccgacgtcaatgataacccccctgaattcacagccatgacgttttacggggaagttcctgaaaatagggtggatatcatcgtggctaatctaactgtgaccgacaaagaccagccccatactccagcttggaatgcagtgtacaggataagcggaggagaccccactggcaggttcgcaattcagaccgacccaaactccaatgacggattggttacagtggtgaagcctatcgactttgagacgaaccgaatgtttgtcttgactgtcgctgctgagaaccaggttcctctcgcaaaaggaatccagcatccgcctcagtcaacagccactgttagcgtaaccgttattgacgttaacgagaacccatattttgctccaaatcctaagattatccggcaggaggaggggcttcatgcaggcacaatgctaacgactttcactgcccaggaccctgataggtacatgcagcagaatatccggtataccaaattgtcagatccagcaaactggctgaagattgaccctgtgaacggacagattacgaccattgccgtgttggatcgagaatcccccaacgtgaagaataacatctacaatgctacattcctggctagtgacaatggcatccccccaatgagcggaactggaacccttcagatatacctgctggacattaatgacaacgcaccacaggtgttaccacaagaagctgagacctgcgagacaccagacccaaactctataaatatcacagccctggactacgatatcgatcccaacgccggtccgtttgctttcgatcttccgctgtctcccgtgaccatcaagagaaattggactatcacccgactcaatggggatttcgcccaactgaacttgaagatcaaatttctcgaggcagggatctacgaagtcccaattattatcactgactcgggaaatcctccaaaatccaatatctcaattctgcgggtgaaggtgtgccagtgcgactctaacggcgactgtacagacgttgaccgaatcgtcggagcaggcttgggaactggagccattattgctatcttactgtgtataattatactcctgatattggttttgatgtttgtcgtatggatgaaaagaagagacaaggagaggcaggcaaaacagttattaatcgatccagaagatgacgtgagagacaatatcctcaagtacgacgaagagggaggaggagaagaggaccaagactatgacttatcccagctacagcaacctgacaccgtggagcctgacgcgattaaaccggtgggcatcaggaggatggacgagagacccattcatgctgagcctcagtatcccgttaggagtgccgcacctcatcccggtgacatcggagacttcattaacgagggactgaaggccgcagacaatgatcctactgcacccccttacgactctttattggtgttcgattatgaaggcagcgggtccactgccggaagcctctccagtctgaattccagttcttctggcggagagcaagactacgattacttgaatgactggggacctagattcaaaaaacttgctgacatgtatggcggaggcgacgactag

SEQ ID NO: 121055 - DNA, 4332 bp, Artificial Sequence
  derived and/or modified sequence
cctccaccggccaaggtccccgccgctgcatccctcgcggcttccgctgcgctccgggccggagccgagccgcctgcgctgccacagcagccgcctccacacactcgcagacgctcacacgctctccctccctgttcccccgccccctccccagctccttgatctctgggtctgttttattactcctggtgcgagtcccgcggactccgcggcccgctatttgtcatcagctcgctctccattggcggggagcggagagcagcgaagaagggggtggggaggggaggggaagggaagggggtggaaactgcctggagccgtttctccgcgccgctgttggtgctgccgctgcctcctcctcctccgccgccgccgccgccgccgccgcctcctccggctcttcgctcggcccctctccgcctccatgtgccggatagcgggagcgctgcggaccctgctgccgctgctggcggccctgcttcaggcgtctgtagaggcttctggtgaaatcgcattatgcaagactggatttcctgaagatgtttacagtgcagtcttatcgaaggatgtgcatgaaggacagcctcttctcaatgtgaagtttagcaactgcaatggaaaaagaaaagtacaatatgagagcagtgagcctgcagattttaaggtggatgaagatggcatggtgtatgccgtgagaagctttccactctcttctgagcatgccaagttcctgatatatgcccaagacaaagagacccaggaaaagtggcaagtggcagtaaaattgagcctgaagccaaccttaactgaggagtcagtgaaggagtcagcagaagttgaagaaatagtgttcccaagacaattcagtaagcacagtggccacctacaaaggcagaagagagactgggtcatccctccaatcaacttgccagaaaactccaggggaccttttcctcaagagcttgtcaggatcaggtctgatagagataaaaacctttcactgcggtacagtgtaactgggccaggagctgaccagcctccaactggtatcttcattatcaaccccatctcgggtcagctgtcggtgacaaagcccctggatcgcgagcagatagcccggtttcatttgagggcacatgcagtagatattaatggaaatcaagtggagaaccccattgacattgtcatcaatgttattgacatgaatgacaacagacctgagttcttacaccaggtttggaatgggacagttcctgagggatcaaagcctggaacatatgtgatgaccgtaacagcaattgatgctgacgatcccaatgccctcaatgggatgttgaggtacagaatcgtgtctcaggctccaagcaccccttcacccaacatgtttacaatcaacaatgagactggtgacatcatcacagtggcagctggacttgatcgagaaaaagtgcaacagtatacgttaataattcaagctacagacatggaaggcaatcccacatatggcctttcaaacacagccacggccgtcatcacagtgacagatgtcaatgacaatcctccagagtttactgccatgacgttttatggtgaagttcctgagaacagggtagacatcatagtagctaatctaactgtgaccgataaggatcaaccccatacaccagcctggaacgcagtgtacagaatcagtggcggagatcctactggacggttcgccatccagaccgacccaaacagcaacgacgggttagtcaccgtggtcaaaccaatcgactttgaaacaaataggatgtttgtccttactgttgctgcagaaaatcaagtgccattagccaagggaattcagcacccccctcagtcaactgcaaccgtgtctgttacagttattgacgtaaatgaaaacccttattttgcccccaatcctaagatcattcgccaagaagaagggcttcatgccggtaccatgttgacaacattcactgctcaggacccagatcgatatatgcagcaaaatattagatacactaaattatctgatcctgccaattggctaaaaatagatcctgtgaatggacaaataactacaattgctgttttggaccgagaatcaccaaatgtgaaaaacaatatatataatgctactttccttgcttctgacaatggaattcctcctatgagtggaacaggaacgctgcagatctatttacttgatattaatgacaatgcccctcaagtgttacctcaagaggcagagacttgcgaaactccagaccccaattcaattaatattacagcacttgattatgacattgatccaaatgctggaccatttgcttttgatcttcctttatctccagtgactattaagagaaattggaccatcactcggcttaatggtgattttgctcagcttaatttaaagataaaatttcttgaagctggtatctatgaagttcccatcataatcacagattcgggtaatcctcccaaatcaaatatttccatcctgcgtgtgaaggtttgccagtgtgactccaacggggactgcacagatgtggacaggattgtgggtgcggggcttggcaccggtgccatcattgccatcctgctctgcatcatcatcctgcttatccttgtgctgatgtttgtggtatggatgaaacgccgggataaagaacgccaggccaaacaacttttaattgatccagaagatgatgtaagagataatattttaaaatatgatgaagaaggtggaggagaagaagaccaggactatgacttgagccagctgcagcagcctgacactgtggagcctgatgccatcaagcctgtgggaatccgacgaatggatgaaagacccatccacgccgagccccagtatccggtccgatctgcagccccacaccctggagacattggggacttcattaatgagggccttaaagcggctgacaatgaccccacagctccaccatatgactccctgttagtgtttgactatgaaggcagtggctccactgctgggtccttgagctcccttaattcctcaagtagtggtggtgagcaggactatgattacctgaacgactgggggccacggttcaagaaacttgctgacatgtatggtggaggtgatgactgaacttcagggtgaacttggtttttggacaagtacaaacaatttcaactgatattcccaaaaagcattcagaagctaggctttaactttgtagtctactagcacagtgcttgctggaggctttggcataggctgcaaaccaatttgggctcagagggaatatcagtgatccatactgtttggaaaaacactgagctcagttacacttgaattttacagtacagaagcactgggattttatgtgcctttttgtacctttttcagattggaattagttttctgtttaaggctttaatggtactgatttctgaaacgataagtaaaagacaaaatattttgtggtgggagcagtaagttaaaccatgatatgcttcaacacgcttttgttacattgcatttgcttttattaaaatacaaaattaaacaaacaaaaaaactcatggagcgattttattatcttgggggatgagaccatgagattggaaaatgtacattacttctagttttagactttagtttgtttttttttttttcactaaaatcttaaaacttactcagctggttgcaaataaagggagttttcatatcaccaatttgtagcaaaattgaattttttcataaactagaatgttagacacattttggtcttaatccatgtacacttttttatttctgtatttttccacttcactgtaaaaatagtatgtgtacataatgttttattggcatagtctatggagaagtgcagaaacttcagaacatgtgtatgtattatttggactatggattcaggttttttgcatgtttatatctttcgttatggataaagtatttacaaaacagtgacatttgattcaattgttgagctgtagttagaatactcaatttttaatttttttaatttttttattttttattttctttttggtttggggagggagaaaagttcttagcacaaatgttttacataatttgtaccaaaaaaaaaaaaaaaggaaaggaaagaaaggggtggcctgacactggtggcactactaagtgtgtgtttttttaaaaaaaaaatggaaaaaaaaaagcttttaaactggagagacttctgacaacagctttgcctctgtattgtgtaccagaatataaatgatacacctctgaccccagcgttctgaataaaatgctaattttggatctgg

SEQ ID NO: 121056 - DNA, 2721 bp, Artificial Sequence
  derived and/or modified sequence
atgtgcagaatcgccggcgccctgagaaccctgctgcccctgctggccgccctgctgcaggccagcgtggaggccagcggcgagatcgccctgtgcaagaccggcttccccgaggacgtgtacagcgccgtgctgagcaaggacgtgcacgagggccagcccctgctgaacgtgaagttcagcaactgcaacggcaagagaaaggtgcagtacgagagcagcgagcccgccgacttcaaggtggacgaggacggcatggtgtacgccgtgagaagcttccccctgagcagcgagcacgccaagttcctgatctacgcccaggacaaggagacccaggagaagtggcaggtggccgtgaagctgagcctgaagcccaccctgaccgaggagagcgtgaaggagagcgccgaggtggaggagatcgtgttccccagacagttcagcaagcacagcggccacctgcagagacagaagagagactgggtgatcccccccatcaacctgcccgagaacagcagaggccccttcccccaggagctggtgagaatcagaagcgacagagacaagaacctgagcctgagatacagcgtgaccggccccggcgccgaccagccccccaccggcatcttcatcatcaaccccatcagcggccagctgagcgtgaccaagcccctggacagagagcagatcgccagattccacctgagagcccacgccgtggacatcaacggcaaccaggtggagaaccccatcgacatcgtgatcaacgtgatcgacatgaacgacaacagacccgagttcctgcaccaggtgtggaacggcaccgtgcccgagggcagcaagcccggcacctacgtgatgaccgtgaccgccatcgacgccgacgaccccaacgccctgaacggcatgctgagatacagaatcgtgagccaggcccccagcacccccagccccaacatgttcaccatcaacaacgagaccggcgacatcatcaccgtggccgccggcctggacagagagaaggtgcagcagtacaccctgatcatccaggccaccgacatggagggcaaccccacctacggcctgagcaacaccgccaccgccgtgatcaccgtgaccgacgtgaacgacaacccccccgagttcaccgccatgaccttctacggcgaggtgcccgagaacagagtggacatcatcgtggccaacctgaccgtgaccgacaaggaccagccccacacccccgcctggaacgccgtgtacagaatcagcggcggcgaccccaccggcagattcgccatccagaccgaccccaacagcaacgacggcctggtgaccgtggtgaagcccatcgacttcgagaccaacagaatgttcgtgctgaccgtggccgccgagaaccaggtgcccctggccaagggcatccagcaccccccccagagcaccgccaccgtgagcgtgaccgtgatcgacgtgaacgagaacccctacttcgcccccaaccccaagatcatcagacaggaggagggcctgcacgccggcaccatgctgaccaccttcaccgcccaggaccccgacagatacatgcagcagaacatcagatacaccaagctgagcgaccccgccaactggctgaagatcgaccccgtgaacggccagatcaccaccatcgccgtgctggacagagagagccccaacgtgaagaacaacatctacaacgccaccttcctggccagcgacaacggcatcccccccatgagcggcaccggcaccctgcagatctacctgctggacatcaacgacaacgccccccaggtgctgccccaggaggccgagacctgcgagacccccgaccccaacagcatcaacatcaccgccctggactacgacatcgaccccaacgccggccccttcgccttcgacctgcccctgagccccgtgaccatcaagagaaactggaccatcaccagactgaacggcgacttcgcccagctgaacctgaagatcaagttcctggaggccggcatctacgaggtgcccatcatcatcaccgacagcggcaacccccccaagagcaacatcagcatcctgagagtgaaggtgtgccagtgcgacagcaacggcgactgcaccgacgtggacagaatcgtgggcgccggcctgggcaccggcgccatcatcgccatcctgctgtgcatcatcatcctgctgatcctggtgctgatgttcgtggtgtggatgaagagaagagacaaggagagacaggccaagcagctgctgatcgaccccgaggacgacgtgagagacaacatcctgaagtacgacgaggagggcggcggcgaggaggaccaggactacgacctgagccagctgcagcagcccgacaccgtggagcccgacgccatcaagcccgtgggcatcagaagaatggacgagagacccatccacgccgagccccagtaccccgtgagaagcgccgccccccaccccggcgacatcggcgacttcatcaacgagggcctgaaggccgccgacaacgaccccaccgcccccccctacgacagcctgctggtgttcgactacgagggcagcggcagcaccgccggcagcctgagcagcctgaacagcagcagcagcggcggcgagcaggactacgactacctgaacgactggggccccagattcaagaagctggccgacatgtacggcggcggcgacgactag

SEQ ID NO: 121057 - protein, 829 aa, Artificial Sequence
  derived and/or modified sequence
MGLPRGPLASLLLLQVCWLQCAASEPCRAVFREAEVTLEAGGAEQEPGQALGKVFMGCPGQEPALFSTDNDDFTVRNGETVQERRSLKERNPLKIFPSKRILRRHKRDWVVAPISVPENGKGPFPQRLNQLKSNKDRDTKIFYSITGPGADSPPEGVFAVEKETGWLLLNKPLDREEIAKYELFGHAVSENGASVEDPMNISIIVTDQNDHKPKFTQDTFRGSVLEGVLPGTSVMQVTATDEDDAIYTYNGVVAYSIHSQEPKDPHDLMFTIHRSTGTISVISSGLDREKVPEYTLTIQATDMDGDGSTTTAVAVVEILDANDNAPMFDPQKYEAHVPENAVGHEVQRLTVTDLDAPNSPAWRATYLIMGGDDGDHFTITTHPESNQGILTTRKGLDFEAKNQHTLYVEVTNEAPFVLKLPTSTATIVVHVEDVNEAPVFVPPSKVVEVQEGIPTGEPVCVYTAEDPDKENQKISYRILRDPAGWLAMDPDSGQVTAVGTLDREDEQFVRNNIYEVMVLAMDNGSPPTTGTGTLLLTLIDVNDHGPVPEPRQITICNQSPVRQVLNITDKDLSPHTSPFQAQLTDDSDIYWTAEVNEEGDTVVLSLKKFLKQDTYDVHLSLSDHGNKEQLTVIRATVCDCHGHVETCPGPWKGGFILPVLGAVLALLFLLLVLLLLVRKKRKIKEPLLLPEDDTRDNVFYYGEEGGGEEDQDYDITQLHRGLEARPEVVLRNDVAPTIIPTPMYRPRPANPDEIGNFIIENLKAANTDPTAPPYDTLLVFDYEGSGSDAASLSSLTSSASDQDQDYDYLNEWGSRFKKLADMYGGGEDD

SEQ ID NO: 121058 - protein, 774 aa, Artificial Sequence
  derived and/or modified sequence
MGCPGQEPALFSTDNDDFTVRNGETVQERRSLKERNPLKIFPSKRILRRHKRDWVVAPISVPENGKGPFPQRLNQLKSNKDRDTKIFYSITGPGADSPPEGVFAVEKETGWLLLNKPLDREEIAKYELFGHAVSENGASVEDPMNISIIVTDQNDHKPKFTQDTFRGSVLEGVLPGTSVMQVTATDEDDAIYTYNGVVAYSIHSQEPKDPHDLMFTIHRSTGTISVISSGLDREKVPEYTLTIQATDMDGDGSTTTAVAVVEILDANDNAPMFDPQKYEAHVPENAVGHEVQRLTVTDLDAPNSPAWRATYLIMGGDDGDHFTITTHPESNQGILTTRKGLDFEAKNQHTLYVEVTNEAPFVLKLPTSTATIVVHVEDVNEAPVFVPPSKVVEVQEGIPTGEPVCVYTAEDPDKENQKISYRILRDPAGWLAMDPDSGQVTAVGTLDREDEQFVRNNIYEVMVLAMDNGSPPTTGTGTLLLTLIDVNDHGPVPEPRQITICNQSPVRQVLNITDKDLSPHTSPFQAQLTDDSDIYWTAEVNEEGDTVVLSLKKFLKQDTYDVHLSLSDHGNKEQLTVIRATVCDCHGHVETCPGPWKGGFILPVLGAVLALLFLLLVLLLLVRKKRKIKEPLLLPEDDTRDNVFYYGEEGGGEEDQDYDITQLHRGLEARPEVVLRNDVAPTIIPTPMYRPRPANPDEIGNFIIENLKAANTDPTAPPYDTLLVFDYEGSGSDAASLSSLTSSASDQDQDYDYLNEWGSRFKKLADMYGGGEDD

SEQ ID NO: 121059 - DNA, 2490 bp, Artificial Sequence
  derived and/or modified sequence
atggggctgcctcgtgggcctctcgcgagtctcttgctgctgcaagtttgctggttgcagtgcgcagcaagcgaaccgtgtcgggccgtgttcagggaggctgaggtgaccttggaggccggcggtgctgagcaggagcctggacaggctctgggtaaggtctttatggggtgtccaggacaggagcccgcactgttctccacggacaatgatgacttcactgtgcggaacggggaaaccgtgcaggaaagaagatccctgaaggaacggaacccacttaagatattcccatcaaaaagaattttacgcagacacaagagagactgggtggtggcccccatttcagtcccagaaaacggaaagggtcccttcccacagcggttaaatcaactcaaatcaaataaggatcgcgacacaaagatattttactccatcaccgggcctggggcagactctccacccgaaggggtctttgccgtggagaaggaaacgggctggctgttgcttaacaagccgctggatcgagaagagattgctaagtacgagttgttcggtcacgcggtgtctgaaaacggtgcctcggtggaggacccaatgaatatcagcatcatagtgacagatcagaacgaccataagcccaagtttacgcaggacactttcagagggtccgttctagaaggtgtgctgcccggtaccagcgtgatgcaagtaactgcaacggatgaggacgatgctatttatacttacaacggagtggtcgcctacagtattcactcccaagagcccaaagacccccacgaccttatgtttaccattcaccgcagcaccggaaccatttctgtgattagctcaggcctggacagagagaaggtaccggagtacacactgaccatacaggcaacggacatggacggggacgggagtacgactacagccgtcgcggtggttgagattctggatgccaatgataacgctccgatgtttgacccacagaaatacgaagctcatgtccccgaaaacgctgtggggcacgaggtccagcggctgacggtgacggacctcgacgcccccaactcccctgcctggagggcaacatatctgatcatggggggggatgacggggatcactttacaataactacgcatcccgagtctaatcagggaattctaactacgcggaaaggactcgactttgaggccaagaatcagcacactttgtacgtggaggtgacgaacgaggccccttttgttctaaagctgcccaccagtacagctaccatcgtcgtgcacgtggaggatgtcaacgaggcccccgtctttgtccccccatccaaagtcgtagaggtgcaggagggcatacctacgggcgaacccgtgtgtgtctacaccgccgaggatccagacaaggagaaccaaaagatctcctacagaatactgagagatccagctgggtggctggcaatggaccccgattcgggccaggtcacagccgttgggaccctcgacagggaggacgagcagttcgtaaggaacaatatatatgaggtgatggttcttgccatggacaatgggtcaccccccaccacagggactggcaccctgctgctgaccctgattgacgtaaacgaccacggccctgtgcctgaacccagacaaataactatttgtaatcagtcccccgtacgccaggtccttaatattacagataaggatttgtcacctcatacatccccattccaggcccagctgaccgatgacagcgacatctactggaccgcagaagttaatgaagaaggagatacagttgttctgtctctgaaaaaatttctgaagcaagatacatatgacgtacacttgtctctttcagaccacggcaacaaggagcagttgacagttatcagagctaccgtgtgcgattgccatgggcacgtggaaacctgcccaggtccctggaagggcggcttcatactgcctgtactgggggcggtcctagccctgctctttctgctgttagtgctcctgctactcgtgcgaaaaaagagaaagataaaggagccgttactgctccctgaggacgacacacgtgataatgtgttctattacggagaggagggtgggggcgaagaggatcaggactatgacattacgcagttgcacagagggctggaggcgcgaccggaagtggtgcttcgcaacgatgtcgctcccacaatcattcccactccaatgtatcgacctcgcccggctaatccggatgagattgggaatttcatcatcgagaacctgaaggccgccaataccgacccgactgccccgccttacgataccctgcttgtgtttgactacgaggggagcggctccgacgccgcgtcacttagctcactgacgtcctcagcgagcgatcaggaccaagactatgactacctcaatgaatggggctctaggttcaagaagttggctgatatgtatggcggaggagaagacgactag

SEQ ID NO: 121060 - DNA, 2490 bp, Artificial Sequence
  derived and/or modified sequence
atgggcctgccccggggccccctggccagcctgctgctgctgcaggtgtgctggctgcagtgtgccgccagcgagccctgcagagctgtgttccgggaggccgaggtgaccctggaggccggcggcgctgagcaggagcccggccaggccctgggcaaggtgttcatgggctgccccggccaggagcccgccctcttcagcacagacaatgatgacttcaccgtgagaaatggagagaccgtgcaggagcggcgcagcctgaaggagaggaaccccctgaagatcttccccagcaagaggatcctgcggcggcacaagagggactgggtggtggcccccatctctgtgcctgaaaatggcaagggccccttcccccagaggctgaaccagctgaagagcaacaaggaccgggacaccaagatcttctacagcatcaccggccctggagctgacagccccccagagggcgtgtttgctgtggagaaggagaccggctggctgctgctgaacaagcccctggaccgggaggagatcgccaagtatgagctgtttggacatgctgtgtctgaaaatggagcctctgtggaggaccccatgaacatcagcatcatcgtgacagaccagaatgaccacaagcccaagttcacccaggacaccttccggggctctgtgctggagggcgtgctgcccggcacctctgtgatgcaggtgacagccacagatgaagatgatgccatctacacctacaacggggtggtggcctacagcatccacagccaggagcccaaggacccccatgacctgatgttcaccatccacaggagcacaggcaccatcagcgtcatcagcagcggcctggaccgggagaaggtgcctgagtacaccctgaccatccaggccacagacatggatggagatggcagcaccaccacagctgtggccgtggtggagatcctggatgccaatgacaatgcccccatgtttgacccccagaagtatgaggcccacgtgcctgaaaatgctgtgggccacgaggtgcagaggctgactgtgacagacctggatgcccccaacagccctgcctggagggccacctacctgatcatgggaggagatgatggagaccacttcaccatcaccacccaccctgagagcaaccagggcatcctgaccaccaggaagggcctggactttgaggccaagaaccagcacaccctgtatgtggaggtgaccaatgaggccccctttgtgctgaagctgcccaccagcacagccaccatcgtggtgcacgtggaggatgtgaatgaggcccctgtgtttgtgccccccagcaaggtggtggaggtgcaggagggcatccccactggagagcctgtgtgtgtgtacacagcagaagatcctgacaaggagaaccagaagatctcctaccgcatcctgcgggaccctgctggctggctggccatggaccctgacagcggccaggtgacagctgtgggcaccctggaccgggaggatgagcagtttgtgaggaacaacatctatgaggtgatggtgctggccatggacaatggcagcccccccaccactggaacaggcaccctgctgctgaccctgattgatgtgaatgaccacggccctgtgcctgagccccggcagatcaccatctgcaaccagagccctgtgcggcaggtgctgaacatcacagacaaggacctgagcccccacaccagccccttccaggcccagctgacagatgacagcgacatctactggacagctgaggtgaatgaggagggggacacagtggtgctgagcctgaagaagttcctgaagcaggacacctatgatgtgcacctgagcctgagtgaccacggcaacaaggagcagctgaccgtcatccgggccaccgtgtgtgactgccacggccacgtggagacctgccccggcccctggaagggcggcttcatcctgcctgtgctgggcgctgtgctggccctgctcttcctgctgctggtgctgctgctgctggtgaggaagaagaggaagatcaaggagcccctgctgctgcctgaagatgacacccgggacaacgtgttctactatggagaggagggcggcggggaggaggaccaggactatgacatcacccagctgcaccggggcctggaggcccggcctgaggtggtgctgagaaatgatgtggcccccaccatcatccccacccccatgtaccggcccaggcctgccaacccagatgagatcggcaacttcatcatcgagaacctgaaggccgccaacacagaccccacagccccaccctatgacaccctgctggtgtttgattatgagggcagcggcagtgatgctgccagcctgagcagcctgaccagcagcgccagtgaccaggaccaggactatgactacctgaatgagtggggcagccgcttcaagaagctggccgacatgtatggaggaggagaagatgactag

SEQ ID NO: 121061 - DNA, 2490 bp, Artificial Sequence
  derived and/or modified sequence
atgggcctgccccggggccccctggccagcctgctgctgctgcaggtgtgctggcttcagtgcgccgcgtctgagccatgtagagcagtttttcgggaggctgaggtgacgctggaggcaggaggtgcagagcaggaacccggtcaagcactgggcaaggtctttatgggctgccccggacaggaacccgctttgttttcaactgataatgatgactttaccgtgaggaacggggaaactgtgcaggagcggagatcactaaaggagcgcaacccgctcaaaatctttccttccaagcggatcctgagaaggcataaaagggattgggtggttgccccaatatccgtgcccgagaatggtaagggacccttccctcagcggttgaaccagcttaagtccaacaaggacagggacactaaaattttttattctatcacgggtcctggtgccgatagccctcccgagggagttttcgcagtggaaaaggagactgggtggctattgctgaataaacctcttgacagggaggaaatcgcaaaatatgagttgtttggtcatgccgtaagtgagaacggggcatctgtggaagaccccatgaatatcagcatcattgttactgaccaaaatgaccataagccaaagttcacgcaggatacattccgagggtccgtccttgagggagtgctgcccggaacttctgtgatgcaagtcacagcaactgacgaggacgacgcaatctacacctacaacggtgttgtggcctactctattcacagtcaagaacctaaggacccgcacgatctgatgtttactattcatcgctccacaggaacgatctccgtcatcagttcagggctagaccgcgagaaagtgcctgaatacacgctgactatccaggccaccgatatggacggcgacggctcaacaacgacagctgtggctgttgtggagatcctggatgcgaacgacaacgccccaatgttcgacccgcagaagtacgaagctcacgttcccgagaacgcggtgggccacgaggtgcagaggctcactgtgacagacctggacgccccaaacagccctgcatggagggccacctatctgatcatgggaggggacgacggcgaccacttcaccatcactactcaccctgaaagtaatcagggcattttgactacaaggaagggcctggacttcgaagccaagaatcagcacaccctctacgtggaggtcaccaatgaagcccccttcgtgctgaaactccctacatccacagcaactatcgtagtgcatgttgaggacgtcaatgaggcacccgtgtttgtcccacctagtaaagtggtggaagtgcaggagggaattcccactggagagccagtgtgtgtgtacaccgcagaagatccggataaggagaaccagaaaatcagttaccgcatcttacgcgaccctgccggctggcttgccatggatccagactcgggccaggtcactgccgtggggacgcttgatagggaagatgaacagttcgtgcgaaacaacatctatgaggttatggtcctcgctatggacaacggctctccaccaacaacggggacagggacactgctgctgaccctgatcgacgtgaatgaccatggtccagtgcccgagcccagacagatcactatctgcaaccagagtcccgtacggcaagttctcaatattacagacaaagacttaagtccccacacctcgccctttcaggctcagctgactgacgatagcgatatatactggacagctgaagtcaatgaggaaggcgatacggtggtgcttagcttgaaaaagtttctgaagcaggacacttacgacgtacatttgagcctgtccgatcacgggaataaagagcagttaactgtgattagagcaacagtgtgcgactgccacgggcacgtagagacatgccctggcccttggaaaggaggttttatactgccagttctgggcgcagttttggctctcctcttccttctgctagtgttgttgctactagttaggaagaagagaaaaattaaggaaccccttctcctgccagaagacgacaccagggataatgtcttctactatggggaagagggaggcggagaggaagaccaggattacgacattacccagttacatcgcggactagaggctagacccgaagtggtgctgcggaacgatgtcgcccccacgattattcccaccccaatgtaccgtccgaggcctgctaaccctgatgagatcgggaatttcatcatcgagaacttgaaagccgctaatacagacccgaccgcaccgccgtacgacacattgctggtctttgactatgaaggttctggctcagatgctgcctcgctgtccagtttaacctctagcgcctcagaccaagatcaggattatgattacctaaacgaatggggaagccgatttaagaaactcgccgatatgtacggaggcggggaggacgactag

SEQ ID NO: 121062 - DNA, 2490 bp, Artificial Sequence
  derived and/or modified sequence
atgggcctgccacggggacctttagcgagtctgctcttacttcaggtctgttggctccagtgcgcagctagcgagccctgtagagcagtcttcagggaggcagaggttacgctggaggcaggcggagccgagcaggagccgggtcaagccttaggaaaggtattcatgggatgtccaggacaggagccagccctcttttccacggataacgatgacttcactgtcagaaatggtgaaacggttcaagaaaggagatccttaaaggaacggaacccccttaagatctttccaagcaaacggattctacgccgacataagcgggactgggtagtggcccctatctctgtcccagagaatggaaaaggaccttttcctcagaggctcaaccagttgaaatctaataaggatcgcgacacaaaaattttttattccatcaccggtccgggagcagactcacccccagaaggcgtgttcgctgtcgaaaaagaaactgggtggttgttgctgaacaagccactggatcgcgaagaaattgcaaagtatgaattgtttggccacgcagtgagtgaaaatggagctagtgttgaggatcctatgaacataagcattatcgttaccgatcagaatgaccataagccaaaatttacgcaggataccttccggggttccgtgctcgagggtgtgctccctgggactagtgtcatgcaggtcacggccactgacgaggatgatgcaatctatacgtacaacggggtggtggcctattccattcacagtcaggagccaaaagacccccacgatctgatgttcaccattcatcgcagtactggcacgatctcggtcatctcaagtggtttagacagagaaaaggtacctgaatataccctgactattcaagcgacagatatggacggcgatggctcgacgaccacggccgttgctgttgtggagatactggatgccaacgataacgccccaatgtttgatcctcagaaatatgaggcacacgtgccagaaaacgctgtgggacacgaagttcagcgcttaaccgtaaccgatctcgacgcgcctaattcaccagcctggcgcgctacttatttgatcatgggcggagacgatggggaccactttactatcactactcaccccgaatccaatcagggtatcctcactactcgcaagggtttggactttgaggctaaaaatcaacataccctgtacgtcgaagtgaccaacgaggctcccttcgttttgaaactaccaacttcgacagcaaccatcgttgtgcacgtggaggacgtcaatgaggctcctgtgttcgtacccccttccaaggtggtggaagtacaggaagggatacctacaggggaaccggtgtgtgtctacactgccgaagaccccgataaggagaaccaaaaaatatcctataggatccttagggaccctgccggatggttagcaatggatcctgactccggacaagtcacggccgtgggcaccctggaccgggaggacgagcagttcgtgcgaaataacatctatgaagttatggtgctggctatggacaacggcagcccccctaccacgggaacaggaactctccttcttacccttatcgatgtcaacgaccacggacccgtgcctgagcctcgacaaatcacaatctgcaaccaatcccctgtgaggcaggtcctcaatataaccgacaaggacctgtccccccacacatccccctttcaagctcaactgacggacgactctgatatttactggaccgccgaagtcaacgaggagggggatacagtcgtgttatccctgaaaaagttcttgaagcaggacacctacgatgtgcatctgtccctttcggaccacggcaacaaggagcagttgacggtgatccgggcaactgtatgtgattgtcacggtcatgtagagacttgtccgggaccttggaagggcggatttatcctccctgtgcttggagctgtgctagcattgctgttcctgctcctcgtgttgttgctgctggtacgcaaaaagaggaagatcaaagaacctttgctgctgccagaagacgacactagagacaacgtgttctattatggagaggaaggcggaggggaggaggatcaggactatgacattacccagctccatcggggtcttgaagcccgtccagaagttgtattgaggaacgatgttgctcctactattatacccacaccgatgtataggccaagacctgccaatcccgacgagatcggcaattttatcattgaaaacctcaaggcagcaaacactgaccctacagccccaccctacgatacgctcttggtcttcgattacgaaggcagcgggtctgacgccgctagcctgtcctcactgacctcctcagcatcagaccaggaccaggactatgactatctgaacgagtgggggtctcgatttaagaagctcgctgatatgtatggcggaggggaagacgactag

SEQ ID NO: 121063 - DNA, 3702 bp, Artificial Sequence
  derived and/or modified sequence
ggctggcacgggaggtggagaaagaggcttgggcggccccgctgtagccgcgtgtgggaggacgcacgggcctgcttcaaagctttgggataacagcgcctccgggggataatgaatgcggagcctccgttttcagtcgacttcagatgtgtctccacttttttccgctgtagccgcaaggcaaggaaacatttctcttcccgtactgaggaggctgaggagtgcactgggtgttcttttctcctctaacccagaactgcgagacagaggctgagtccctgtaaagaacagctccagaaaagccaggagagcgcaggagggcatccgggaggccaggaggggttcgctggggcctcaaccgcacccacatcggtcccacctgcgagggggcgggacctcgtggcgctggaccaatcagcacccacctgcgctcacctggcctcctcccgctggctcccgggggctgcggtgctcaaaggggcaagagctgagcggaacaccggcccgccgtcgcggcagctgcttcacccctctctctgcagccatggggctccctcgtggacctctcgcgtctctcctccttctccaggtttgctggctgcagtgcgcggcctccgagccgtgccgggcggtcttcagggaggctgaagtgaccttggaggcgggaggcgcggagcaggagcccggccaggcgctggggaaagtattcatgggctgccctgggcaagagccagctctgtttagcactgataatgatgacttcactgtgcggaatggcgagacagtccaggaaagaaggtcactgaaggaaaggaatccattgaagatcttcccatccaaacgtatcttacgaagacacaagagagattgggtggttgctccaatatctgtccctgaaaatggcaagggtcccttcccccagagactgaatcagctcaagtctaataaagatagagacaccaagattttctacagcatcacggggccgggggcagacagcccccctgagggtgtcttcgctgtagagaaggagacaggctggttgttgttgaataagccactggaccgggaggagattgccaagtatgagctctttggccacgctgtgtcagagaatggtgcctcagtggaggaccccatgaacatctccatcatcgtgaccgaccagaatgaccacaagcccaagtttacccaggacaccttccgagggagtgtcttagagggagtcctaccaggtacttctgtgatgcaggtgacagccacggatgaggatgatgccatctacacctacaatggggtggttgcttactccatccatagccaagaaccaaaggacccacacgacctcatgttcaccattcaccggagcacaggcaccatcagcgtcatctccagtggcctggaccgggaaaaagtccctgagtacacactgaccatccaggccacagacatggatggggacggctccaccaccacggcagtggcagtagtggagatccttgatgccaatgacaatgctcccatgtttgacccccagaagtacgaggcccatgtgcctgagaatgcagtgggccatgaggtgcagaggctgacggtcactgatctggacgcccccaactcaccagcgtggcgtgccacctaccttatcatgggcggtgacgacggggaccattttaccatcaccacccaccctgagagcaaccagggcatcctgacaaccaggaagggtttggattttgaggccaaaaaccagcacaccctgtacgttgaagtgaccaacgaggccccttttgtgctgaagctcccaacctccacagccaccatagtggtccacgtggaggatgtgaatgaggcacctgtgtttgtcccaccctccaaagtcgttgaggtccaggagggcatccccactggggagcctgtgtgtgtctacactgcagaagaccctgacaaggagaatcaaaagatcagctaccgcatcctgagagacccagcagggtggctagccatggacccagacagtgggcaggtcacagctgtgggcaccctcgaccgtgaggatgagcagtttgtgaggaacaacatctatgaagtcatggtcttggccatggacaatggaagccctcccaccactggcacgggaacccttctgctaacactgattgatgtcaatgaccatggcccagtccctgagccccgtcagatcaccatctgcaaccaaagccctgtgcgccaggtgctgaacatcacggacaaggacctgtctccccacacctcccctttccaggcccagctcacagatgactcagacatctactggacggcagaggtcaacgaggaaggtgacacagtggtcttgtccctgaagaagttcctgaagcaggatacatatgacgtgcacctttctctgtctgaccatggcaacaaagagcagctgacggtgatcagggccactgtgtgcgactgccatggccatgtcgaaacctgccctggaccctggaagggaggtttcatcctccctgtgctgggggctgtcctggctctgctgttcctcctgctggtgctgcttttgttggtgagaaagaagcggaagatcaaggagcccctcctactcccagaagatgacacccgtgacaacgtcttctactatggcgaagaggggggtggcgaagaggaccaggactatgacatcacccagctccaccgaggtctggaggccaggccggaggtggttctccgcaatgacgtggcaccaaccatcatcccgacacccatgtaccgtcctcggccagccaacccagatgaaatcggcaactttataattgagaacctgaaggcggctaacacagaccccacagccccgccctacgacaccctcttggtgttcgactatgagggcagcggctccgacgccgcgtccctgagctccctcacctcctccgcctccgaccaagaccaagattacgattatctgaacgagtggggcagccgcttcaagaagctggcagacatgtacggtggcggggaggacgactaggcggcctgcctgcagggctggggaccaaacgtcaggccacagagcatctccaaggggtctcagttcccccttcagctgaggacttcggagcttgtcaggaagtggccgtagcaacttggcggagacaggctatgagtctgacgttagagtggtggcttccttagcctttcaggatggaggaatgtgggcagtttgacttcagcactgaaaacctctccacctgggccagggttgcctcagaggccaagtttccagaagcctcttacctgccgtaaaatgctcaaccctgtgtcctgggcctgggcctgctgtgactgacctacagtggactttctctctggaatggaaccttcttaggcctcctggtgcaacttaatttttttttttaatgctatcttcaaaacgttagagaaagttcttcaaaagtgcagcccagagctgctgggcccactggccgtcctgcatttctggtttccagaccccaatgcctcccattcggatggatctctgcgtttttatactgagtgtgcctaggttgccccttattttttattttccctgttgcgttgctatagatgaagggtgaggacaatcgtgtatatgtactagaacttttttattaaagaaacttttcccagaggtgcctggggagtgaactgttttctaaa

SEQ ID NO: 121064 - DNA, 2746 bp, Artificial Sequence
  derived and/or modified sequence
gcggtgctcaaaggggcaagagctgagcggaacaccggcccgccgtcgcggcagctgcttcacccctctctctgcagccatggggctccctcgtggacctctcgcgtctctcctccttctccagtattcatgggctgccctgggcaagagccagctctgtttagcactgataatgatgacttcactgtgcggaatggcgagacagtccaggaaagaaggtcactgaaggaaaggaatccattgaagatcttcccatccaaacgtatcttacgaagacacaagagagattgggtggttgctccaatatctgtccctgaaaatggcaagggtcccttcccccagagactgaatcagctcaagtctaataaagatagagacaccaagattttctacagcatcacggggccgggggcagacagcccccctgagggtgtcttcgctgtagagaaggagacaggctggttgttgttgaataagccactggaccgggaggagattgccaagtatgagctctttggccacgctgtgtcagagaatggtgcctcagtggaggaccccatgaacatctccatcatcgtgaccgaccagaatgaccacaagcccaagtttacccaggacaccttccgagggagtgtcttagagggagtcctaccaggtacttctgtgatgcaggtgacagccacggatgaggatgatgccatctacacctacaatggggtggttgcttactccatccatagccaagaaccaaaggacccacacgacctcatgttcaccattcaccggagcacaggcaccatcagcgtcatctccagtggcctggaccgggaaaaagtccctgagtacacactgaccatccaggccacagacatggatggggacggctccaccaccacggcagtggcagtagtggagatccttgatgccaatgacaatgctcccatgtttgacccccagaagtacgaggcccatgtgcctgagaatgcagtgggccatgaggtgcagaggctgacggtcactgatctggacgcccccaactcaccagcgtggcgtgccacctaccttatcatgggcggtgacgacggggaccattttaccatcaccacccaccctgagagcaaccagggcatcctgacaaccaggaagggtttggattttgaggccaaaaaccagcacaccctgtacgttgaagtgaccaacgaggccccttttgtgctgaagctcccaacctccacagccaccatagtggtccacgtggaggatgtgaatgaggcacctgtgtttgtcccaccctccaaagtcgttgaggtccaggagggcatccccactggggagcctgtgtgtgtctacactgcagaagaccctgacaaggagaatcaaaagatcagctaccgcatcctgagagacccagcagggtggctagccatggacccagacagtgggcaggtcacagctgtgggcaccctcgaccgtgaggatgagcagtttgtgaggaacaacatctatgaagtcatggtcttggccatggacaatggaagccctcccaccactggcacgggaacccttctgctaacactgattgatgtcaatgaccatggcccagtccctgagccccgtcagatcaccatctgcaaccaaagccctgtgcgccaggtgctgaacatcacggacaaggacctgtctccccacacctcccctttccaggcccagctcacagatgactcagacatctactggacggcagaggtcaacgaggaaggtgacacagtggtcttgtccctgaagaagttcctgaagcaggatacatatgacgtgcacctttctctgtctgaccatggcaacaaagagcagctgacggtgatcagggccactgtgtgcgactgccatggccatgtcgaaacctgccctggaccctggaagggaggtttcatcctccctgtgctgggggctgtcctggctctgctgttcctcctgctggtgctgcttttgttggtgagaaagaagcggaagatcaaggagcccctcctactcccagaagatgacacccgtgacaacgtcttctactatggcgaagaggggggtggcgaagaggaccaggactatgacatcacccagctccaccgaggtctggaggccaggccggaggtggttctccgcaatgacgtggcaccaaccatcatcccgacacccatgtaccgtcctcggccagccaacccagatgaaatcggcaactttataattgagaacctgaaggcggctaacacagaccccacagccccgccctacgacaccctcttggtgttcgactatgagggcagcggctccgacgccgcgtccctgagctccctcacctcctccgcctccgaccaagaccaagattacgattatctgaacgagtggggcagccgcttcaagaagctggcagacatgtacggtggcggggaggacgactaggcggcctgcctgcagggctggggaccaaacgtcaggccacagagcatctccaaggggtctcagttcccccttcagctgaggacttcggagcttgtcaggaagtggccgtagcaacttggcggagacaggctatgagtctgacgttagagtggtggcttccttagcctttcaggatggaggaatgtgggcagtttgacttcagcactgaaaacctctccacctgggccagggttgcctcagaggccaagtttccagaagcctcttacctgccgtaaaatgctcaaccctgtgt

SEQ ID NO: 121065 - DNA, 2490 bp, Artificial Sequence
  derived and/or modified sequence
atgggcctgcccagaggccccctggccagcctgctgctgctgcaggtgtgctggctgcagtgcgccgccagcgagccctgcagagccgtgttcagagaggccgaggtgaccctggaggccggcggcgccgagcaggagcccggccaggccctgggcaaggtgttcatgggctgccccggccaggagcccgccctgttcagcaccgacaacgacgacttcaccgtgagaaacggcgagaccgtgcaggagagaagaagcctgaaggagagaaaccccctgaagatcttccccagcaagagaatcctgagaagacacaagagagactgggtggtggcccccatcagcgtgcccgagaacggcaagggccccttcccccagagactgaaccagctgaagagcaacaaggacagagacaccaagatcttctacagcatcaccggccccggcgccgacagcccccccgagggcgtgttcgccgtggagaaggagaccggctggctgctgctgaacaagcccctggacagagaggagatcgccaagtacgagctgttcggccacgccgtgagcgagaacggcgccagcgtggaggaccccatgaacatcagcatcatcgtgaccgaccagaacgaccacaagcccaagttcacccaggacaccttcagaggcagcgtgctggagggcgtgctgcccggcaccagcgtgatgcaggtgaccgccaccgacgaggacgacgccatctacacctacaacggcgtggtggcctacagcatccacagccaggagcccaaggacccccacgacctgatgttcaccatccacagaagcaccggcaccatcagcgtgatcagcagcggcctggacagagagaaggtgcccgagtacaccctgaccatccaggccaccgacatggacggcgacggcagcaccaccaccgccgtggccgtggtggagatcctggacgccaacgacaacgcccccatgttcgacccccagaagtacgaggcccacgtgcccgagaacgccgtgggccacgaggtgcagagactgaccgtgaccgacctggacgcccccaacagccccgcctggagagccacctacctgatcatgggcggcgacgacggcgaccacttcaccatcaccacccaccccgagagcaaccagggcatcctgaccaccagaaagggcctggacttcgaggccaagaaccagcacaccctgtacgtggaggtgaccaacgaggcccccttcgtgctgaagctgcccaccagcaccgccaccatcgtggtgcacgtggaggacgtgaacgaggcccccgtgttcgtgccccccagcaaggtggtggaggtgcaggagggcatccccaccggcgagcccgtgtgcgtgtacaccgccgaggaccccgacaaggagaaccagaagatcagctacagaatcctgagagaccccgccggctggctggccatggaccccgacagcggccaggtgaccgccgtgggcaccctggacagagaggacgagcagttcgtgagaaacaacatctacgaggtgatggtgctggccatggacaacggcagcccccccaccaccggcaccggcaccctgctgctgaccctgatcgacgtgaacgaccacggccccgtgcccgagcccagacagatcaccatctgcaaccagagccccgtgagacaggtgctgaacatcaccgacaaggacctgagcccccacaccagccccttccaggcccagctgaccgacgacagcgacatctactggaccgccgaggtgaacgaggagggcgacaccgtggtgctgagcctgaagaagttcctgaagcaggacacctacgacgtgcacctgagcctgagcgaccacggcaacaaggagcagctgaccgtgatcagagccaccgtgtgcgactgccacggccacgtggagacctgccccggcccctggaagggcggcttcatcctgcccgtgctgggcgccgtgctggccctgctgttcctgctgctggtgctgctgctgctggtgagaaagaagagaaagatcaaggagcccctgctgctgcccgaggacgacaccagagacaacgtgttctactacggcgaggagggcggcggcgaggaggaccaggactacgacatcacccagctgcacagaggcctggaggccagacccgaggtggtgctgagaaacgacgtggcccccaccatcatccccacccccatgtacagacccagacccgccaaccccgacgagatcggcaacttcatcatcgagaacctgaaggccgccaacaccgaccccaccgcccccccctacgacaccctgctggtgttcgactacgagggcagcggcagcgacgccgccagcctgagcagcctgaccagcagcgccagcgaccaggaccaggactacgactacctgaacgagtggggcagcagattcaagaagctggccgacatgtacggcggcggcgaggacgactag

SEQ ID NO: 121066 - protein, 916 aa, Artificial Sequence
  derived and/or modified sequence
MTAGAGVLLLLLSLSGALRAHNEDLTTRETCKAGFSEDDYTALISQNILEGEKLLQVKFSSCVGTKGTQYETNSMDFKVGADGTVFATRELQVPSEQVAFTVTAWDSQTAEKWDAVVRLLVAQTSSPHSGHKPQKGKKVVALDPSPPPKDTLLPWPQHQNANGLRRRKRDWVIPPINVPENSRGPFPQQLVRIRSDKDNDIPIRYSITGVGADQPPMEVFSIDSMSGRMYVTRPMDREEHASYHLRAHAVDMNGNKVENPIDLYIYVIDMNDNRPEFINQVYNGSVDEGSKPGTYVMTVTANDADDSTTANGMVRYRIVTQTPQSPSQNMFTINSETGDIVTVAAGLDREKVQQYTVIVQATDMEGNLNYGLSNTATAIITVTDVNDNPPEFTASTFAGEVPENRVETVVANLTVMDRDQPHSPNWNAVYRIISGDPSGHFSVRTDPVTNEGMVTVVKAVDYELNRAFMLTVMVSNQAPLASGIQMSFQSTAGVTISIMDINEAPYFPSNHKLIRLEEGVPPGTVLTTFSAVDPDRFMQQAVRYSKLSDPASWLHINATNGQITTAAVLDRESLYTKNNVYEATFLAADNGIPPASGTGTLQIYLIDINDNAPELLPKEAQICEKPNLNAINITAADADVDPNIGPYVFELPFVPAAVRKNWTITRLNGDYAQLSLRILYLEAGMYDVPIIVTDSGNPPLSNTSIIKVKVCPCDDNGDCTTIGAVAAAGLGTGAIVAILICILILLTMVLLFVMWMKRREKERHTKQLLIDPEDDVRDNILKYDEEGGGEEDQDYDLSQLQQPEAMGHVPSKAPGVRRVDERPVGAEPQYPIRPMVPHPGDIGDFINEGLRAADNDPTAPPYDSLLVFDYEGSGSTAGSVSSLNSSSSGDQDYDYLNDWGPRFKKLADMYGGGEED

SEQ ID NO: 121067 - protein, 842 aa, Artificial Sequence
  derived and/or modified sequence
MDFKVGADGTVFATRELQVPSEQVAFTVTAWDSQTAEKWDAVVRLLVAQTSSPHSGHKPQKGKKVVALDPSPPPKDTLLPWPQHQNANGLRRRKRDWVIPPINVPENSRGPFPQQLVRIRSDKDNDIPIRYSITGVGADQPPMEVFSIDSMSGRMYVTRPMDREEHASYHLRAHAVDMNGNKVENPIDLYIYVIDMNDNRPEFINQVYNGSVDEGSKPGTYVMTVTANDADDSTTANGMVRYRIVTQTPQSPSQNMFTINSETGDIVTVAAGLDREKVQQYTVIVQATDMEGNLNYGLSNTATAIITVTDVNDNPPEFTASTFAGEVPENRVETVVANLTVMDRDQPHSPNWNAVYRIISGDPSGHFSVRTDPVTNEGMVTVVKAVDYELNRAFMLTVMVSNQAPLASGIQMSFQSTAGVTISIMDINEAPYFPSNHKLIRLEEGVPPGTVLTTFSAVDPDRFMQQAVRYSKLSDPASWLHINATNGQITTAAVLDRESLYTKNNVYEATFLAADNGIPPASGTGTLQIYLIDINDNAPELLPKEAQICEKPNLNAINITAADADVDPNIGPYVFELPFVPAAVRKNWTITRLNGDYAQLSLRILYLEAGMYDVPIIVTDSGNPPLSNTSIIKVKVCPCDDNGDCTTIGAVAAAGLGTGAIVAILICILILLTMVLLFVMWMKRREKERHTKQLLIDPEDDVRDNILKYDEEGGGEEDQDYDLSQLQQPEAMGHVPSKAPGVRRVDERPVGAEPQYPIRPMVPHPGDIGDFINEGLRAADNDPTAPPYDSLLVFDYEGSGSTAGSVSSLNSSSSGDQDYDYLNDWGPRFKKLADMYGGGEED

SEQ ID NO: 121068 - DNA, 2751 bp, Artificial Sequence
  derived and/or modified sequence
atgacagcgggagctggcgtgctgctgctactgctgtcactaagcggggcccttcgagcacataacgaggatctgacaacaagagaaacttgcaaagctggattcagcgaagatgactacactgctcttatatcacagaacatactggagggggagaagctattgcaggtgaagttcagtagctgcgttggtaccaaggggacgcagtacgaaaccaatagcatggactttaaggtcggtgccgacgggactgtttttgccactcgagagctccaggtgccttccgagcaggtcgcctttacagttaccgcttgggactctcaaactgccgagaaatgggacgcagtagttagattactagtggcacaaacttcttcccctcattcaggccacaaaccacagaaaggtaagaaggtggtggctctcgatccctccccccctcccaaagatactcttctgccctggccccagcaccagaacgccaacgggcttcgccggcggaaaagagactgggtaataccgccgattaatgtgcctgaaaacagtcgtggacccttcccacagcaactggttcgcattagatctgataaagacaatgatatcccgattcgttattccatcacaggagtgggggcggaccagccgcctatggaagtattcagtatcgacagcatgagcggccgtatgtacgtaacacgtcctatggacagggaagaacatgcaagttaccaccttagggcacatgccgtggacatgaacgggaataaagtagagaatccaatcgatctgtatatatacgtgatcgacatgaatgacaaccgtccagaattcataaaccaggtttacaatggctccgtcgacgagggcagtaaaccagggacatacgtgatgaccgtcacagccaacgatgcggatgatagcacaacggcgaatggaatggtacgatacagaattgtgacccagacaccacagtcaccctctcaaaacatgttcacaatcaactcagagacaggcgacattgtgacagtggcagccgggctggacagagagaaggttcagcagtatacagtgatagtgcaggctaccgatatggagggtaacctgaattacggcctctccaatacagcaactgccatcatcaccgtcaccgacgtgaatgacaacccccccgagtttaccgcaagtacttttgctggggaggtacccgagaacagagtggagactgtggtggccaacctgaccgttatggacagggaccaaccccatagccccaactggaacgctgtgtataggattataagcggggatcccagcggacacttctcggttaggactgaccccgtcaccaatgagggtatggtcacagtggtcaaggccgtggactacgaactcaatcgagcgtttatgctcacagtaatggtcagcaatcaggctccactggcctctggaatccagatgagctttcagtccactgccggagtgactatatctatcatggacataaacgaagccccgtactttcctagcaatcacaaactgattcggctggaggaaggtgtaccccctggaacagtgctgactacatttagcgctgtggatcctgaccgtttcatgcaacaggcagttagatattccaagctgtccgatcccgccagctggctgcacataaacgcaaccaacgggcagatcacaacggctgctgtcctggaccgggaatcactttatactaagaataacgtatacgaagcgacatttttagccgcagataacggcatcccacccgctagtggaaccggcactctccaaatctatcttatagatatcaacgacaacgctccagaattactgccaaaggaggctcagatctgcgaaaaaccgaacctgaacgcaatcaacatcaccgctgccgatgcagatgtagaccccaacataggaccttacgtgtttgagctcccttttgtacctgccgccgtcagaaagaattggactattacacggctgaacggggactatgcccagcttagccttagaattctctatttggaagcagggatgtacgacgtgcccattattgttaccgactccggcaatccacctctgagcaatacaagcattatcaaggtgaaggtgtgcccttgcgacgacaacggtgactgtaccacaatcggcgctgtggctgcagcagggttaggaacgggtgccatcgtcgctatcctgatttgcatactgatcctgctgacaatggttcttctgttcgtaatgtggatgaagaggagagagaaggagaggcacacaaagcagctgctaatcgacccagaggatgacgtgcgggataacattcttaagtacgacgaggaaggaggcggggaggaagaccaggattacgacctgtctcagctgcagcagccggaggccatgggccacgtcccaagcaaggcaccaggcgtacgacgcgtggacgaacgtcccgtcggcgccgaaccacagtatcccatccggcctatggtgcctcaccctggcgacattggggacttcatcaacgagggtctccgggctgccgacaatgaccccacagcacctccttatgactcactgctggtctttgactatgagggctccggttcgaccgcggggagcgtatcctcactgaacagttcaagcagcggtgaccaagactatgattacctgaatgactggggcccccgctttaaaaagctggcggacatgtatggcgggggcgaagaagactag

SEQ ID NO: 121069 - DNA, 2475 bp, Artificial Sequence
  derived and/or modified sequence
atgcccaaatctacgggcatgctgcacggagggagagaaaacgccggggtgaaattcagcagctgcgtgggcaccaaagggacacagtacgagaccagctctccacactccggccacaaaccccagaagggtaaaaaagtagtggcactggacccatccccacccccaaaagatacactgctgccatggccacagcatcaaaacgcaaacggtctaagacgacggaaacgtgactgggtgatccctcctattaatgtccccgaaaattctcgaggtccattccctcagcagttggtacggattcgtagtgataaggataatgacatccctattaggtactcaatcacgggcgtgggcgctgaccagcctcctatggaagtgttctctatcgatagtatgtcagggagaatgtacgttacccgccccatggatagggaggaacacgcaagctatcacttgagagcccacgcggtcgacatgaatggaaataaggtggaaaatccaatagacctgtacatctatgtgatcgatatgaatgataatcgccctgagttcataaaccaagtctataacggatccgtggatgagggtagcaagcctggcacttatgtcatgaccgtgactgccaacgacgctgacgattctacaacagcaaatggcatggtgagataccggatcgtgacccagacccctcagtcacccagccagaacatgttcactatcaactctgaaaccggggacattgttaccgtcgcagccggcttggatagagaaaaagtccagcagtacactgtgattgtgcaagcaaccgatatggagggtaacctgaattacgggctatcaaatacagccaccgcgataatcacggtgactgatgttaacgacaatccacccgaatttaccgccagtactttcgctggagaggtccctgaaaatagagttgaaactgtggtggctaatctgacggtcatggacagagaccagccacattctcctaactggaacgccgtgtaccgcattatatcaggtgacccgtccggtcacttcagtgtgaggaccgacccagttactaatgagggtatggtgaccgttgtgaaagccgtcgactacgagctaaatcgggccttcatgctgaccgtgatggtgtctaatcaggctcccctggcatcagggatccagatgagcttccagagcactgcaggagtcacaattagcattatggacatcaacgaggccccctacttcccgtccaaccacaaactcattcggcttgaagagggcgtaccacctggtacagtgttgacaaccttttcagccgtagaccctgatcgcttcatgcagcaggctgtgcgctacagtaagctgtcggatccggcctcctggctgcatattaatgccaccaatggtcagatcacaaccgccgctgtgctggatagggaaagcctgtatactaagaataacgtatatgaggccaccttcctggctgcggataacgggatcccaccagcctccggaactgggacactgcagatctatctaattgatataaatgacaacgcgccggagctgcttcccaaagaagctcagatctgcgaaaagcccaacctgaatgctatcaatataacagccgccgatgccgacgttgaccctaacattggcccatacgtgttcgaacttcccttcgttcccgctgcagtccggaagaactggacaataaccagacttaacggagattacgcacagttatccttacggattttatatcttgaagccggtatgtatgacgtgcccattattgttacagattcaggtaatccccctctgagcaacactagcatcatcaaggtaaaggtctgcccctgtgatgataatggagactgcactactattggcgccgtcgccgcagcaggacttggcacaggcgctattgttgccatcctcatctgtatcttaattctgctcactatggtcctgttgtttgtgatgtggatgaagcggcgtgaaaaagagcggcacacgaaacaactgttaatcgaccctgaggatgatgttcgcgacaatattcttaagtacgacgaggagggcggtggggaagaagaccaagactatgacctatcacagctccaacagccagaggccatgggccacgttcccagtaaagctccgggggttcggcgggtggacgaaagaccggtgggcgctgaaccccagtacccaatcagacccatggtcccgcatcccggcgacatcggtgactttatcaacgaaggtctgcgggccgcagacaatgaccctaccgccccgccttacgactctcttctggtgtttgactatgaaggatcaggttctacagccggcagcgttagtagcctcaattcatccagctcgggcgaccaggattatgattacctaaacgactgggggccacggtttaagaaactcgccgacatgtacggaggaggggaggaagactag

SEQ ID NO: 121070 - DNA, 2751 bp, Artificial Sequence
  derived and/or modified sequence
atgacagctggagctggggtgctgctgctgctgctgagcctgagcggggccctgcgggcccacaatgaagacctgaccacccgggagacctgcaaggccggcttctctgaagatgactacacagccctgatcagccagaacatcctggagggggagaagctgctgcaggtgaagttcagcagctgtgtgggcaccaagggcacccagtatgagaccaacagcatggacttcaaggtgggcgcagatggcaccgtgtttgccacccgggagctgcaggtgcccagcgagcaggtggccttcaccgtgacagcctgggacagccagacagctgagaagtgggatgctgtggtgcggctgctggtggcccagaccagcagcccccacagcggccacaagccccagaagggcaagaaggtggtggccctggaccccagccccccacccaaggacaccctgctgccctggccccagcaccagaatgccaacggcctgcggcggaggaagagggactgggtgatcccccccatcaacgtgcctgagaacagccggggccccttcccccagcagctggtgcgcatccgcagtgacaaggacaatgacatccccatccgctacagcatcaccggggtgggcgctgaccagccccccatggaggtgttcagcattgacagcatgagcggccgcatgtatgtgacccggcccatggaccgggaggagcacgccagctaccacctgcgggcccatgctgtggacatgaatggaaacaaggtggagaaccccatcgacctgtacatctacgtgattgacatgaatgacaacagacctgagttcatcaaccaggtgtacaatggatctgtggatgagggcagcaagccaggcacctacgtgatgacagtgacagccaatgatgctgatgacagcaccacagccaacggcatggtgcgctaccgcatcgtgacccagaccccccagagccccagccagaacatgttcaccatcaacagcgagactggagacatcgtgacagtggccgccggcctggaccgggagaaggtgcagcagtacaccgtcatcgtgcaggccacagacatggagggcaacctgaactacggcctgagcaacacagccacagccatcatcaccgtgacagatgtgaatgacaaccccccagagttcaccgccagcacctttgctggggaggtgcctgaaaatagagtggagaccgtggtggccaacctgactgtgatggaccgggaccagccccacagccccaactggaatgctgtgtaccgcatcatcagcggggaccccagcggccacttctctgtgaggacagatcctgtgaccaatgaaggcatggtgacagtggtgaaggctgtggactatgagctgaacagagccttcatgctgactgtgatggtgagcaaccaggcccccctggccagcggcatccagatgtccttccagagcacagctggggtgaccatcagcatcatggacatcaatgaggccccctacttccccagcaaccacaagctgatccggctggaggagggcgtgcccccaggcaccgtgctgaccaccttctctgctgtggaccctgaccgcttcatgcagcaggccgtgcgctacagcaagctgagtgaccctgcctcctggctgcacatcaatgccaccaacggccagatcaccacagctgctgtgctggaccgggagagcctgtacaccaagaacaacgtgtatgaggccaccttcctggccgctgacaatggcatccccccagccagcggcaccggcaccctgcagatctacctgattgacatcaatgacaatgcccctgagctgctgcccaaggaggcccagatctgtgagaagcccaacctgaatgccatcaacatcacagctgctgatgctgatgtggaccccaacatcggcccctacgtgtttgagctgccctttgtgcctgctgctgtgaggaagaactggaccatcacccggctgaatggagactatgcccagctgagcctgcgcatcctgtacctggaggccggcatgtatgatgtgcccatcatcgtgacagattctggcaacccccccctgagcaacaccagcatcatcaaggtgaaggtgtgcccctgtgatgacaacggggactgcaccaccatcggggctgtggccgccgccggcctgggcaccggggccatcgtggccatcctgatctgcatcctgatcctgctgaccatggtgctgctgtttgtgatgtggatgaagaggcgggagaaggagcggcacaccaagcagctgctgattgatcctgaagatgatgtgcgggacaacatcctgaagtatgatgaggagggcggcggggaggaggaccaggactatgacctgagccagctgcagcagcctgaggccatgggccacgtgcccagcaaggcccctggggtgagaagagtggatgagaggcctgtgggcgctgagccccagtaccccatccggcccatggtgccccaccctggggacatcggggacttcatcaatgaaggcctgcgggctgctgacaatgaccccacagccccaccctatgacagcctgctggtgtttgattatgagggcagcggcagcacagctggctctgtgagcagcctgaacagcagcagcagcggggaccaggactatgactacctgaatgactggggcccccgcttcaagaagctggccgacatgtatggaggaggagaggaggactag

SEQ ID NO: 121071 - DNA, 2475 bp, Artificial Sequence
  derived and/or modified sequence
atgcccaagagcacaggcatgctgcatggaggaagagaaaatgccggcgtgaagttcagcagctgtgtgggcaccaagggcacccagtatgagaccagcagcccccacagcggccacaagccccagaagggcaagaaggtggtggccctggaccccagccccccacccaaggacaccctgctgccctggccccagcaccagaatgccaacggcctgcggcggaggaagagggactgggtgatcccccccatcaacgtgcctgagaacagccggggccccttcccccagcagctggtgcgcatccgcagtgacaaggacaatgacatccccatccgctacagcatcaccggggtgggcgctgaccagccccccatggaggtgttcagcattgacagcatgagcggccgcatgtatgtgacccggcccatggaccgggaggagcacgccagctaccacctgcgggcccatgctgtggacatgaatggaaacaaggtggagaaccccatcgacctgtacatctacgtgattgacatgaatgacaacagacctgagttcatcaaccaggtgtacaatggatctgtggatgagggcagcaagccaggcacctacgtgatgacagtgacagccaatgatgctgatgacagcaccacagccaacggcatggtgcgctaccgcatcgtgacccagaccccccagagccccagccagaacatgttcaccatcaacagcgagactggagacatcgtgacagtggccgccggcctggaccgggagaaggtgcagcagtacaccgtcatcgtgcaggccacagacatggagggcaacctgaactacggcctgagcaacacagccacagccatcatcaccgtgacagatgtgaatgacaaccccccagagttcaccgccagcacctttgctggggaggtgcctgaaaatagagtggagaccgtggtggccaacctgactgtgatggaccgggaccagccccacagccccaactggaatgctgtgtaccgcatcatcagcggggaccccagcggccacttctctgtgaggacagatcctgtgaccaatgaaggcatggtgacagtggtgaaggctgtggactatgagctgaacagagccttcatgctgactgtgatggtgagcaaccaggcccccctggccagcggcatccagatgtccttccagagcacagctggggtgaccatcagcatcatggacatcaatgaggccccctacttccccagcaaccacaagctgatccggctggaggagggcgtgcccccaggcaccgtgctgaccaccttctctgctgtggaccctgaccgcttcatgcagcaggccgtgcgctacagcaagctgagtgaccctgcctcctggctgcacatcaatgccaccaacggccagatcaccacagctgctgtgctggaccgggagagcctgtacaccaagaacaacgtgtatgaggccaccttcctggccgctgacaatggcatccccccagccagcggcaccggcaccctgcagatctacctgattgacatcaatgacaatgcccctgagctgctgcccaaggaggcccagatctgtgagaagcccaacctgaatgccatcaacatcacagctgctgatgctgatgtggaccccaacatcggcccctacgtgtttgagctgccctttgtgcctgctgctgtgaggaagaactggaccatcacccggctgaatggagactatgcccagctgagcctgcgcatcctgtacctggaggccggcatgtatgatgtgcccatcatcgtgacagattctggcaacccccccctgagcaacaccagcatcatcaaggtgaaggtgtgcccctgtgatgacaacggggactgcaccaccatcggggctgtggccgccgccggcctgggcaccggggccatcgtggccatcctgatctgcatcctgatcctgctgaccatggtgctgctgtttgtgatgtggatgaagaggcgggagaaggagcggcacaccaagcagctgctgattgatcctgaagatgatgtgcgggacaacatcctgaagtatgatgaggagggcggcggggaggaggaccaggactatgacctgagccagctgcagcagcctgaggccatgggccacgtgcccagcaaggcccctggggtgagaagagtggatgagaggcctgtgggcgctgagccccagtaccccatccggcccatggtgccccaccctggggacatcggggacttcatcaatgaaggcctgcgggctgctgacaatgaccccacagccccaccctatgacagcctgctggtgtttgattatgagggcagcggcagcacagctggctctgtgagcagcctgaacagcagcagcagcggggaccaggactatgactacctgaatgactggggcccccgcttcaagaagctggccgacatgtatggaggaggagaggaggactag

SEQ ID NO: 121072 - DNA, 2751 bp, Artificial Sequence
  derived and/or modified sequence
atgaccgccggcgccggcgtgctgctgctgctgctgagcctgagcggtgccctgcgtgcgcataatgaggacctgacgacccgagagacctgcaaggcggggttctccgaagatgactacactgctctgatctcccaaaacattctggaaggagaaaagctgcttcaggtgaaattttcgagttgcgttggaactaaggggacccaatacgaaaccaactctatggactttaaagtaggtgccgatgggacagtgttcgcaactagagagttgcaggtcccatccgagcaggttgcatttactgtaaccgcatgggattcacagacggccgaaaagtgggatgccgtggtgagactgcttgttgctcaaacaagctcgccacacagtggccacaagcctcagaagggcaaaaaggtggttgccctggatcccagtccacctcctaaggatacactgctgccctggcctcagcatcagaacgctaacgggctgcgacggcgtaagcgtgactgggtgataccaccaataaatgtgcctgaaaactcccgcgggccttttcctcagcaactggtccggatccggagtgacaaagataatgacattccaatccgctactccatcacaggcgttggagccgatcagccacccatggaagtgttcagtatcgatagtatgagcggcagaatgtacgtaaccagaccaatggaccgagaggaacacgcatcctatcatctgcgagcacatgctgtggatatgaacggtaataaagttgaaaaccccatagatctgtacatctacgttatcgacatgaatgataaccggcccgaattcattaaccaagtttacaacggtagcgtggacgaggggagcaagcctggcacgtacgtcatgaccgtcactgctaacgacgcggacgattctacaactgcaaacggcatggtgcgctatcgtattgttacccagaccccacagtctccaagccagaatatgtttacaatcaacagcgagacaggcgacatcgtgaccgtagcagccggtttagatcgggaaaaggtgcagcagtacactgtcatcgtccaggccacagatatggagggaaacctgaattatggccttagcaatacagctacggccataattacagtcacagacgtgaatgataacccacctgagtttacagcttcaacctttgccggcgaagtgccagagaaccgggttgagacagtagtggcgaacttaactgtgatggacagagatcagcctcacagccccaactggaatgcagtctaccgtattatctccggagatccctccgggcacttcagcgtgagaactgaccctgtgacgaacgaaggtatggtaactgtggtaaaggccgtggactacgagctcaacagagcgttcatgctgacagtcatggtttctaatcaggcccctctggcctcggggatccagatgagctttcagtcaaccgccggagtaactatctctatcatggatatcaatgaggccccttactttccctcaaatcataaactcataaggctggaagagggcgtccctcccggaacagtccttacgacatttagcgctgtggacccagaccgctttatgcaacaggcagtaagatatagtaaattgtccgacccagcatcttggctccatatcaacgctactaacggtcagatcaccacggctgctgtcctggacagagaatctctttacactaaaaataacgtctatgaagccaccttcctggctgccgataacggcattcctcccgcctctggaacagggacactacagatctatctcatcgatatcaatgataacgcgccagagctcttgcctaaggaggcacagatttgcgagaagcctaacttaaatgctatcaacattacagcagccgatgcagacgttgacccaaatattggaccctacgtatttgagctgcccttcgtaccagcggctgttcgaaagaactggaccattactaggctcaacggagactacgcccagctgagtttgagaatattatatcttgaagccgggatgtatgatgtacccataattgtgacagacagcgggaatccgccattgtctaataccagcattatcaaggtgaaggtgtgtccttgtgatgacaacggtgattgcaccactatcggggcggtggcagccgcggggctcggaacaggggctatcgtagctattctgatatgcattctgattttactcacaatggtcttactgttcgtgatgtggatgaagcgccgtgagaaggagcggcacacaaaacagctgctcatcgatccggaggacgacgtgcgcgacaatatcctgaagtacgatgaggaaggaggcggagaagaggatcaggactatgacctgtcccaactgcaacaacccgaagccatgggccatgtcccatctaaggctcccggcgtgaggcgggtggacgagcggccagttggagctgagcctcaatatcccatacggcccatggtaccacacccaggcgacatcggagattttattaatgagggccttcgggcagccgataatgatccaacagcacccccgtacgattccctgcttgtgtttgactatgaagggagcggttccactgctgggagcgtgagttcattaaatagttcctcttccggcgaccaggattatgactatctgaacgactgggggccccgattcaagaaactggcagacatgtatggaggaggcgaggaggattag

SEQ ID NO: 121073 - DNA, 2475 bp, Artificial Sequence
  derived and/or modified sequence
atgcccaagagcaccggcatgctgcacggcggccgggagaacgccggcgtcaagttctcatcctgcgtgggtaccaaaggcacccaatatgaaacatcctctcctcactccgggcataaaccccaaaagggcaaaaaggttgtcgctcttgatcccagtcctccgcccaaggacacgttgctcccctggccacagcaccagaatgccaatggccttcggcgccggaagagggactgggtgattccccctataaatgtacccgagaattcaaggggccccttcccacagcagctggttcgtattcgctcagacaaggataacgatatccctattcgctacagcattactggggtcggcgctgatcagccgcctatggaagttttttccatcgattcaatgagcggtcggatgtatgtaacacggcccatggatcgggaggaacacgcctcctatcacctgcgagcccacgccgtggatatgaatggcaacaaggtcgagaatcctattgatttgtacatctacgtgatcgacatgaacgacaacagaccggagtttattaaccaggtatataatgggagcgtcgatgagggatccaaaccaggcacttatgttatgaccgtgacagcaaatgacgctgacgacagcaccacagctaacgggatggttcggtacagaatagtgacccagacgccacagtcgccaagccaaaacatgttcactattaattccgaaacaggagacatagtgacagttgctgcaggcctggacagggaaaaagttcaacagtacacagtgattgtgcaggccactgatatggagggaaatttaaactacggtctgtccaatacagctaccgcaatcatcactgtgactgacgtaaatgacaatcctcctgaatttactgctagtacattcgcgggagaggtgcccgagaaccgcgtcgagaccgtcgtggccaatctaactgttatggacagagatcaaccgcactctccaaactggaacgcagtgtaccgtatcatcagtggtgacccaagtggtcacttttccgtgcgtaccgacccggtgacaaatgagggcatggtgactgttgtgaaagcagtagattacgaactgaatcgcgccttcatgctgaccgtcatggtgtctaatcaggcacctcttgctagcggaatccagatgtctttccagagcactgccggagttactatttcaattatggatatcaatgaggcaccttatttcccctccaatcataagctgattcggcttgaagagggagtgcccccgggcacagtactaaccacattttcagccgtcgatccagatcggtttatgcagcaggctgtgcgctactccaagctctctgacccggcatcctggctgcacataaatgcaacgaacgggcaaatcaccaccgccgctgtcctggatagggaatcattatataccaagaataacgtctatgaagctacgttcttggccgccgataatggtattccccccgctagtggcacaggcaccctacaaatctacctgatcgacatcaatgacaatgcccctgagttgctgccgaaagaagcccagatatgcgaaaaaccaaatctcaacgcaataaatatcactgccgctgacgctgatgtagaccccaatattggcccctatgtgttcgaactgccctttgttcccgcagccgtgcggaaaaactggactattacgcgcttgaacggcgactatgcccaactgtccctcagaatcttgtatcttgaggcgggaatgtatgatgtgccaatcatagtgaccgactccggtaatccacctctgagtaatacttccatcatcaaagtgaaggtgtgcccgtgtgatgataatggagactgtactaccataggcgcagtggccgccgcagggctcgggactggtgccatcgtggccattttgatctgcattttgatcttactgacaatggtgctgctgttcgtaatgtggatgaagaggcgggagaaagagcggcacactaaacagctcctgatcgacccggaggacgacgtgcgggacaacattcttaaatatgatgaggaaggcggaggggaggaggatcaggactacgacctgagccagcttcaacagcccgaggcgatgggccacgtgccaagcaaggcccctggggtgcgcagagtagacgaaagaccagtgggcgctgagccgcaataccctatcagaccaatggttcctcaccctggcgatatcggagacttcattaatgagggcttgcgagcagccgataatgaccctacagctccaccttatgatagccttctggtgttcgactatgaggggtctggcagcactgccggaagcgttagttctctgaacagcagcagctcaggcgatcaggattacgattatctgaatgattggggacctaggttcaaaaaactagctgatatgtacggtggtggggaggaagactag

SEQ ID NO: 121074 - DNA, 2751 bp, Artificial Sequence
  derived and/or modified sequence
atgaccgcgggagccggagtgttgttactcttgctgtctttgtctggggctctcagagcccataacgaagatctgactacacgcgaaacttgcaaggccggattctccgaagacgattatactgccctgatctcccagaatatcctcgagggtgagaaactgctccaagtgaagttctcaagctgcgtcggcaccaagggtactcaatacgagacaaactccatggacttcaaggtcggcgctgatggcacagttttcgcaactcgagagctgcaggtcccctcagaacaggtcgcttttaccgtgacggcttgggattcccagaccgccgaaaagtgggacgctgtggtccgcctcctcgttgcacaaacttccagtccgcacagcggccacaagcctcaaaagggaaagaaggtcgtggcactggaccctagcccacccccaaaagacaccctgctgccgtggccacaacatcagaatgcaaacgggctccgccgaaggaagagagattgggtgatcccacctatcaatgttcctgaaaacagcagaggcccatttccacagcaactcgtgcgcattagatccgacaaggacaacgacattcccatacgatattctattacaggcgttggggcagatcagcctccgatggaagtgttctctatagactctatgagcggaaggatgtacgtgactagacctatggatagggaggaacatgcaagctaccacctgcgggcacatgccgtcgatatgaacggcaacaaggtggaaaatcccatagacctgtacatatatgtgatcgacatgaacgataatcgaccagagttcatcaaccaagtgtacaatgggagtgtggatgaaggaagcaagccaggtacttatgtaatgactgtcactgcaaacgacgccgatgattccaccactgcaaatggcatggtccgctaccgcatcgtgacccagacccctcagtcaccttcacagaacatgtttacaatcaacagcgagactggagatatcgttacggttgccgctgggttagatcgggaaaaggtgcagcagtacacagtgatcgttcaggctaccgacatggaggggaatctcaactacggcctctcaaacaccgcaactgcaattatcacagtgaccgatgtcaacgacaaccctccagagttcaccgctagtacatttgctggggaggttccagaaaaccgggttgaaactgtcgtggcaaacctcaccgtcatggatagagaccagccacacagtcccaactggaacgccgtttacaggatcatcagcggggatccaagcgggcacttttcagtgaggaccgaccctgtgacaaacgagggcatggtaacagtcgtgaaagccgttgattacgaattgaatcgggcttttatgctgacagtcatggtgagcaatcaggcccctttggcctccggcatccagatgagcttccagagtactgctggtgtcaccatatcaattatggacatcaatgaagctccatactttccttccaaccacaagctgatcagactagaggagggagtgccaccaggcactgtactcaccactttctccgctgtcgaccccgatagattcatgcagcaagctgtccgatactcaaaattaagcgacccagcctcttggctccatattaatgccactaacggacagataacaacagcagctgtcctcgaccgggagagtctctacacgaaaaataacgtatacgaggccacgtttcttgctgccgataatggaattccacctgcatcagggacagggacactgcagatatacttgattgacattaacgataacgcacccgagttgttgccaaaagaggcccaaatttgcgagaaacccaacctgaacgccattaatattacggctgcggacgccgatgtggatcccaacataggcccttacgtgttcgaattgccttttgtccctgccgctgtccggaagaattggaccatcaccaggctgaatggcgattacgctcagctttcgctcagaatcctgtacttggaggcaggcatgtatgacgttcccatcattgtcacggactctgggaaccccccactgtcaaatacgtctatcatcaaggtgaaagtttgcccttgtgatgacaatggtgactgcactacaattggggcagtggccgctgctggactgggcacaggagcgatcgttgcgatcctgatatgtatcctgatcctgctgacaatggtgctcttgttcgtcatgtggatgaaacggagggaaaaagagagacacaccaaacaactcctgatcgacccagaagacgacgtgcgagacaacatcctgaaatacgatgaggagggcggaggggaggaggaccaggactacgacttgagtcagctccagcagccggaagctatgggccacgtgccaagcaaggctccaggcgtgagacgggtggatgagaggcctgtcggggcagagcctcagtatcctatacgacctatggtgcctcaccctggcgacattggcgacttcattaacgagggacttagggctgctgataacgatcccacagcgccaccttatgattcccttctcgtgtttgattatgaaggaagcggttccacagccggatcagtttcctctctgaatagctcctcctccggggaccaggattatgactaccttaatgactggggtcccagattcaagaaactggccgacatgtatgggggaggtgaggaggactag

SEQ ID NO: 121075 - DNA, 2475 bp, Artificial Sequence
  derived and/or modified sequence
atgcccaagtctaccgggatgctacatggcggaagggagaacgctggagttaagttcagctcgtgtgtcggaaccaagggcacccagtacgaaacttcttccccacatagcgggcataaaccacaaaaaggaaaaaaggtagtggcgcttgaccctagccctccacccaaggacacgctccttccatggcctcagcaccagaatgcaaacggcctacgtagacggaaacgtgactgggtaatcccaccaattaacgttccagaaaactctaggggacccttccctcaacaactggtgcgcattaggtccgacaaggacaacgacattcccattaggtattcaataaccggtgtcggggcagatcaaccacccatggaggtcttttcaatcgactctatgagtgggaggatgtacgtgacaaggcccatggaccgggaggagcatgccagctaccatcttcgagcccacgctgtcgatatgaatggcaacaaagttgagaatcccatagatctctacatctatgtaattgacatgaacgacaaccgccctgagtttataaatcaggtatacaatgggagtgtggatgaagggtctaaacctggcacttacgtcatgaccgtcacagccaacgacgccgatgacagcacgacggccaatggaatggtgaggtacagaatcgtgactcagacacctcaaagcccaagccagaacatgttcaccattaactccgaaaccggggacatcgtgaccgtcgccgcaggcttagatcgggaaaaggtgcagcagtacactgtcattgtgcaagcaaccgacatggaaggaaacctgaactacggcctgtctaatacagccactgcgattattacagtcacagatgtgaacgacaaccccccagagttcactgccagcacatttgccggagaggtgccggagaaccgcgtggaaaccgtcgtcgctaatctcactgtgatggatagggaccagcctcacagtcctaattggaacgccgtttataggatcatctcgggggatcccagtggccacttctccgtcagaacagaccctgtcacaaacgagggcatggtcaccgtggttaaagccgtagactatgaactcaacagggcctttatgctcactgtcatggtatcaaatcaagcccctcttgcctccggaatccagatgtcatttcagagtactgccggtgtaaccataagcatcatggacatcaatgaagccccatacttcccatcaaatcataagctcattcggctggaagaaggcgtgccacccggtaccgtgctcaccactttcagcgccgtagaccctgataggtttatgcagcaggctgttcggtactccaaacttagcgatccggcaagttggttgcatatcaacgcaacaaacggccagattaccactgcagccgtgctggacagagagagcttatacaccaagaacaacgtttacgaggccaccttcctggctgcggacaacggcattcctcctgcaagcggaaccgggacgctgcaaatttatctgattgatatcaacgataacgctcccgaactgctgcccaaggaggctcagatctgtgagaagcccaatctcaatgcaatcaacattactgccgctgacgcagacgtcgaccctaatattggcccttatgtgtttgagttaccatttgtccccgcagccgtgagaaagaactggacaattacacgcttgaatggtgactacgcccaacttagcttgcgtattctctatctggaagctggcatgtacgacgtgcctatcatcgtgaccgacagtggcaacccaccactatctaacacctcaattattaaggtgaaagtttgtccctgcgatgataacggcgattgtactacaattggggcagtggccgcagcgggacttgggactggagccattgtggctatcttgatctgtatactgattctgctgacaatggtcctactttttgtgatgtggatgaaacgaagagagaaagagcgtcataccaaacagttgctgatcgaccctgaggacgacgtgcgggataatatcctaaaatacgacgaggaggggggaggggaagaggatcaggattatgacctgagccagcttcaacagcctgaggctatggggcacgtgcccagtaaggctcctggggttcgtagagttgacgaacgccctgtaggagctgagccacagtacccaattcgacctatggtgccccatcctggcgacataggggacttcatcaatgagggcttgcgcgcagccgacaacgatcccactgcaccaccgtatgactccctgttagtctttgattatgaagggtcaggctccacagcaggttccgtctcatcattgaattcgtcaagcagcggtgatcaagactatgactatcttaacgattgggggccaaggtttaagaaactggcagatatgtatgggggaggtgaggaagactag

SEQ ID NO: 121076 - DNA, 3038 bp, Artificial Sequence
  derived and/or modified sequence
cggcggggaagatgaccgcgggcgccggcgtgctccttctgctgctctcgctctccggcgcgctccgggcccataatgaggatcttacaactagagagacctgcaaggctgggttctctgaagatgattacacggcattaatctcccaaaatattctagaaggggaaaagctacttcaagtcaagttcagcagctgtgtggggaccaaggggacacaatatgagaccaacagcatggacttcaaagttggggcagatgggacagtcttcgccacccgggagctgcaggtcccctccgagcaggtggcgttcacggtgactgcatgggacagccagacagcagagaaatgggacgccgtggtgcggttgctggtggcccagacctcgtccccgcactctggacacaagccgcagaaaggaaagaaggtcgtggctctggacccctctccgcctccgaaggacaccctgctgccgtggccccagcaccagaacgccaacgggctgaggcggcgcaaacgggactgggtcatcccgcccatcaacgtgcccgagaactcgcgcgggcccttcccgcagcagctcgtgaggatccggtccgacaaagacaatgacatccccatccggtacagcatcacgggagtgggcgccgaccagccccccatggaggtcttcagcattgactccatgtccggccggatgtacgtcacaaggcccatggaccgggaggagcacgcctcttaccacctccgagcccacgctgtggacatgaatggcaacaaggtggagaaccccatcgacctgtacatctacgtcatcgacatgaatgacaaccgccctgagttcatcaaccaggtctacaacggctccgtggacgagggctccaagccaggcacctacgtgatgaccgtcacggccaacgatgctgacgacagcaccacggccaacgggatggtgcggtaccggatcgtgacccagaccccacagagcccgtcccagaatatgttcaccatcaacagcgagactggagatatcgtcacagtggcggctggcctggaccgagagaaagttcagcagtacacagtcatcgttcaggccacagatatggaaggaaatctcaactatggcctctcaaacacagccacagccatcatcacggtgacagatgtgaatgacaacccgccagaatttaccgccagcacgtttgcaggggaggtccccgaaaaccgcgtggagaccgtggtcgcaaacctcacggtgatggaccgagatcagccccactctccaaactggaatgccgtttaccgcatcatcagtggggatccatccgggcacttcagcgtccgcacagaccccgtaaccaacgagggcatggtcaccgtggtgaaggcagtcgactacgagctcaacagagctttcatgctgacagtgatggtgtccaaccaggcgcccctggccagcggaatccagatgtccttccagtccacggcaggggtgaccatctccatcatggacatcaacgaggctccctacttcccctcaaaccacaagctgatccgcctggaggagggcgtgccccccggcaccgtgctgaccacgttttcagctgtggaccctgaccggttcatgcagcaggctgtgagatactcaaagctgtcagacccagcgagctggctgcacatcaatgccaccaacggccagatcaccacggcggcagtgctggaccgtgagtccctctacaccaaaaacaacgtctacgaggccaccttcctggcagctgacaatgggatacccccggccagcggcaccgggaccctccagatctatctcattgacatcaacgacaacgcccctgagctgctgcccaaggaggcgcagatctgcgagaagcccaacctgaacgccatcaacatcacggcggccgacgctgacgtcgaccccaacatcggcccctacgtcttcgagctgccctttgtcccggcggccgtgcggaagaactggaccatcacccgcctgaacggtgactatgcccaactcagcttgcgcatcctgtacctggaggccgggatgtatgacgtccccatcatcgtcacagactctggaaaccctcccctgtccaacacgtccatcatcaaagtcaaggtgtgcccatgtgatgacaacggggactgcaccaccattggcgcagtggcagcggctggtctgggcaccggtgccatcgtggccatcctcatctgcatcctcatcctgctgaccatggtcctgctgtttgtcatgtggatgaagcggcgagagaaggagcgccacacgaagcagctgctcattgaccccgaggacgacgtccgcgacaacatcctcaagtatgacgaggaaggcggtggcgaggaggaccaggactacgacctcagccagctgcagcagccggaagccatggggcacgtgccaagcaaagcccctggcgtgcgtcgcgtggatgagcggccggtgggcgctgagccccagtacccgatcaggcccatggtgccgcacccaggcgacatcggtgacttcatcaatgagggactccgcgctgctgacaacgaccccacggcacccccctatgactccctgctggtcttcgactacgaggggagcggctccaccgcaggctccgtcagctccctgaactcatccagttccggggaccaagactacgattacctcaacgactgggggcccagattcaagaagctggcggacatgtatggaggtggtgaagaggattgactgacctcgcatcttcggaccgaagtgagagccgtgctcggacgccggaggagcaggactgagcagaggcggccggtcttcccgactccctgcggctgtgtccttagtgctgttaggaggccccccaatccccacgttgagctgtctagcatgagcacccacccccacagcgccctgcacccggccgctgcccagcaccgcgctggctggcactgaaggacagcaagaggcactctgtcttcacttgaatttcctagaacagaagcactgttttta

SEQ ID NO: 121077 - DNA, 3310 bp, Artificial Sequence
  derived and/or modified sequence
atcttgggcctgtcacttggggagcactgtagaaggttctggagaaggcattgagactataattctactttaatgagctgggctacctagattctatggtacagcaagagaagctgtttgtatgcacctgtatgtacgtgccttacttaaaattcagaaagaaaatcttcaggtgccagaattacttgtgaggctggtgaagagtgaaaagccacttcccaggccagacaggaaagagtgccctggttgggaccagacgggcctggctgcagacgtacactttgggcttcagcagccctggtgctgccttgagcttgacccgaattgcttcttcccagaggctgggtctccctcgcagcccctgctctcaaggatgggaatgagaaggtcgatgacaaggcacctctgctttacatccaagcgttgacttttgtggcttcctttaccccattgctctgccctttaaagggtcctggtgtgtttgggaatgggacagacaattttgtttttcacaatggtattgggctgtggatccagaactcaagttccagaggaaagcgatgccaaagtcaacagggatgcttcacggaggcagggaaaatgcaggagtcaagttcagcagctgtgtggggaccaaggggacacaatatgagacctcgtccccgcactctggacacaagccgcagaaaggaaagaaggtcgtggctctggacccctctccgcctccgaaggacaccctgctgccgtggccccagcaccagaacgccaacgggctgaggcggcgcaaacgggactgggtcatcccgcccatcaacgtgcccgagaactcgcgcgggcccttcccgcagcagctcgtgaggatccggtccgacaaagacaatgacatccccatccggtacagcatcacgggagtgggcgccgaccagccccccatggaggtcttcagcattgactccatgtccggccggatgtacgtcacaaggcccatggaccgggaggagcacgcctcttaccacctccgagcccacgctgtggacatgaatggcaacaaggtggagaaccccatcgacctgtacatctacgtcatcgacatgaatgacaaccgccctgagttcatcaaccaggtctacaacggctccgtggacgagggctccaagccaggcacctacgtgatgaccgtcacggccaacgatgctgacgacagcaccacggccaacgggatggtgcggtaccggatcgtgacccagaccccacagagcccgtcccagaatatgttcaccatcaacagcgagactggagatatcgtcacagtggcggctggcctggaccgagagaaagttcagcagtacacagtcatcgttcaggccacagatatggaaggaaatctcaactatggcctctcaaacacagccacagccatcatcacggtgacagatgtgaatgacaacccgccagaatttaccgccagcacgtttgcaggggaggtccccgaaaaccgcgtggagaccgtggtcgcaaacctcacggtgatggaccgagatcagccccactctccaaactggaatgccgtttaccgcatcatcagtggggatccatccgggcacttcagcgtccgcacagaccccgtaaccaacgagggcatggtcaccgtggtgaaggcagtcgactacgagctcaacagagctttcatgctgacagtgatggtgtccaaccaggcgcccctggccagcggaatccagatgtccttccagtccacggcaggggtgaccatctccatcatggacatcaacgaggctccctacttcccctcaaaccacaagctgatccgcctggaggagggcgtgccccccggcaccgtgctgaccacgttttcagctgtggaccctgaccggttcatgcagcaggctgtgagatactcaaagctgtcagacccagcgagctggctgcacatcaatgccaccaacggccagatcaccacggcggcagtgctggaccgtgagtccctctacaccaaaaacaacgtctacgaggccaccttcctggcagctgacaatgggatacccccggccagcggcaccgggaccctccagatctatctcattgacatcaacgacaacgcccctgagctgctgcccaaggaggcgcagatctgcgagaagcccaacctgaacgccatcaacatcacggcggccgacgctgacgtcgaccccaacatcggcccctacgtcttcgagctgccctttgtcccggcggccgtgcggaagaactggaccatcacccgcctgaacggtgactatgcccaactcagcttgcgcatcctgtacctggaggccgggatgtatgacgtccccatcatcgtcacagactctggaaaccctcccctgtccaacacgtccatcatcaaagtcaaggtgtgcccatgtgatgacaacggggactgcaccaccattggcgcagtggcagcggctggtctgggcaccggtgccatcgtggccatcctcatctgcatcctcatcctgctgaccatggtcctgctgtttgtcatgtggatgaagcggcgagagaaggagcgccacacgaagcagctgctcattgaccccgaggacgacgtccgcgacaacatcctcaagtatgacgaggaaggcggtggcgaggaggaccaggactacgacctcagccagctgcagcagccggaagccatggggcacgtgccaagcaaagcccctggcgtgcgtcgcgtggatgagcggccggtgggcgctgagccccagtacccgatcaggcccatggtgccgcacccaggcgacatcggtgacttcatcaatgagggactccgcgctgctgacaacgaccccacggcacccccctatgactccctgctggtcttcgactacgaggggagcggctccaccgcaggctccgtcagctccctgaactcatccagttccggggaccaagactacgattacctcaacgactgggggcccagattcaagaagctggcggacatgtatggaggtggtgaagaggattgactgacctcgcatcttcggaccgaagtgagagccgtgctcggacgccggaggagcaggactgagcagaggcggccggtcttcccgactccctgcggctgtgtccttagtgctgttaggaggccccccaatccccacgttgagctgtctagcatgagcacccacccccacagcgccctgcacccggccgctgcccagcaccgcgctggctggcactgaaggacagcaagaggcactctgtcttcacttgaatttcctagaacagaagcactgttttt

SEQ ID NO: 121078 - DNA, 2751 bp, Artificial Sequence
  derived and/or modified sequence
atgaccgccggcgccggcgtgctgctgctgctgctgagcctgagcggcgccctgagagcccacaacgaggacctgaccaccagagagacctgcaaggccggcttcagcgaggacgactacaccgccctgatcagccagaacatcctggagggcgagaagctgctgcaggtgaagttcagcagctgcgtgggcaccaagggcacccagtacgagaccaacagcatggacttcaaggtgggcgccgacggcaccgtgttcgccaccagagagctgcaggtgcccagcgagcaggtggccttcaccgtgaccgcctgggacagccagaccgccgagaagtgggacgccgtggtgagactgctggtggcccagaccagcagcccccacagcggccacaagccccagaagggcaagaaggtggtggccctggaccccagccccccccccaaggacaccctgctgccctggccccagcaccagaacgccaacggcctgagaagaagaaagagagactgggtgatcccccccatcaacgtgcccgagaacagcagaggccccttcccccagcagctggtgagaatcagaagcgacaaggacaacgacatccccatcagatacagcatcaccggcgtgggcgccgaccagccccccatggaggtgttcagcatcgacagcatgagcggcagaatgtacgtgaccagacccatggacagagaggagcacgccagctaccacctgagagcccacgccgtggacatgaacggcaacaaggtggagaaccccatcgacctgtacatctacgtgatcgacatgaacgacaacagacccgagttcatcaaccaggtgtacaacggcagcgtggacgagggcagcaagcccggcacctacgtgatgaccgtgaccgccaacgacgccgacgacagcaccaccgccaacggcatggtgagatacagaatcgtgacccagaccccccagagccccagccagaacatgttcaccatcaacagcgagaccggcgacatcgtgaccgtggccgccggcctggacagagagaaggtgcagcagtacaccgtgatcgtgcaggccaccgacatggagggcaacctgaactacggcctgagcaacaccgccaccgccatcatcaccgtgaccgacgtgaacgacaacccccccgagttcaccgccagcaccttcgccggcgaggtgcccgagaacagagtggagaccgtggtggccaacctgaccgtgatggacagagaccagccccacagccccaactggaacgccgtgtacagaatcatcagcggcgaccccagcggccacttcagcgtgagaaccgaccccgtgaccaacgagggcatggtgaccgtggtgaaggccgtggactacgagctgaacagagccttcatgctgaccgtgatggtgagcaaccaggcccccctggccagcggcatccagatgagcttccagagcaccgccggcgtgaccatcagcatcatggacatcaacgaggccccctacttccccagcaaccacaagctgatcagactggaggagggcgtgccccccggcaccgtgctgaccaccttcagcgccgtggaccccgacagattcatgcagcaggccgtgagatacagcaagctgagcgaccccgccagctggctgcacatcaacgccaccaacggccagatcaccaccgccgccgtgctggacagagagagcctgtacaccaagaacaacgtgtacgaggccaccttcctggccgccgacaacggcatcccccccgccagcggcaccggcaccctgcagatctacctgatcgacatcaacgacaacgcccccgagctgctgcccaaggaggcccagatctgcgagaagcccaacctgaacgccatcaacatcaccgccgccgacgccgacgtggaccccaacatcggcccctacgtgttcgagctgcccttcgtgcccgccgccgtgagaaagaactggaccatcaccagactgaacggcgactacgcccagctgagcctgagaatcctgtacctggaggccggcatgtacgacgtgcccatcatcgtgaccgacagcggcaacccccccctgagcaacaccagcatcatcaaggtgaaggtgtgcccctgcgacgacaacggcgactgcaccaccatcggcgccgtggccgccgccggcctgggcaccggcgccatcgtggccatcctgatctgcatcctgatcctgctgaccatggtgctgctgttcgtgatgtggatgaagagaagagagaaggagagacacaccaagcagctgctgatcgaccccgaggacgacgtgagagacaacatcctgaagtacgacgaggagggcggcggcgaggaggaccaggactacgacctgagccagctgcagcagcccgaggccatgggccacgtgcccagcaaggcccccggcgtgagaagagtggacgagagacccgtgggcgccgagccccagtaccccatcagacccatggtgccccaccccggcgacatcggcgacttcatcaacgagggcctgagagccgccgacaacgaccccaccgcccccccctacgacagcctgctggtgttcgactacgagggcagcggcagcaccgccggcagcgtgagcagcctgaacagcagcagcagcggcgaccaggactacgactacctgaacgactggggccccagattcaagaagctggccgacatgtacggcggcggcgaggaggactag

SEQ ID NO: 121079 - DNA, 2475 bp, Artificial Sequence
  derived and/or modified sequence
atgcccaagagcaccggcatgctgcacggcggcagagagaacgccggcgtgaagttcagcagctgcgtgggcaccaagggcacccagtacgagaccagcagcccccacagcggccacaagccccagaagggcaagaaggtggtggccctggaccccagccccccccccaaggacaccctgctgccctggccccagcaccagaacgccaacggcctgagaagaagaaagagagactgggtgatcccccccatcaacgtgcccgagaacagcagaggccccttcccccagcagctggtgagaatcagaagcgacaaggacaacgacatccccatcagatacagcatcaccggcgtgggcgccgaccagccccccatggaggtgttcagcatcgacagcatgagcggcagaatgtacgtgaccagacccatggacagagaggagcacgccagctaccacctgagagcccacgccgtggacatgaacggcaacaaggtggagaaccccatcgacctgtacatctacgtgatcgacatgaacgacaacagacccgagttcatcaaccaggtgtacaacggcagcgtggacgagggcagcaagcccggcacctacgtgatgaccgtgaccgccaacgacgccgacgacagcaccaccgccaacggcatggtgagatacagaatcgtgacccagaccccccagagccccagccagaacatgttcaccatcaacagcgagaccggcgacatcgtgaccgtggccgccggcctggacagagagaaggtgcagcagtacaccgtgatcgtgcaggccaccgacatggagggcaacctgaactacggcctgagcaacaccgccaccgccatcatcaccgtgaccgacgtgaacgacaacccccccgagttcaccgccagcaccttcgccggcgaggtgcccgagaacagagtggagaccgtggtggccaacctgaccgtgatggacagagaccagccccacagccccaactggaacgccgtgtacagaatcatcagcggcgaccccagcggccacttcagcgtgagaaccgaccccgtgaccaacgagggcatggtgaccgtggtgaaggccgtggactacgagctgaacagagccttcatgctgaccgtgatggtgagcaaccaggcccccctggccagcggcatccagatgagcttccagagcaccgccggcgtgaccatcagcatcatggacatcaacgaggccccctacttccccagcaaccacaagctgatcagactggaggagggcgtgccccccggcaccgtgctgaccaccttcagcgccgtggaccccgacagattcatgcagcaggccgtgagatacagcaagctgagcgaccccgccagctggctgcacatcaacgccaccaacggccagatcaccaccgccgccgtgctggacagagagagcctgtacaccaagaacaacgtgtacgaggccaccttcctggccgccgacaacggcatcccccccgccagcggcaccggcaccctgcagatctacctgatcgacatcaacgacaacgcccccgagctgctgcccaaggaggcccagatctgcgagaagcccaacctgaacgccatcaacatcaccgccgccgacgccgacgtggaccccaacatcggcccctacgtgttcgagctgcccttcgtgcccgccgccgtgagaaagaactggaccatcaccagactgaacggcgactacgcccagctgagcctgagaatcctgtacctggaggccggcatgtacgacgtgcccatcatcgtgaccgacagcggcaacccccccctgagcaacaccagcatcatcaaggtgaaggtgtgcccctgcgacgacaacggcgactgcaccaccatcggcgccgtggccgccgccggcctgggcaccggcgccatcgtggccatcctgatctgcatcctgatcctgctgaccatggtgctgctgttcgtgatgtggatgaagagaagagagaaggagagacacaccaagcagctgctgatcgaccccgaggacgacgtgagagacaacatcctgaagtacgacgaggagggcggcggcgaggaggaccaggactacgacctgagccagctgcagcagcccgaggccatgggccacgtgcccagcaaggcccccggcgtgagaagagtggacgagagacccgtgggcgccgagccccagtaccccatcagacccatggtgccccaccccggcgacatcggcgacttcatcaacgagggcctgagagccgccgacaacgaccccaccgcccccccctacgacagcctgctggtgttcgactacgagggcagcggcagcaccgccggcagcgtgagcagcctgaacagcagcagcagcggcgaccaggactacgactacctgaacgactggggccccagattcaagaagctggccgacatgtacggcggcggcgaggaggactag

SEQ ID NO: 121080 - protein, 784 aa, Artificial Sequence
  derived and/or modified sequence
MQRLMMLLATSGACLGLLAVAAVAAAGANPAQRDTHSLLPTHRRQKRDWIWNQMHIDEEKNTSLPHHVGKIKSSVSRKNAKYLLKGEYVGKVFRVDAETGDVFAIERLDRENISEYHLTAVIVDKDTGENLETPSSFTIKVHDVNDNWPVFTHRLFNASVPESSAVGTSVISVTAVDADDPTVGDHASVMYQILKGKEYFAIDNSGRIITITKSLDREKQARYEIVVEARDAQGLRGDSGTATVLVTLQDINDNFPFFTQTKYTFVVPEDTRVGTSVGSLFVEDPDEPQNRMTKYSILRGDYQDAFTIETNPAHNEGIIKPMKPLDYEYIQQYSFIVEATDPTIDLRYMSPPAGNRAQVIINITDVDEPPIFQQPFYHFQLKENQKKPLIGTVLAMDPDAARHSIGYSIRRTSDKGQFFRVTKKGDIYNEKELDREVYPWYNLTVEAKELDSTGTPTGKESIVQVHIEVLDENDNAPEFAKPYQPKVCENAVHGQLVLQISAIDKDITPRNVKFKFILNTENNFTLTDNHDNTANITVKYGQFDREHTKVHFLPVVISDNGMPSRTGTSTLTVAVCKCNEQGEFTFCEDMAAQVGVSIQAVVAILLCILTITVITLLIFLRRRLRKQARAHGKSVPEIHEQLVTYDEEGGGEMDTTSYDVSVLNSVRRGGAKPPRPALDARPSLYAQVQKPPRHAPGAHGGPGEMAAMIEVKKDEADHDGDGPPYDTLHIYGYEGSESIAESLSSLGTDSSDSDVDYDFLNDWGPRFKMLAELYGSDPREELLY

SEQ ID NO: 121081 - protein, 669 aa, Artificial Sequence
  derived and/or modified sequence
MQRLMMLLATSGACLGLLAVAAVAAAGANPAQRDTHSLLPTHRRQKRDWIWNQMHIDEEKNTSLPHHVGKIKSSVSRKNAKYLLKGEYVGKVFRVDAETGDVFAIERLDRENISEYHLTAVIVDKDTGENLETPSSFTIKVHDVNDNWPVFTHRLFNASVPESSAVGTSVISVTAVDADDPTVGDHASVMYQILKGKEYFAIDNSGRIITITKSLDREKQARYEIVVEARDAQGLRGDSGTATVLVTLQDINDNFPFFTQTKYTFVVPEDTRVGTSVGSLFVEDPDEPQNRMTKYSILRGDYQDAFTIETNPAHNEGIIKPMKPLDYEYIQQYSFIVEATDPTIDLRYMSPPAGNRAQVIINITDVDEPPIFQQPFYHFQLVLQISAIDKDITPRNVKFKFILNTENNFTLTDNHDNTANITVKYGQFDREHTKVHFLPVVISDNGMPSRTGTSTLTVAVCKCNEQGEFTFCEDMAAQVGVSIQAVVAILLCILTITVITLLIFLRRRLRKQARAHGKSVPEIHEQLVTYDEEGGGEMDTTSYDVSVLNSVRRGGAKPPRPALDARPSLYAQVQKPPRHAPGAHGGPGEMAAMIEVKKDEADHDGDGPPYDTLHIYGYEGSESIAESLSSLGTDSSDSDVDYDFLNDWGPRFKMLAELYGSDPREELLY

SEQ ID NO: 121082 - DNA, 2355 bp, Artificial Sequence
  derived and/or modified sequence
atgcagcgtttaatgatgttactggccacttccggagcgtgcctgggtctgctggcggttgctgcggtcgcggcagctggcgctaatccagcccagcgggatacacatagccttcttccaacccaccgtcggcaaaagagagactggatttggaatcagatgcacatcgatgaggaaaaaaacacctccttaccccatcatgttggcaagatcaagtcaagcgtgagccggaaaaatgcaaagtacctgctgaagggtgagtatgtgggcaaagtattccgggtagacgccgagaccggtgacgtcttcgcaattgagaggctggaccgggagaatatttctgaataccacctgacggccgtgatcgtcgacaaggatactggggagaacctggagactcccagttcctttacaatcaaggtacacgatgtgaacgataactggccagtgttcactcatcggctctttaatgctagtgtgccagaatcttccgctgttggtactagcgtgatctcagtgaccgccgtagatgctgacgacccgacagttggcgatcatgcctctgttatgtaccagatcctgaagggcaaggagtactttgcaatagataattcgggccggataattactataacaaaaagccttgacagagagaagcaggcccgctacgagatcgttgttgaggctcgtgacgctcagggtcttcgcggtgactccggaaccgccacagtgctggtaacgttgcaagacatcaacgataattttcccttcttcactcaaactaaatacacctttgttgtgcccgaggatactcgggtagggacatccgtcggtagtctattcgtcgaggaccccgatgagccacagaatcggatgacaaagtacagtattttacggggcgattaccaggacgcgttcactatcgaaacgaaccccgcacataatgaaggcattattaagcccatgaagccactcgattacgagtacattcaacaatattccttcattgtggaggcaaccgaccctaccatagatctgcgatatatgagtccccccgcaggaaaccgtgctcaggtcatcatcaatatcactgacgtagatgaacccccaatttttcagcaacctttttatcatttccaattaaaggaaaatcagaagaaacccctcatagggacagtactggccatggaccccgatgccgcccgacactctatagggtactcaattagacgaacctcggataagggccagttttttcgggtgacaaagaaaggagacatctataatgagaaggagttggatcgtgaagtgtacccctggtataatttgaccgttgaggccaaggaactggatagtacagggacaccaactggtaaagagagcatcgtccaagtccatattgaggttttagatgaaaacgataacgcaccagagtttgcaaaaccctatcagccaaaagtgtgtgagaacgccgtacatggacagctagtgctgcaaatatccgccattgacaaggacatcactccccggaatgtgaagttcaagttcattctgaataccgagaataatttcaccctaactgataatcatgataacactgccaacataacggtaaaatacggccagttcgatagagaacacacaaaggtccacttcctcccggtcgtgatctctgacaatgggatgccatccagaaccggcacgtctactctgacagtggccgtgtgcaaatgcaacgaacagggcgaattcactttttgcgaggacatggcagcccaggtgggcgtaagtattcaggcagtcgtggcaatcctgctgtgtatcctgacgataactgtgattacgctgctgatcttcctcagacggcgccttaggaagcaagcccgtgcccatgggaagagcgtaccagaaatccatgagcagttggtaacatacgacgaggaaggagggggagagatggacaccacctcgtatgatgtctctgtcctgaacagcgtgcggagagggggcgcaaaacctccacggcccgccctagatgcccgtccaagcctttacgctcaggttcaaaagccaccaagacatgcgcccggcgcccacggaggccccggagaaatggcggccatgattgaggtgaaaaaggatgaagcagaccatgatggggatgggcccccctatgacacactacacatctacgggtatgaaggttccgagagcattgccgaaagcctgagtagcttaggcacggattcctctgatagcgatgtcgattatgattttttaaatgattgggggccacgttttaagatgcttgccgagctctacggctccgaccccagggaagagttgctgtattag

SEQ ID NO: 121083 - DNA, 2010 bp, Artificial Sequence
  derived and/or modified sequence
atgcagcgacttatgatgctgctcgctacatccggggcatgtcttggcttactggctgttgccgctgtcgccgcggcgggggctaatcccgcacagagagatacccacagtctccttccaactcacagaaggcagaaacgcgactggatctggaatcagatgcatattgacgaggaaaagaatacaagtctgccacaccatgtgggaaagatcaaaagctctgttagtcgcaaaaatgccaaataccttctcaaaggtgagtacgtagggaaggtttttagggttgatgcagagacaggggacgtctttgcaatcgaaaggctggatagagaaaacatctccgagtaccacctgacagccgtgattgtcgataaggatactggggaaaatttagagaccccaagttctttcactataaaggtgcatgacgttaatgataattggccagtgttcactcaccgtctgttcaacgcatctgtgcccgaatctagtgccgtagggacctcagtaatttcagtgacagccgtggacgctgacgacccaactgtgggcgaccatgccagtgtcatgtatcagatactgaagggaaaggaatactttgccattgacaactctggccggattataacgataactaagagcctggatagggagaagcaggcgagatacgaaatagtcgtggaagctcgcgacgcccaagggttaagaggggactctggaaccgccacggtgctcgtcacactacaggacatcaacgacaatttcccttttttcacccaaaccaaatatactttcgtggtgcccgaagacactcgtgttggcacatctgtcggctctctgttcgtagaagaccctgacgagccgcagaaccgaatgacaaagtactctatcctcagaggcgactatcaggacgcgtttacaatcgagaccaacccagcacacaatgaagggatcataaagcctatgaagcctttggactacgagtatattcaacaatactcctttatcgtggaagctactgacccaaccatagatttaaggtacatgtccccaccagcaggtaatagggcgcaggtgattataaatattacagatgtagacgagcctcctatcttccaacagcctttctatcatttccagctagtgctgcagataagtgctatcgacaaagatataacccctcggaacgtgaagtttaaatttattctcaacactgaaaataattttaccctgactgacaatcacgataataccgccaatattacagttaagtacgggcagttcgaccgggagcacaccaaggtccactttttgcctgtggtaatcagcgacaatggaatgccatcccgcactggcacgtctaccctcacagttgcagtgtgtaaatgcaacgagcaaggtgagtttaccttttgtgaagatatggcagcccaagtaggggtatcaattcaggccgtggtcgccattctcctctgtattctgacaatcactgtcataaccttgctcattttcctcaggagaagactgcgcaagcaggccagggcacatggtaaatcagtgcctgaaatacacgagcagcttgtgacttacgatgaggaaggaggaggcgagatggatactacttcatatgacgtctctgttcttaacagtgtgcggcgcgggggtgccaaaccccctcggccagccctggacgccaggccatctttatatgcacaagtgcaaaaaccacctcggcatgcccccggggcccacgggggacctggagagatggctgcaatgatcgaagtgaagaaagatgaggcggatcatgatggggatggacccccctacgacactctgcacatctatggatacgaaggcagcgaaagcatcgccgagtctctttccagcctaggcaccgatagttccgacagcgacgtggattatgactttctcaatgattggggcccacggtttaagatgttggccgagctttacggttctgatccgagggaagaactgctatattag

SEQ ID NO: 121084 - DNA, 672 bp, Artificial Sequence
  derived and/or modified sequence
atgccttcacgtactgggacctcgacactcacagtcgccgtgtgtaaatgcaatgagcagggggagttcaccttctgcgaagacatggcggcccaggtcggagtgtcaatccaggccgttgtagctatccttctttgcatcctcactatcacagtgatcactctcttgattttcctacggaggaggctgaggaaacaggccagggctcacggcaaaagtgtacctgagattcacgaacagctcgtcacctacgacgaggaggggggtggagaaatggatacaacctcctacgatgtttcagtgctaaattccgtcaggcggggaggagcgaagccacctcgccctgcccttgatgcccggccatcactgtacgcccaggtccagaaacccccccgccatgccccgggagcgcacggaggtccgggagaaatggcagcgatgatcgaggtcaaaaaagacgaagccgaccacgacggagatggcccgccctatgatacgcttcacatctatggttatgagggaagtgaaagcattgcagagagtctatccagtctcggcactgactcatcagacagcgacgttgattacgattttctcaatgactgggggccgaggttcaaaatgcttgccgaactttacggctccgaccccagggaagaacttctgtattag

SEQ ID NO: 121085 - DNA, 1578 bp, Artificial Sequence
  derived and/or modified sequence
atgcccagtacttgctctaaagaaaacatgtgggcccggagttccgggtcaatgcagaggcaagaaacttgctctccactgcgcgcccagaatcggatgactaagtacagcatcctaagaggtgactatcaagatgctttcacaatcgagacaaatccagcgcacaacgaagggatcatcaaaccaatgaaacccttagattatgagtatattcaacagtattccttcattgtagaggctactgacccgaccatcgacctccgttatatgtcccctccggccggaaacagggcacaggtaataataaacattacagacgtcgacgaacctccaatctttcaacagcccttctatcacttccagttgaaggagaatcagaagaagccactgattggcactgtcctcgccatggatcctgatgccgcccgacactccatcgggtattcaattagacgaacttccgacaaggggcaattctttagagtgacaaaaaaaggtgacatatacaatgagaaggagttggatagggaagtgtacccctggtacaacctgaccgtcgaggccaaagagttggacagcacaggtacacccactggcaaagaaagtattgttcaggtgcatatagaggtgctcgacgaaaacgacaatgcccccgagtttgccaagccctaccagcctaaggtgtgtgagaacgctgtgcatgggcagttggtgctgcagatttcagcaatagataaagacataaccccaagaaatgtcaagtttaagtttattctgaacactgagaacaacttcacattgaccgacaaccatgataacacggcaaatatcactgtgaagtacggacaatttgatcgtgagcatacaaaggtacatttcctgcccgttgttattagcgacaacggcatgccctcccggaccggcacaagtacactcacagtagctgtctgcaaatgtaatgagcaaggggagtttacattttgcgaagatatggcggcgcaggtaggagtatctatccaagccgttgtcgccattctgctgtgtatactcaccataacagtgattaccctgctgatttttcttagacgaaggctaaggaagcaggccagagcccatggcaagagcgtaccagagatccatgagcagctggtgacttacgatgaagagggagggggcgagatggatactaccagctatgatgtgtccgtgcttaacagtgttaggaggggaggggccaagccccctcggcccgcgctggatgctcgtccctcattatatgcgcaggtgcagaagccccctcgtcatgctccaggtgctcatggcgggccgggggaaatggcagccatgatagaggtgaagaaagacgaagctgaccatgacggtgacggccctccctatgataccttgcatatctatggttatgaaggaagcgagtccattgccgagtctctcagttctctgggaaccgacagcagcgatagcgatgtggattacgatttccttaacgattggggacccaggttcaagatgctcgctgaactgtacgggtcagatccgcgcgaggagctgctttactag

SEQ ID NO: 121086 - DNA, 2355 bp, Artificial Sequence
  derived and/or modified sequence
atgcagaggctgatgatgctgctggccaccagcggggcctgcctgggcctgctggccgtggccgctgtggccgccgccggggccaacccagcccagagggacacccacagcctgctgcccacccaccggcggcagaagagggactggatctggaaccagatgcacattgatgaggagaagaacaccagcctgccccaccacgtgggcaagatcaagagctctgtgtccaggaagaatgccaagtacctgctgaagggggagtatgtgggcaaggtgttccgggtggatgctgagactggagatgtgtttgccatcgagcggctggaccgggagaacatcagcgagtaccacctgacagctgtgattgtggacaaggacacaggagagaacctggagacccccagcagcttcaccatcaaggtgcatgatgtgaatgacaactggcctgtgttcacccacaggctcttcaatgcctctgtgcctgagagcagcgctgtgggcaccagcgtcatctctgtgacagctgtggatgctgatgaccccaccgtgggggaccacgcctctgtgatgtaccagatcctgaagggcaaggagtactttgccatcgacaacagcggccgcatcatcaccatcaccaagagcctggaccgggagaagcaggcccgctatgaaattgtggtggaggccagagatgcccagggcctgcggggggacagcggcacagccaccgtgctggtgaccctgcaggacatcaatgacaacttccccttcttcacccagaccaagtacacctttgtggtgcctgaggacaccagggtgggcacctctgtgggcagcctgtttgtggaggaccctgatgagccccagaacaggatgaccaagtacagcatcctgcggggggactaccaggatgccttcaccatcgagaccaacccagcccacaatgaaggcatcatcaagcccatgaagcccctggactatgagtacatccagcagtacagcttcatcgtggaggccacagaccccaccatcgacctgcgctacatgagccccccagctggcaacagagcccaggtgatcatcaacatcacagatgtggatgagccccccatcttccagcagcccttctaccacttccagctgaaggagaaccagaagaagcccctcatcggcaccgtgctggccatggaccctgatgctgcccggcacagcatcggctacagcatccggaggaccagtgacaagggccagttcttccgggtgaccaagaagggggacatctacaatgagaaggagctggaccgggaggtgtacccctggtacaacctgactgtggaggccaaggagctggacagcacaggcacccccaccgggaaggagagcatcgtgcaggtgcacatcgaggtgctggatgaaaatgacaatgcccctgagtttgccaagccctaccagcccaaggtgtgtgaaaatgctgtgcacggccagctggtgctgcagatcagcgccatcgacaaggacatcaccccaagaaatgtgaagttcaagttcatcctgaacacagagaacaacttcaccctgacagacaaccacgacaacacagccaacatcaccgtgaagtatggccagtttgaccgggagcacaccaaggtgcacttcctgcctgtggtgatcagtgacaatggcatgcccagcaggacaggcaccagcaccctgactgtggccgtgtgcaagtgcaatgagcagggcgagttcaccttctgtgaggacatggccgcccaggtgggcgtgtccatccaggccgtggtggccatcctgctgtgcatcctgaccatcaccgtcatcaccctgctgatcttcctgcggcggcggctgaggaagcaggcccgggcccacggcaagtctgtgcctgagatccacgagcagctggtgacctatgatgaggagggcggcggggagatggacaccaccagctatgatgtgtctgtgctgaacagcgtgagaagaggaggagccaagccacccaggcctgccctggatgcccggcccagcctgtatgcccaggtgcagaagcccccaagacatgcccctggggcccatggaggccctggagagatggccgccatgattgaggtgaagaaggatgaggccgaccatgatggagatggccccccctatgacaccctgcacatctacggctatgagggcagcgagagcattgctgagagcctgagcagcctgggcacagacagcagtgacagtgatgtggactatgacttcctgaatgactggggcccccgcttcaagatgctggccgagctgtatggcagtgacccccgggaggagctgctgtactag

SEQ ID NO: 121087 - DNA, 2010 bp, Artificial Sequence
  derived and/or modified sequence
atgcagaggctgatgatgctgctggccaccagcggggcctgcctgggcctgctggccgtggccgctgtggccgccgccggggccaacccagcccagagggacacccacagcctgctgcccacccaccggcggcagaagagggactggatctggaaccagatgcacattgatgaggagaagaacaccagcctgccccaccacgtgggcaagatcaagagctctgtgtccaggaagaatgccaagtacctgctgaagggggagtatgtgggcaaggtgttccgggtggatgctgagactggagatgtgtttgccatcgagcggctggaccgggagaacatcagcgagtaccacctgacagctgtgattgtggacaaggacacaggagagaacctggagacccccagcagcttcaccatcaaggtgcatgatgtgaatgacaactggcctgtgttcacccacaggctcttcaatgcctctgtgcctgagagcagcgctgtgggcaccagcgtcatctctgtgacagctgtggatgctgatgaccccaccgtgggggaccacgcctctgtgatgtaccagatcctgaagggcaaggagtactttgccatcgacaacagcggccgcatcatcaccatcaccaagagcctggaccgggagaagcaggcccgctatgaaattgtggtggaggccagagatgcccagggcctgcggggggacagcggcacagccaccgtgctggtgaccctgcaggacatcaatgacaacttccccttcttcacccagaccaagtacacctttgtggtgcctgaggacaccagggtgggcacctctgtgggcagcctgtttgtggaggaccctgatgagccccagaacaggatgaccaagtacagcatcctgcggggggactaccaggatgccttcaccatcgagaccaacccagcccacaatgaaggcatcatcaagcccatgaagcccctggactatgagtacatccagcagtacagcttcatcgtggaggccacagaccccaccatcgacctgcgctacatgagccccccagctggcaacagagcccaggtgatcatcaacatcacagatgtggatgagccccccatcttccagcagcccttctaccacttccagctggtgctgcagatcagcgccatcgacaaggacatcaccccaagaaatgtgaagttcaagttcatcctgaacacagagaacaacttcaccctgacagacaaccacgacaacacagccaacatcaccgtgaagtatggccagtttgaccgggagcacaccaaggtgcacttcctgcctgtggtgatcagtgacaatggcatgcccagcaggacaggcaccagcaccctgactgtggccgtgtgcaagtgcaatgagcagggcgagttcaccttctgtgaggacatggccgcccaggtgggcgtgtccatccaggccgtggtggccatcctgctgtgcatcctgaccatcaccgtcatcaccctgctgatcttcctgcggcggcggctgaggaagcaggcccgggcccacggcaagtctgtgcctgagatccacgagcagctggtgacctatgatgaggagggcggcggggagatggacaccaccagctatgatgtgtctgtgctgaacagcgtgcggcggggcggggccaagccacccaggcctgccctggatgcccggcccagcctgtatgcccaggtgcagaagccacccaggcatgcccctggggcccacggcggccctggagagatggccgccatgattgaggtgaagaaggatgaagctgaccatgatggagatggccccccctatgacaccctgcacatctacggctatgagggcagcgagagcattgctgagagcctgagcagcctgggcacagacagcagtgacagtgatgtggactatgacttcctgaatgactggggcccccgcttcaagatgctggccgagctgtatggcagtgacccccgggaggagctgctgtactag

SEQ ID NO: 121088 - DNA, 672 bp, Artificial Sequence
  derived and/or modified sequence
atgcccagcaggacaggcaccagcaccctgactgtggccgtgtgcaagtgcaatgagcagggcgagttcaccttctgtgaggacatggccgcccaggtgggcgtgtccatccaggccgtggtggccatcctgctgtgcatcctgaccatcaccgtcatcaccctgctgatcttcctgcggcggcggctgaggaagcaggcccgggcccacggcaagtctgtgcctgagatccacgagcagctggtgacctatgatgaggagggcggcggggagatggacaccaccagctatgatgtgtctgtgctgaacagcgtgcggcggggcggggccaagccacccaggcctgccctggatgcccggcccagcctgtatgcccaggtgcagaagccacccaggcatgcccctggggcccacggcggccctggagagatggccgccatgattgaggtgaagaaggatgaagctgaccatgatggagatggccccccctatgacaccctgcacatctacggctatgagggcagcgagagcattgctgagagcctgagcagcctgggcacagacagcagtgacagtgatgtggactatgacttcctgaatgactggggcccccgcttcaagatgctggccgagctgtatggcagtgacccccgggaggagctgctgtactag

SEQ ID NO: 121089 - DNA, 1578 bp, Artificial Sequence
  derived and/or modified sequence
atgcccagcacctgcagcaaggagaacatgtgggcccggagcagcggctccatgcagaggcaggagacctgcagccccctgcgggcccagaacaggatgaccaagtacagcatcctgcggggggactaccaggatgccttcaccatcgagaccaacccagcccacaatgaaggcatcatcaagcccatgaagcccctggactatgagtacatccagcagtacagcttcatcgtggaggccacagaccccaccatcgacctgcgctacatgagccccccagctggcaacagagcccaggtgatcatcaacatcacagatgtggatgagccccccatcttccagcagcccttctaccacttccagctgaaggagaaccagaagaagcccctgattggaacagtgctggccatggaccctgatgctgcccggcacagcatcggctacagcatccggaggaccagtgacaagggccagttcttccgggtgaccaagaagggggacatctacaatgagaaggagctggaccgggaggtgtacccctggtacaacctgactgtggaggccaaggagctggacagcacaggcacccccaccgggaaggagagcatcgtgcaggtgcacatcgaggtgctggatgaaaatgacaatgcccctgagtttgccaagccctaccagcccaaggtgtgtgaaaatgctgtgcacggccagctggtgctgcagatcagcgccatcgacaaggacatcaccccaagaaatgtgaagttcaagttcatcctgaacacagagaacaacttcaccctgacagacaaccacgacaacacagccaacatcaccgtgaagtatggccagtttgaccgggagcacaccaaggtgcacttcctgcctgtggtgatcagtgacaatggcatgcccagcaggacaggcaccagcaccctgactgtggccgtgtgcaagtgcaatgagcagggcgagttcaccttctgtgaggacatggccgcccaggtgggcgtgtccatccaggccgtggtggccatcctgctgtgcatcctgaccatcaccgtcatcaccctgctgatcttcctgcggcggcggctgaggaagcaggcccgggcccacggcaagtctgtgcctgagatccacgagcagctggtgacctatgatgaggagggcggcggggagatggacaccaccagctatgatgtgtctgtgctgaacagcgtgcggcggggcggggccaagccacccaggcctgccctggatgcccggcccagcctgtatgcccaggtgcagaagccacccaggcatgcccctggggcccacggcggccctggagagatggccgccatgattgaggtgaagaaggatgaagctgaccatgatggagatggccccccctatgacaccctgcacatctacggctatgagggcagcgagagcattgctgagagcctgagcagcctgggcacagacagcagtgacagtgatgtggactatgacttcctgaatgactggggcccccgcttcaagatgctggccgagctgtatggcagtgacccccgggaggagctgctgtactag

SEQ ID NO: 121090 - DNA, 2355 bp, Artificial Sequence
  derived and/or modified sequence
atgcagcggctgatgatgctgctggccaccagcggcgcctgcctgggcctgctagccgtagcagctgtcgccgccgccggcgccaatcccgcacaacgggatacccatagtttgcttcccacccaccgcagacagaaacgggactggatatggaatcaaatgcacatcgatgaggaaaaaaatacgagcctcccgcatcacgtcggtaaaataaaatccagtgtgagtaggaaaaatgctaagtatctcttaaagggagagtatgttggtaaggtcttccgcgtggacgcggaaaccggcgacgtttttgccatcgaacggctcgaccgggagaatatcagtgagtaccatctgaccgccgtgattgttgataaggataccggagaaaacctcgagacaccctcatcattcacaattaaggtgcacgacgttaacgacaattggccagtatttacccatagactgtttaacgctagcgttcccgaatcaagcgccgttggtaccagtgtaattagcgtgacggccgtagacgccgatgatcccaccgttggggaccacgcttctgtcatgtatcaaatcctgaagggcaaggaatatttcgctatagacaatagcggacgaatcattaccattaccaagtcactcgatcgcgaaaaacaagctcgttacgagattgttgtcgaggcccgagatgcccagggtttgagaggcgactctggcacagctaccgtgctggtaactcttcaagacattaatgataactttccatttttcactcagactaagtatactttcgtggtccccgaagatactcgcgtcgggacaagcgtcgggtcattgttcgtggaggatcctgatgaaccccagaataggatgaccaaatactcaatcttacgcggcgactatcaagatgccttcaccattgagacaaacccggcccacaacgaggggatcattaagccgatgaaacccttggattatgaatacatccagcagtattccttcatcgtcgaggctacagatccaacaattgacctcagatacatgagtccgccagcaggaaacagggcgcaggtgattattaatattaccgatgttgacgaacctcctatctttcagcaacctttctatcatttccagttgaaagagaaccaaaaaaaaccactgatcggtactgtgcttgccatggacccggacgctgcacgtcactctattggctattctatccggcggacaagcgataaagggcagttttttcgcgtaaccaagaaaggcgatatctacaacgagaaggagctggaccgcgaggtttacccttggtacaaccttaccgtagaggccaaagagcttgacagtacgggcacgccaacagggaaggagtctatcgtacaggttcacatcgaggtcttagacgaaaatgacaatgcccccgagttcgccaagccttaccagccgaaggtttgcgaaaatgcggtccacgggcagctggtcctgcagatcagtgcaatagacaaggatataactcctcgcaatgtgaagtttaagttcatcttgaatactgagaataatttcacactcactgacaaccatgacaatacagccaacattaccgtgaaatacgggcagttcgacagagagcatacaaaagtccattttctcccggtggtgatctcagacaatggcatgcccagccgcaccggaacatccacactgaccgtagccgtgtgcaagtgtaacgagcagggggaattcacattttgtgaggatatggctgcccaggtgggcgtgtcaatccaggccgtggtagccattttgctttgtattctgacaataacggtcattactctgcttatcttcctgaggcgccgcctgaggaaacaggcccgcgcgcatgggaaaagcgtaccggaaatacacgaacagttagtcacctatgacgaggagggaggaggcgaaatggatacaacctcctatgatgtgtccgtcctcaactccgtgcggaggggcggcgccaagccccctcgtccggcattagacgcaagacccagcttatacgcacaggtccagaagccacctagacacgcccctggggcccacggaggacctggggagatggctgccatgatcgaggtgaagaaggacgaggcagatcatgacggagatggcccaccttatgatacactgcacatttatggatacgaagggtccgagtcaatcgctgaaagcctttctagcctaggaacggactcttccgactcggacgtagattatgattttctgaacgattggggacctagattcaagatgcttgctgagctatacgggtcagacccgcgagaagagctcctttattag

SEQ ID NO: 121091 - DNA, 2010 bp, Artificial Sequence
  derived and/or modified sequence
atgcagcggctgatgatgctgctggccaccagcggcgcctgcctgggcttactggctgttgccgctgtggctgcagcaggcgctaacccagcccaacgggacacgcatagcctgctccctacccacagacggcagaaacgagactggatctggaaccagatgcatattgacgaagaaaaaaacacttccctgccacatcatgttggaaaaattaaaagttccgtgtcacgcaagaatgctaaatatctgttaaagggcgagtatgtcggcaaggtttttcgtgtggacgcagagaccggcgatgtgtttgccatcgaaaggttggaccgcgagaatatttcagagtaccacctgacagccgtaatcgtcgacaaagacactggagagaatctggagactccctcatccttcactattaaagtgcacgacgtaaacgacaactggccggtgtttactcaccggctgtttaatgcttctgtgcccgaaagctccgccgttggaactagtgttatatctgtgaccgctgtggacgctgatgacccaactgtcggcgaccacgcaagtgtgatgtaccagatcctgaaagggaaagagtatttcgccatcgacaacagcggaaggattatcaccattacaaaatcactggatcgggaaaagcaagctcggtatgagatagtggttgaggctcgagatgcacaggggctccggggagactccgggacagccacagtgctcgtgaccctgcaagacatcaatgataacttcccattcttcacacagactaaatataccttcgtcgttcccgaagatacccgggtcggcaccagcgtcggctctctgtttgtggaagatcccgacgaaccgcagaatagaatgacaaagtactcgatcctgaggggagactatcaggatgcctttaccatagagacgaatccggcccacaatgaaggtattattaaaccgatgaaaccattggactatgagtatatccagcagtactccttcatcgtcgaagccaccgatcccaccatcgacctcaggtacatgtctcctcccgccggaaatagagctcaggtgattatcaatattacggatgtggacgagccacccatcttccaacagccattttaccattttcagctggtcctgcagatctctgcgatcgataaggatatcaccccccggaatgtcaagtttaaatttatacttaatacggagaacaactttactttaaccgacaatcacgacaacacggctaacattactgttaagtacggccagtttgatagggaacacaccaaagttcatttcctgccagttgtgataagcgataacgggatgccctccagaacaggtaccagcaccctaacggttgcggtgtgcaagtgcaacgaacagggggaattcactttctgcgaggatatggcagctcaagttggagtgtctattcaggccgtcgtggcaatccttctgtgcattctcactattacggtcataacgctattaatttttttgcggaggcgcttgagaaaacaagcccgcgcccacggaaagagcgttcctgagatacatgagcaattagtcacatacgatgaagagggtgggggcgagatggacacaacttcgtatgatgtctccgtcctgaatagcgttcggcggggaggcgcaaagccgccccgtcccgcattagatgccagaccttccctttatgcccaggtgcagaagcccccccgtcacgcgcctggcgctcacggtggcccgggtgagatggcggccatgatcgaggttaaaaaagacgaggcagaccatgacggggacggccctccctacgatacattgcacatctacggttacgaaggtagcgagagtatcgcagagtcattgagcagtctgggtaccgattcttcggatagtgatgttgattacgatttcctcaatgactggggccccagattcaaaatgttagccgaattatacggcagcgacccacgcgaagaattgctctactag

SEQ ID NO: 121092 - DNA, 672 bp, Artificial Sequence
  derived and/or modified sequence
atgcccagccggaccggcaccagcaccctgaccgtggccgtgtgcaaatgcaacgagcaaggtgagtttactttctgtgaagatatggctgcgcaggtgggggtgtccatccaggccgtcgtagctatcctcctgtgcatcttgaccattaccgtgattacattgctaattttcttgaggcgccgcctgcggaaacaagcaagggcccacgggaagagcgtccccgaaatccatgaacagctcgtcacctatgacgaggagggcggcggtgaaatggatactaccagctacgatgtgagtgtcctcaactccgttcggagaggcggagccaagccccccagacctgcattggacgcccggcccagcctgtacgcccaagtccagaaacctcctcgacatgcccccggagctcatggcggccccggagaaatggcagcaatgatagaggtgaaaaaggatgaggctgaccacgatggagacggacccccctacgacacgctccatatctacggatatgaggggtcggaatcaatagcagagtccctctcttctctgggcaccgactcaagtgactcagatgttgactatgatttcttgaacgactggggtcctcgcttcaaaatgctggctgaactgtatggttccgacccccgggaagaactgctgtactag

SEQ ID NO: 121093 - DNA, 1578 bp, Artificial Sequence
  derived and/or modified sequence
atgcccagcacctgcagcaaggagaacatgtgggcccggagcagcggcagcatgcagaggcaggagacttgttcaccgctgcgggctcaaaaccgaatgacaaagtactctatcctaaggggtgattatcaggacgctttcaccatagaaacaaaccccgcgcacaacgaaggcatcataaagcccatgaagccactggattatgagtacatccagcagtactcgtttatcgtggaagccacggaccctacaatcgacttaagatacatgagcccacctgctggtaatcgggcacaggtgatcataaacatcacggatgttgacgaaccaccaatcttccagcagccattttatcattttcagctgaaagagaatcagaagaaacccttgatcggaactgtccttgccatggaccctgacgctgctaggcatagtatcggatatagcattcggcgaacaagcgataaagggcagttctttagagtgacaaagaagggtgacatttacaacgaaaaggagctcgatcgggaggtgtatccatggtataatctcaccgttgaagctaaagaacttgactccactggcacaccgacaggaaaagagtccattgtgcaggtgcacatcgaggtgttggatgagaatgataacgcccccgaatttgcaaagccatatcagcctaaggtatgcgaaaacgccgtgcacggacagctggtgcttcagatcagcgcaattgataaagacatcacccctagaaatgtgaagtttaaatttatcttgaatacggaaaataattttaccctgaccgataatcacgacaacacggccaatataaccgtaaagtacgggcaattcgatagggaacatactaaggtacactttttacctgtggttattagcgataatgggatgcccagcaggaccggcacctcaacactgaccgtggccgtatgcaagtgcaacgaacagggggagttcactttctgcgaagacatggccgctcaggtgggagtgagcatccaggccgtcgtggcgatccttctgtgtatccttaccatcaccgtgatcacgctactaatttttctgcgccgaagattgagaaagcaggcacgcgcccacggtaagagtgtgcctgaaatacatgagcagctggtgacatatgatgaagaagggggcggggaaatggacactaccagctacgatgttagtgtgttaaactctgtgcggcgaggaggagctaaacctcctaggccagccctggatgcccgtccaagcctttatgctcaagttcaaaaaccaccaaggcatgcccctggagcgcatggtgggccaggcgagatggctgctatgattgaagtaaagaaggacgaggctgaccatgacggggatggcccgccctatgacactctgcacatatacgggtacgaggggtctgagagcattgctgaaagcttatcaagtctgggcacggactcttctgattctgatgtagactacgactttctcaatgattggggccctagattcaaaatgctggcggagctgtacgggtcagatcccagagaggaactgctttactag

SEQ ID NO: 121094 - DNA, 2355 bp, Artificial Sequence
  derived and/or modified sequence
atgcaacggctgatgatgcttctggccacatccggagcgtgtctaggtctcttggccgttgcagccgttgcggcagccggagcgaatcccgcacagcgggacactcactcgctactgcccactcacagacgtcagaagagggactggatctggaaccagatgcatatagacgaggaaaagaataccagtttgccacatcacgtggggaagatcaaatcatccgtgtcccgcaagaacgccaagtatctgctgaaaggagagtacgtagggaaggttttccgtgtcgatgccgagactggtgatgtattcgccattgaaagattagatcgggaaaatatctccgagtaccacctgaccgccgttattgtagacaaggataccggtgaaaaccttgaaaccccgtcctcatttactattaaggtccacgatgtgaacgataattggccagtcttcacacatagactcttcaacgcttccgtacctgagtctagcgccgtgggcacgtcagttatttctgtcacagcggttgacgctgatgacccaactgtgggcgatcatgcctccgtaatgtatcagatactgaaaggcaaagagtacttcgctatagacaattccggcagaataatcaccattactaagtcactcgaccgtgaaaagcaggcaaggtatgagatcgttgtggaggctagagacgcacagggcctgcggggagacagcgggacggcaacagtgttagtgactctccaggatatcaatgacaacttccctttctttacacaaacaaaatacacctttgtggttccagaagacaccagggtaggcacttcagtcggcagcctctttgtcgaggatcccgatgagcctcagaaccgcatgacaaaatactcaatcttaaggggagattaccaggacgcgttcactatagaaaccaatcctgcgcataacgaggggatcattaagccaatgaaacccttggattacgaatacattcagcaatactcatttatagtcgaggcaaccgacccgacaattgatctgcgctatatgagccctcccgctgggaaccgggcacaagtgataatcaatatcaccgacgtcgatgagcctcctatatttcagcagcctttttaccacttccagctgaaggaaaatcaaaagaaaccactaatcgggaccgtgctggccatggacccagacgccgctcggcactcaatcggatactcgatcagacgcacatctgacaagggacaattttttcgggtaaccaaaaagggggatatctacaatgagaaggagcttgatagggaggtgtatccttggtacaatttaaccgtcgaggccaaagagcttgactcaactggaactccgactggaaaggagtctattgtgcaggtgcatatcgaggtgctggatgaaaacgataacgctccagagttcgccaaaccataccagccaaaagtctgcgaaaacgctgtgcatggtcagctggtgcttcaaatcagcgccatcgacaaggacattaccccccgaaatgttaagttcaagtttatcctgaacaccgagaataatttcaccctgacagataatcacgataacactgcaaatataaccgtgaagtatggtcagtttgatagagaacacacgaaggtccattttttgcccgtagtgatctccgacaatggtatgccaagcaggacaggaaccagcaccctcactgtcgccgtctgtaaatgtaatgaacagggggagttcaccttctgcgaggatatggccgcacaagtgggggtcagcatacaggctgtggttgccatcctcctctgcattctcaccatcacagtcatcacgctgctgatttttctgaggcgccgtttgagaaaacaggcacgggctcacggaaagagtgtgcccgagatccatgaacaactggtgacttacgatgaagagggaggaggtgaaatggacaccacgagctacgacgtgagcgtgctgaattccgtgcggaggggcggtgccaaaccaccacggcctgccctggacgctaggccatctctctatgcccaagttcaaaagccccctcggcacgctcctggagcacacggaggacccggtgaaatggccgctatgatcgaagtgaaaaaagatgaggccgaccacgacggagacggccctccttacgacacactccacatctacggctacgaaggctcagaaagcatagccgaaagcttgagctcgctggggactgacagcagtgattctgacgtggattatgacttcctaaatgattggggaccaaggttcaaaatgctggcagaattgtatgggagtgacccacgcgaagaactactgtactag

SEQ ID NO: 121095 - DNA, 2010 bp, Artificial Sequence
  derived and/or modified sequence
atgcagcggttaatgatgttactggcaacatccggagcgtgtctcggtctgctggccgtagcagctgttgctgcagctggtgccaaccctgcccaacgagacacgcactctctgcttccaactcataggcggcagaagcgcgattggatttggaaccagatgcacattgacgaggagaagaacacgagcctgccccaccatgtgggcaaaattaagtcgtcagtctcacggaaaaatgcgaaatacctcttgaagggggaatacgtgggaaaagtgtttcgcgtcgacgcagagacaggcgatgtttttgccattgaacggcttgacagagagaatatctccgagtaccacttgacagctgtgatagtcgacaaggatacgggggaaaatctggaaaccccctcatcgtttaccatcaaggtccatgatgtgaacgataattggccggtttttacacatcggctattcaacgcgtctgtcccagaatcaagcgcagttgggaccagcgtgataagcgtcaccgccgtcgatgccgatgaccccaccgtgggggaccacgccagcgttatgtatcaaattctgaaggggaaggagtactttgcaattgacaattccgggcgaattattactattaccaagtccctggatagggagaagcaagcccgttacgagattgtcgttgaagccagagatgcacaaggactgagaggagactccggtacagcgaccgtgcttgtcaccctgcaagatattaacgataacttcccatttttcacacaaacgaaatacacctttgttgttccagaggatacgcgcgtgggaacgtctgtcggctccctgtttgttgaagaccccgacgagccccagaaccggatgacgaagtattctattctgagaggcgactaccaggatgcttttactatagagactaaccccgcacacaacgagggcatcatcaaaccaatgaagccactggactatgagtatatccaacagtactcctttattgtcgaggcaactgatcccaccattgatttaaggtatatgtcccccccagccggtaaccgagctcaggttatcatcaatatcaccgatgtggacgaacccccaatctttcaacagcccttttaccatttccagctggtgctacagatttcagccatcgacaaagacattacaccacgcaatgtaaaattcaagttcattctgaatactgagaataattttacattaactgacaatcatgacaacaccgccaacattactgtaaagtacggccaatttgaccgcgagcataccaaagtccacttcctgccggtggtgatcagcgacaacggtatgccaagtaggacaggcacgtccacgcttactgtggcagtgtgtaaatgcaatgagcagggggaattcacattttgcgaggatatggccgctcaggtcggtgtgagcattcaggcagtagtagctatcctgctttgtatccttacaattacagtaattacgcttctcattttcctaaggagacgactgaggaagcaggcaagggcacacggaaaatccgtgccagagattcacgaacagctggttacctacgacgaggagggcggtggggagatggacacaacaagctacgatgtgagcgttttaaactctgtccggagagggggagccaaaccccctaggcccgctctggatgccaggcctagcctgtacgcccaggttcagaagcccccacggcatgctcctggagctcacggtggcccaggtgagatggccgcaatgattgaggtcaagaaggacgaagctgatcacgacggagatggccctccctacgatactctgcacatttacggctacgagggctcggaaagcatagcagagtctctgtcatccctcgggactgatagtagcgattcagacgtcgattatgattttctgaacgactggggacctcggttcaagatgctggcagaactgtatggctccgaccccagagaggagctcttatactag

SEQ ID NO: 121096 - DNA, 672 bp, Artificial Sequence
  derived and/or modified sequence
atgcctagcaggaccggcacctccacactgactgttgctgtgtgtaaatgcaacgaacagggggagttcactttttgcgaggatatggctgcccaggtcggcgtgtcaattcaagctgtagtggcaatactcctttgtatactgactattactgtaatcaccctgctgattttcctgagaaggaggctccggaaacaggcgagggcccacggcaagagcgtgcctgaaattcatgaacaactggtgacgtacgatgaggaaggtggcggagagatggatacaacctcctacgatgttagcgtcctgaactccgtccgacggggtggcgcaaagcctcctcggccagcattagacgcaaggccatccttatatgctcaggtccagaagccgcctcgacacgccccaggcgctcacggcggaccaggggaaatggccgctatgattgaagtgaagaaggacgaggcagaccatgatggtgacggacctccctacgatacgcttcacatttacggatacgagggcagcgaatccattgcggaatcactgagcagcctcggaacagacagctcagatagtgatgtcgattatgatttcctcaatgattggggaccaaggtttaaaatgctcgcagagttatacggctccgatccaagggaagagctgttatactag

SEQ ID NO: 121097 - DNA, 1578 bp, Artificial Sequence
  derived and/or modified sequence
atgccatcaacttgctcaaaggagaacatgtgggctagatccagcggttccatgcagcggcaggagacatgctcaccccttcgcgctcagaatagaatgacaaagtattccatcctacgcggtgattatcaggatgccttcacaatcgagacaaatcccgctcacaacgaaggtatcattaagcccatgaagccactggattacgagtatatccagcagtactctttcattgtggaggccacagatcccaccattgacctgaggtatatgtccccccctgcaggtaacagagcccaagtgattataaacataactgacgttgatgagccccctatcttccagcagcccttctatcatttccagcttaaggagaaccagaaaaaacccctcattggcaccgttctggccatggatcctgacgcagcccgacattctataggctatagcattagacgaaccagcgacaagggacagttttttcgggtgacaaagaaaggagacatttacaacgaaaaggagctggatcgggaggtctacccttggtataatttaacagtggaggccaaggaactggacagcacgggaacacccaccggtaaggaatccattgtgcaggtgcacattgaagtactcgacgagaatgataacgcccctgagttcgctaaaccatatcagcctaaggtctgtgaaaatgcagtacacggacaactagtactgcagatttcagccatcgacaaggacatcaccccaagaaatgtcaagttcaagtttattcttaacactgagaataattttacactcacggacaaccacgacaatacggcaaacattactgtgaaatatggccaattcgatagagaacacactaaagttcacttcctgcctgtcgttatttctgataatggtatgccctcccggactggaacaagtactttaactgtggcagtgtgcaagtgcaatgagcagggagaatttaccttctgcgaggacatggccgctcaggttggggtgtccattcaggcggtggtcgctattttactatgcattctaaccattaccgtgatcactttgctgatcttccttagacggagacttagaaaacaggcgagagcacacggcaagagcgtgcctgagattcatgagcagcttgtaacctatgacgaggaggggggaggggaaatggacaccacctcctatgatgtgtctgtattgaattccgtcaggaggggtggggctaaacctcctcgccctgctcttgatgcacgtcccagtctgtatgcacaggtacagaaaccgcctagacatgcgcctggcgctcatggagggcctggggagatggccgctatgatcgaggtgaagaaggacgaggccgaccacgacggcgacgggccaccatacgacactctccacatctatggttatgagggctccgagtctattgccgagtccctcagctcattgggaacagatagcagtgacagcgacgtggattatgattttttaaatgactggggccctagatttaagatgttagccgagttatatggatcggatcccagggaggagctgctctactag

SEQ ID NO: 121098 - DNA, 4117 bp, Artificial Sequence
  derived and/or modified sequence
ctcgccagcggggtgtggctcccctccaaagacggtcggctgacaggctccacagagctccactcacgctcagccctggacggacaggcagtccaacggaacagaaacatccctcagcccacaggcacgatctgttcctcctgggaagatgcagaggctcatgatgctcctcgccacatcgggcgcctgcctgggcctgctggcagtggcagcagtggcagcagcaggtgctaaccctgcccaacgggacacccacagcctgctgcccacccaccggcgccaaaagagagattggatttggaaccagatgcacattgatgaagagaaaaacacctcacttccccatcatgtaggcaagatcaagtcaagcgtgagtcgcaagaatgccaagtacctgctcaaaggagaatatgtgggcaaggtcttccgggtcgatgcagagacaggagacgtgttcgccattgagaggctggaccgggagaatatctcagagtaccacctcactgctgtcattgtggacaaggacactggcgaaaacctggagactccttccagcttcaccatcaaagttcatgacgtgaacgacaactggcctgtgttcacgcatcggttgttcaatgcgtccgtgcctgagtcgtcggctgtggggacctcagtcatctctgtgacagcagtggatgcagacgaccccactgtgggagaccacgcctctgtcatgtaccaaatcctgaaggggaaagagtattttgccatcgataattctggacgtattatcacaataacgaaaagcttggaccgagagaagcaggccaggtatgagatcgtggtggaagcgcgagatgcccagggcctccggggggactcgggcacggccaccgtgctggtcactctgcaagacatcaatgacaacttccccttcttcacccagaccaagtacacatttgtcgtgcctgaagacacccgtgtgggcacctctgtgggctctctgtttgttgaggacccagatgagccccagaaccggatgaccaagtacagcatcttgcggggcgactaccaggacgctttcaccattgagacaaaccccgcccacaacgagggcatcatcaagcccatgaagcctctggattatgaatacatccagcaatacagcttcatcgtcgaggccacagaccccaccatcgacctccgatacatgagccctcccgcgggaaacagagcccaggtcattatcaacatcacagatgtggacgagccccccattttccagcagcctttctaccacttccagctgaaggaaaaccagaagaagcctctgattggcacagtgctggccatggaccctgatgcggctaggcatagcattggatactccatccgcaggaccagtgacaagggccagttcttccgagtcacaaaaaagggggacatttacaatgagaaagaactggacagagaagtctacccctggtataacctgactgtggaggccaaagaactggattccactggaacccccacaggaaaagaatccattgtgcaagtccacattgaagttttggatgagaatgacaatgccccggagtttgccaagccctaccagcccaaagtgtgtgagaacgctgtccatggccagctggtcctgcagatctccgcaatagacaaggacataacaccacgaaacgtgaagttcaaattcatcttgaatactgagaacaactttaccctcacggataatcacgataacacggccaacatcacagtcaagtatgggcagtttgaccgggagcataccaaggtccacttcctacccgtggtcatctcagacaatgggatgccaagtcgcacgggcaccagcacgctgaccgtggccgtgtgcaagtgcaacgagcagggcgagttcaccttctgcgaggatatggccgcccaggtgggcgtgagcatccaggcagtggtagccatcttactctgcatcctcaccatcacagtgatcaccctgctcatcttcctgcggcggcggctccggaagcaggcccgcgcgcacggcaagagcgtgccggagatccacgagcagctggtcacctacgacgaggagggcggcggcgagatggacaccaccagctacgatgtgtcggtgctcaactcggtgcgccgcggcggggccaagcccccgcggcccgcgctggacgcccggccttccctctatgcgcaggtgcagaagccaccgaggcacgcgcctggggcacacggagggcccggggagatggcagccatgatcgaggtgaagaaggacgaggcggaccacgacggcgacggccccccctacgacacgctgcacatctacggctacgagggctccgagtccatagccgagtccctcagctccctgggcaccgactcatccgactctgacgtggattacgacttccttaacgactggggacccaggtttaagatgctggctgagctgtacggctcggacccccgggaggagctgctgtattaggcggccgaggtcactctgggcctggggacccaaaccccctgcagcccaggccagtcagacgccaggcaccacagcctccaaaaatggcagtgactccccagcccagcaccccttcctcgtgggtcccagagacctcatcagccttgggatagcaaactccaggttcctgaaatatccaggaatatatgtcagtgatgactattctcaaatgctggcaaatccaggctggtgttctgtctgggctcagacatccacataaccctgtcacccacagaccgccgtctaactcaaagacttcctctggctccccaaggctgcaaagcaaaacagactgtgtttaactgctgcagggtctttttctagggtccctgaacgccctggtaaggctggtgaggtcctggtgcctatctgcctggaggcaaaggcctggacagcttgacttgtggggcaggattctctgcagcccattcccaagggagactgaccatcatgccctctctcgggagccctagccctgctccaactccatactccactccaagtgccccaccactccccaacccctctccaggcctgtcaagagggaggaaggggccccatggcagctcctgaccttgggtcctgaagtgacctcactggcctgccatgccagtaactgtgctgtactgagcactgaaccacattcagggaaatggcttattaaactttgaagcaactgtgaattcattctggaggggcagtggagatcaggagtgacagatcacagggtgagggccacctccacacccaccccctctggagaaggcctggaagagctgagaccttgctttgagactcctcagcacccctccagttttgcctgagaaggggcagatgttcccggagcagaagacgtctccccttctctgcctcacctggtcgccaatccatgctctctttcttttctctgtctactccttatcccttggtttagaggaacccaagatgtggcctttagcaaaactggacaatgtccaaacccactcatgactgcatgacggagccgagccatgtgtctttacacctcgctgttgtcacatctcagggaactgaccctcaggcacaccttgcagaaggcaaggccctgccctgcccaacctctgtggtcacccatgcatcttccactggaacgtttcactgcaaacacaccttggagaagtggcatcagtcaacagagaggggcagggaaggagacaccaagctcacccttcgtcatggaccgaggttcccactctgggcaaagcccctcacactgcaagggattgtagataacactgacttgtttgttttaaccaataactagcttcttataatgatttttttactaatgatacttacaagtttctagctctcacagacatatagaataagggtttttgcataataagcaggttgttatttaggttaacaatattaattcaggttttttagttggaaaaacaattcctgtaaccttctattttctataattgtagtaattgctctacagataatgtctatatattggccaaactggtgcatgacaagtactgtatttttttatacctaaataaagaaaaatctttagcctgggca

SEQ ID NO: 121099 - DNA, 2464 bp, Artificial Sequence
  derived and/or modified sequence
gcagtccaacggaacagaaacatccctcagcccacaggcacgatctgttcctcctgggaagatgcagaggctcatgatgctcctcgccacatcgggcgcctgcctgggcctgctggcagtggcagcagtggcagcagcaggtgctaaccctgcccaacgggacacccacagcctgctgcccacccaccggcgccaaaagagagattggatttggaaccagatgcacattgatgaagagaaaaacacctcacttccccatcatgtaggcaagatcaagtcaagcgtgagtcgcaagaatgccaagtacctgctcaaaggagaatatgtgggcaaggtcttccgggtcgatgcagagacaggagacgtgttcgccattgagaggctggaccgggagaatatctcagagtaccacctcactgctgtcattgtggacaaggacactggcgaaaacctggagactccttccagcttcaccatcaaagttcatgacgtgaacgacaactggcctgtgttcacgcatcggttgttcaatgcgtccgtgcctgagtcgtcggctgtggggacctcagtcatctctgtgacagcagtggatgcagacgaccccactgtgggagaccacgcctctgtcatgtaccaaatcctgaaggggaaagagtattttgccatcgataattctggacgtattatcacaataacgaaaagcttggaccgagagaagcaggccaggtatgagatcgtggtggaagcgcgagatgcccagggcctccggggggactcgggcacggccaccgtgctggtcactctgcaagacatcaatgacaacttccccttcttcacccagaccaagtacacatttgtcgtgcctgaagacacccgtgtgggcacctctgtgggctctctgtttgttgaggacccagatgagccccagaaccggatgaccaagtacagcatcttgcggggcgactaccaggacgctttcaccattgagacaaaccccgcccacaacgagggcatcatcaagcccatgaagcctctggattatgaatacatccagcaatacagcttcatcgtcgaggccacagaccccaccatcgacctccgatacatgagccctcccgcgggaaacagagcccaggtcattatcaacatcacagatgtggacgagccccccattttccagcagcctttctaccacttccagctggtcctgcagatctccgcaatagacaaggacataacaccacgaaacgtgaagttcaaattcatcttgaatactgagaacaactttaccctcacggataatcacgataacacggccaacatcacagtcaagtatgggcagtttgaccgggagcataccaaggtccacttcctacccgtggtcatctcagacaatgggatgccaagtcgcacgggcaccagcacgctgaccgtggccgtgtgcaagtgcaacgagcagggcgagttcaccttctgcgaggatatggccgcccaggtgggcgtgagcatccaggcagtggtagccatcttactctgcatcctcaccatcacagtgatcaccctgctcatcttcctgcggcggcggctccggaagcaggcccgcgcgcacggcaagagcgtgccggagatccacgagcagctggtcacctacgacgaggagggcggcggcgagatggacaccaccagctacgatgtgtcggtgctcaactcggtgcgccgcggcggggccaagcccccgcggcccgcgctggacgcccggccttccctctatgcgcaggtgcagaagccaccgaggcacgcgcctggggcacacggagggcccggggagatggcagccatgatcgaggtgaagaaggacgaggcggaccacgacggcgacggccccccctacgacacgctgcacatctacggctacgagggctccgagtccatagccgagtccctcagctccctgggcaccgactcatccgactctgacgtggattacgacttccttaacgactggggacccaggtttaagatgctggctgagctgtacggctcggacccccgggaggagctgctgtattaggcggccgaggtcactctgggcctggggacccaaaccccctgcagcccaggccagtcagacgccaggcaccacagcctccaaaaatggcagtgactccccagcccagcaccccttcctcgtgggtcccagagacctcatcagccttgggatagcaaactccaggttcctgaaatatccaggaatatatgtcagtgatgactattctcaaatgctggcaaatccaggctggtgttctgtctgggctcagacatccacataaccctgtcacccacagaccgccgtctaactcaaagacttcctctggctccccaaggctgcaaagcaaaacagactgtgtttaactgctgcagggtctttttctagggtccctgaacgccctggtaaggctggtga

SEQ ID NO: 121100 - DNA, 1672 bp, Artificial Sequence
  derived and/or modified sequence
ataatgtgtagactcaagcctttcttcagatcaggaaacttttcttttctttttttttttttttttttttgttatttcttctgttctgtttgttctgggattttcctcattaatagcaactattattcctatatacacaaaacatatatatttatctttccatagatttttcctgatttctgaaagaactttttaagttttttatttcacaaagttaatttctttgtaattacttcttatctcttccagctctttttgtattccttcctggctcttgcccaatgatcttttcattaatcactaaaacaagtcccagctatggtgtgatgtcacctgttcagctctgaaagtgcatctgatggtctcagatactccatccgcaggaccagtgacaagggccagttcttccgagtcacaaaaaagggggacatttacaatgagaaagaactggacagagaagtctacccctggtataacctgactgtggaggccaaagaactggattccactggaacccccacaggaaaagaatccattgtgcaagtccacattgaagttttggatgagaatgacaatgccccggagtttgccaagccctaccagcccaaagtgtgtgagaacgctgtccatggccagctggtcctgcagatctccgcaatagacaaggacataacaccacgaaacgtgaagttcaaattcatcttgaatactgagaacaactttaccctcacggataatcacgataacacggccaacatcacagtcaagtatgggcagtttgaccgggagcataccaaggtccacttcctacccgtggtcatctcagacaatgggatgccaagtcgcacgggcaccagcacgctgaccgtggccgtgtgcaagtgcaacgagcagggcgagttcaccttctgcgaggatatggccgcccaggtgggcgtgagcatccaggcagtggtagccatcttactctgcatcctcaccatcacagtgatcaccctgctcatcttcctgcggcggcggctccggaagcaggcccgcgcgcacggcaagagcgtgccggagatccacgagcagctggtcacctacgacgaggagggcggcggcgagatggacaccaccagctacgatgtgtcggtgctcaactcggtgcgccgcggcggggccaagcccccgcggcccgcgctggacgcccggccttccctctatgcgcaggtgcagaagccaccgaggcacgcgcctggggcacacggagggcccggggagatggcagccatgatcgaggtgaagaaggacgaggcggaccacgacggcgacggccccccctacgacacgctgcacatctacggctacgagggctccgagtccatagccgagtccctcagctccctgggcaccgactcatccgactctgacgtggattacgacttccttaacgactggggacccaggtttaagatgctggctgagctgtacggctcggacccccgggaggagctgctgtattaggcggccgaggtcactctgggcctggggacccaaaccccctgcagcccaggccagtcagacgccaggcaccacagcctccaaaaatggcagtgactccccagcccagcaccccttcctcgtgggtcccagagacctcatcagccttgggatagcaaactccaggttc

SEQ ID NO: 121101 - DNA, 3191 bp, Artificial Sequence
  derived and/or modified sequence
atgccaagtacctgctcaaaggagaatatgtgggcaaggtcttccgggtcgatgcagagacaggagacgtgttcgccattgagagcccagaaccggatgaccaagtacagcatcttgcggggcgactaccaggacgctttcaccattgagacaaaccccgcccacaacgagggcatcatcaagcccatgaagcctctggattatgaatacatccagcaatacagcttcatcgtcgaggccacagaccccaccatcgacctccgatacatgagccctcccgcgggaaacagagcccaggtcattatcaacatcacagatgtggacgagccccccattttccagcagcctttctaccacttccagctgaaggaaaaccagaagaagcctctgattggcacagtgctggccatggaccctgatgcggctaggcatagcattggatactccatccgcaggaccagtgacaagggccagttcttccgagtcacaaaaaagggggacatttacaatgagaaagaactggacagagaagtctacccctggtataacctgactgtggaggccaaagaactggattccactggaacccccacaggaaaagaatccattgtgcaagtccacattgaagttttggatgagaatgacaatgccccggagtttgccaagccctaccagcccaaagtgtgtgagaacgctgtccatggccagctggtcctgcagatctccgcaatagacaaggacataacaccacgaaacgtgaagttcaaattcatcttgaatactgagaacaactttaccctcacggataatcacgataacacggccaacatcacagtcaagtatgggcagtttgaccgggagcataccaaggtccacttcctacccgtggtcatctcagacaatgggatgccaagtcgcacgggcaccagcacgctgaccgtggccgtgtgcaagtgcaacgagcagggcgagttcaccttctgcgaggatatggccgcccaggtgggcgtgagcatccaggcagtggtagccatcttactctgcatcctcaccatcacagtgatcaccctgctcatcttcctgcggcggcggctccggaagcaggcccgcgcgcacggcaagagcgtgccggagatccacgagcagctggtcacctacgacgaggagggcggcggcgagatggacaccaccagctacgatgtgtcggtgctcaactcggtgcgccgcggcggggccaagcccccgcggcccgcgctggacgcccggccttccctctatgcgcaggtgcagaagccaccgaggcacgcgcctggggcacacggagggcccggggagatggcagccatgatcgaggtgaagaaggacgaggcggaccacgacggcgacggccccccctacgacacgctgcacatctacggctacgagggctccgagtccatagccgagtccctcagctccctgggcaccgactcatccgactctgacgtggattacgacttccttaacgactggggacccaggtttaagatgctggctgagctgtacggctcggacccccgggaggagctgctgtattaggcggccgaggtcactctgggcctggggacccaaaccccctgcagcccaggccagtcagacgccaggcaccacagcctccaaaaatggcagtgactccccagcccagcaccccttcctcgtgggtcccagagacctcatcagccttgggatagcaaactccaggttcctgaaatatccaggaatatatgtcagtgatgactattctcaaatgctggcaaatccaggctggtgttctgtctgggctcagacatccacataaccctgtcacccacagaccgccgtctaactcaaagacttcctctggctccccaaggctgcaaagcaaaacagactgtgtttaactgctgcagggtctttttctagggtccctgaacgccctggtaaggctggtgaggtcctggtgcctatctgcctggaggcaaaggcctggacagcttgacttgtggggcaggattctctgcagcccattcccaagggagactgaccatcatgccctctctcgggagccctagccctgctccaactccatactccactccaagtgccccaccactccccaacccctctccaggcctgtcaagagggaggaaggggccccatggcagctcctgaccttgggtcctgaagtgacctcactggcctgccatgccagtaactgtgctgtactgagcactgaaccacattcagggaaatggcttattaaactttgaagcaactgtgaattcattctggaggggcagtggagatcaggagtgacagatcacagggtgagggccacctccacacccaccccctctggagaaggcctggaagagctgagaccttgctttgagactcctcagcacccctccagttttgcctgagaaggggcagatgttcccggagcagaagacgtctccccttctctgcctcacctggtcgccaatccatgctctctttcttttctctgtctactccttatcccttggtttagaggaacccaagatgtggcctttagcaaaactggacaatgtccaaacccactcatgactgcatgacggagccgagccatgtgtctttacacctcgctgttgtcacatctcagggaactgaccctcaggcacaccttgcagaaggcaaggccctgccctgcccaacctctgtggtcacccatgcatcttccactggaacgtttcactgcaaacacaccttggagaagtggcatcagtcaacagagaggggcagggaaggagacaccaagctcacccttcgtcatggaccgaggttcccactctgggcaaagcccctcacactgcaagggattgtagataacactgacttgtttgttttaaccaataactagcttcttataatgatttttttactaatgatacttacaagtttctagctctcacagacatatagaataagggtttttgcataataagcaggttgttatttaggttaacaatattaattcaggttttttagttggaaaaacaattcctgtaaccttctattttctataattgtagtaattgctctacagataatgtctatatattggccaaactggtgcatgacaagtactgtatttttttatacctaaataaagaaaaatctttagcctgggc

SEQ ID NO: 121102 - DNA, 2355 bp, Artificial Sequence
  derived and/or modified sequence
atgcagagactgatgatgctgctggccaccagcggcgcctgcctgggcctgctggccgtggccgccgtggccgccgccggcgccaaccccgcccagagagacacccacagcctgctgcccacccacagaagacagaagagagactggatctggaaccagatgcacatcgacgaggagaagaacaccagcctgccccaccacgtgggcaagatcaagagcagcgtgagcagaaagaacgccaagtacctgctgaagggcgagtacgtgggcaaggtgttcagagtggacgccgagaccggcgacgtgttcgccatcgagagactggacagagagaacatcagcgagtaccacctgaccgccgtgatcgtggacaaggacaccggcgagaacctggagacccccagcagcttcaccatcaaggtgcacgacgtgaacgacaactggcccgtgttcacccacagactgttcaacgccagcgtgcccgagagcagcgccgtgggcaccagcgtgatcagcgtgaccgccgtggacgccgacgaccccaccgtgggcgaccacgccagcgtgatgtaccagatcctgaagggcaaggagtacttcgccatcgacaacagcggcagaatcatcaccatcaccaagagcctggacagagagaagcaggccagatacgagatcgtggtggaggccagagacgcccagggcctgagaggcgacagcggcaccgccaccgtgctggtgaccctgcaggacatcaacgacaacttccccttcttcacccagaccaagtacaccttcgtggtgcccgaggacaccagagtgggcaccagcgtgggcagcctgttcgtggaggaccccgacgagccccagaacagaatgaccaagtacagcatcctgagaggcgactaccaggacgccttcaccatcgagaccaaccccgcccacaacgagggcatcatcaagcccatgaagcccctggactacgagtacatccagcagtacagcttcatcgtggaggccaccgaccccaccatcgacctgagatacatgagcccccccgccggcaacagagcccaggtgatcatcaacatcaccgacgtggacgagccccccatcttccagcagcccttctaccacttccagctgaaggagaaccagaagaagcccctgatcggcaccgtgctggccatggaccccgacgccgccagacacagcatcggctacagcatcagaagaaccagcgacaagggccagttcttcagagtgaccaagaagggcgacatctacaacgagaaggagctggacagagaggtgtacccctggtacaacctgaccgtggaggccaaggagctggacagcaccggcacccccaccggcaaggagagcatcgtgcaggtgcacatcgaggtgctggacgagaacgacaacgcccccgagttcgccaagccctaccagcccaaggtgtgcgagaacgccgtgcacggccagctggtgctgcagatcagcgccatcgacaaggacatcacccccagaaacgtgaagttcaagttcatcctgaacaccgagaacaacttcaccctgaccgacaaccacgacaacaccgccaacatcaccgtgaagtacggccagttcgacagagagcacaccaaggtgcacttcctgcccgtggtgatcagcgacaacggcatgcccagcagaaccggcaccagcaccctgaccgtggccgtgtgcaagtgcaacgagcagggcgagttcaccttctgcgaggacatggccgcccaggtgggcgtgagcatccaggccgtggtggccatcctgctgtgcatcctgaccatcaccgtgatcaccctgctgatcttcctgagaagaagactgagaaagcaggccagagcccacggcaagagcgtgcccgagatccacgagcagctggtgacctacgacgaggagggcggcggcgagatggacaccaccagctacgacgtgagcgtgctgaacagcgtgagaagaggcggcgccaagccccccagacccgccctggacgccagacccagcctgtacgcccaggtgcagaagccccccagacacgcccccggcgcccacggcggccccggcgagatggccgccatgatcgaggtgaagaaggacgaggccgaccacgacggcgacggccccccctacgacaccctgcacatctacggctacgagggcagcgagagcatcgccgagagcctgagcagcctgggcaccgacagcagcgacagcgacgtggactacgacttcctgaacgactggggccccagattcaagatgctggccgagctgtacggcagcgaccccagagaggagctgctgtactag

SEQ ID NO: 121103 - DNA, 2010 bp, Artificial Sequence
  derived and/or modified sequence
atgcagagactgatgatgctgctggccaccagcggcgcctgcctgggcctgctggccgtggccgccgtggccgccgccggcgccaaccccgcccagagagacacccacagcctgctgcccacccacagaagacagaagagagactggatctggaaccagatgcacatcgacgaggagaagaacaccagcctgccccaccacgtgggcaagatcaagagcagcgtgagcagaaagaacgccaagtacctgctgaagggcgagtacgtgggcaaggtgttcagagtggacgccgagaccggcgacgtgttcgccatcgagagactggacagagagaacatcagcgagtaccacctgaccgccgtgatcgtggacaaggacaccggcgagaacctggagacccccagcagcttcaccatcaaggtgcacgacgtgaacgacaactggcccgtgttcacccacagactgttcaacgccagcgtgcccgagagcagcgccgtgggcaccagcgtgatcagcgtgaccgccgtggacgccgacgaccccaccgtgggcgaccacgccagcgtgatgtaccagatcctgaagggcaaggagtacttcgccatcgacaacagcggcagaatcatcaccatcaccaagagcctggacagagagaagcaggccagatacgagatcgtggtggaggccagagacgcccagggcctgagaggcgacagcggcaccgccaccgtgctggtgaccctgcaggacatcaacgacaacttccccttcttcacccagaccaagtacaccttcgtggtgcccgaggacaccagagtgggcaccagcgtgggcagcctgttcgtggaggaccccgacgagccccagaacagaatgaccaagtacagcatcctgagaggcgactaccaggacgccttcaccatcgagaccaaccccgcccacaacgagggcatcatcaagcccatgaagcccctggactacgagtacatccagcagtacagcttcatcgtggaggccaccgaccccaccatcgacctgagatacatgagcccccccgccggcaacagagcccaggtgatcatcaacatcaccgacgtggacgagccccccatcttccagcagcccttctaccacttccagctggtgctgcagatcagcgccatcgacaaggacatcacccccagaaacgtgaagttcaagttcatcctgaacaccgagaacaacttcaccctgaccgacaaccacgacaacaccgccaacatcaccgtgaagtacggccagttcgacagagagcacaccaaggtgcacttcctgcccgtggtgatcagcgacaacggcatgcccagcagaaccggcaccagcaccctgaccgtggccgtgtgcaagtgcaacgagcagggcgagttcaccttctgcgaggacatggccgcccaggtgggcgtgagcatccaggccgtggtggccatcctgctgtgcatcctgaccatcaccgtgatcaccctgctgatcttcctgagaagaagactgagaaagcaggccagagcccacggcaagagcgtgcccgagatccacgagcagctggtgacctacgacgaggagggcggcggcgagatggacaccaccagctacgacgtgagcgtgctgaacagcgtgagaagaggcggcgccaagccccccagacccgccctggacgccagacccagcctgtacgcccaggtgcagaagccccccagacacgcccccggcgcccacggcggccccggcgagatggccgccatgatcgaggtgaagaaggacgaggccgaccacgacggcgacggccccccctacgacaccctgcacatctacggctacgagggcagcgagagcatcgccgagagcctgagcagcctgggcaccgacagcagcgacagcgacgtggactacgacttcctgaacgactggggccccagattcaagatgctggccgagctgtacggcagcgaccccagagaggagctgctgtactag

SEQ ID NO: 121104 - DNA, 672 bp, Artificial Sequence
  derived and/or modified sequence
atgcccagcagaaccggcaccagcaccctgaccgtggccgtgtgcaagtgcaacgagcagggcgagttcaccttctgcgaggacatggccgcccaggtgggcgtgagcatccaggccgtggtggccatcctgctgtgcatcctgaccatcaccgtgatcaccctgctgatcttcctgagaagaagactgagaaagcaggccagagcccacggcaagagcgtgcccgagatccacgagcagctggtgacctacgacgaggagggcggcggcgagatggacaccaccagctacgacgtgagcgtgctgaacagcgtgagaagaggcggcgccaagccccccagacccgccctggacgccagacccagcctgtacgcccaggtgcagaagccccccagacacgcccccggcgcccacggcggccccggcgagatggccgccatgatcgaggtgaagaaggacgaggccgaccacgacggcgacggccccccctacgacaccctgcacatctacggctacgagggcagcgagagcatcgccgagagcctgagcagcctgggcaccgacagcagcgacagcgacgtggactacgacttcctgaacgactggggccccagattcaagatgctggccgagctgtacggcagcgaccccagagaggagctgctgtactag

SEQ ID NO: 121105 - DNA, 1578 bp, Artificial Sequence
  derived and/or modified sequence
atgcccagcacctgcagcaaggagaacatgtgggccagaagcagcggcagcatgcagagacaggagacctgcagccccctgagagcccagaacagaatgaccaagtacagcatcctgagaggcgactaccaggacgccttcaccatcgagaccaaccccgcccacaacgagggcatcatcaagcccatgaagcccctggactacgagtacatccagcagtacagcttcatcgtggaggccaccgaccccaccatcgacctgagatacatgagcccccccgccggcaacagagcccaggtgatcatcaacatcaccgacgtggacgagccccccatcttccagcagcccttctaccacttccagctgaaggagaaccagaagaagcccctgatcggcaccgtgctggccatggaccccgacgccgccagacacagcatcggctacagcatcagaagaaccagcgacaagggccagttcttcagagtgaccaagaagggcgacatctacaacgagaaggagctggacagagaggtgtacccctggtacaacctgaccgtggaggccaaggagctggacagcaccggcacccccaccggcaaggagagcatcgtgcaggtgcacatcgaggtgctggacgagaacgacaacgcccccgagttcgccaagccctaccagcccaaggtgtgcgagaacgccgtgcacggccagctggtgctgcagatcagcgccatcgacaaggacatcacccccagaaacgtgaagttcaagttcatcctgaacaccgagaacaacttcaccctgaccgacaaccacgacaacaccgccaacatcaccgtgaagtacggccagttcgacagagagcacaccaaggtgcacttcctgcccgtggtgatcagcgacaacggcatgcccagcagaaccggcaccagcaccctgaccgtggccgtgtgcaagtgcaacgagcagggcgagttcaccttctgcgaggacatggccgcccaggtgggcgtgagcatccaggccgtggtggccatcctgctgtgcatcctgaccatcaccgtgatcaccctgctgatcttcctgagaagaagactgagaaagcaggccagagcccacggcaagagcgtgcccgagatccacgagcagctggtgacctacgacgaggagggcggcggcgagatggacaccaccagctacgacgtgagcgtgctgaacagcgtgagaagaggcggcgccaagccccccagacccgccctggacgccagacccagcctgtacgcccaggtgcagaagccccccagacacgcccccggcgcccacggcggccccggcgagatggccgccatgatcgaggtgaagaaggacgaggccgaccacgacggcgacggccccccctacgacaccctgcacatctacggctacgagggcagcgagagcatcgccgagagcctgagcagcctgggcaccgacagcagcgacagcgacgtggactacgacttcctgaacgactggggccccagattcaagatgctggccgagctgtacggcagcgaccccagagaggagctgctgtactag

SEQ ID NO: 121106 - protein, 799 aa, Artificial Sequence
  derived and/or modified sequence
MPERLAEMLLDLWTPLIILWITLPPCIYMAPMNQSQVLMSGSPLELNSLGEEQRILNRSKRGWVWNQMFVLEEFSGPEPILVGRLHTDLDPGSKKIKYILSGDGAGTIFQINDVTGDIHAIKRLDREEKAEYTLTAQAVDWETSKPLEPPSEFIIKVQDINDNAPEFLNGPYHATVPEMSILGTSVTNVTATDADDPVYGNSAKLVYSILEGQPYFSIEPETAIIKTALPNMDREAKEEYLVVIQAKDMGGHSGGLSGTTTLTVTLTDVNDNPPKFAQSLYHFSVPEDVVLGTAIGRVKANDQDIGENAQSSYDIIDGDGTALFEITSDAQAQDGIIRLRKPLDFETKKSYTLKVEAANVHIDPRFSGRGPFKDTATVKIVVEDADEPPVFSSPTYLLEVHENAALNSVIGQVTARDPDITSSPIRFSIDRHTDLERQFNINADDGKITLATPLDRELSVWHNITIIATEIRNHSQISRVPVAIKVLDVNDNAPEFASEYEAFLCENGKPGQVIQTVSAMDKDDPKNGHYFLYSLLPEMVNNPNFTIKKNEDNSLSILAKHNGFNRQKQEVYLLPIIISDSGNPPLSSTSTLTIRVCGCSNDGVVQSCNVEAYVLPIGLSMGALIAILACIILLLVIVVLFVTLRRHKNEPLIIKDDEDVRENIIRYDDEGGGEEDTEAFDIATLQNPDGINGFLPRKDIKPDLQFMPRQGLAPVPNGVDVDEFINVRLHEADNDPTAPPYDSIQIYGYEGRGSVAGSLSSLESTTSDSDQNFDYLSDWGPRFKRLGELYSVGESDKET

SEQ ID NO: 121107 - DNA, 2400 bp, Artificial Sequence
  derived and/or modified sequence
atgcccgaaagacttgcagagatgcttttggacctgtggacccctctgattattctctggattaccctcccgccatgcatatacatggcaccaatgaaccagagtcaggtcttaatgagcggttcgcccctggaattaaacagtctgggagaggagcagaggattctgaacagatccaaacgaggctgggtgtggaatcagatgtttgtcctggaggagttcagcggtcccgaaccaattctggtcggcagattacacacggatctcgaccccggctcaaagaagattaagtacatccttagcggggacggagccgggaccatattccagatcaacgacgtaacaggagatattcatgcgatcaaacgtctggaccgcgaggaaaaagcggagtacacccttacagctcaggccgtggattgggagaccagcaaacctttagagccacccagcgagttcattattaaagtccaggacatcaatgacaatgctcctgaatttcttaatggcccgtaccacgccaccgttcctgagatgtcgatcctaggcacatcagtgactaacgtgacagctaccgatgctgatgacccggtatacggcaactcggccaaacttgtgtactctattctagaaggccaaccttatttctctatcgaaccagagactgcaattattaagaccgccctaccaaacatggatcgtgaagccaaagaagagtatctggtggtcatccaggccaaggacatgggaggccactctgggggtcttagcggcacaactactctgacagtgactctgaccgacgtgaacgacaaccctccaaagtttgcccagtccctctaccatttttccgtgccagaggatgtcgtcctaggcactgcaattggacgtgtgaaagccaatgaccaagacatcggtgaaaacgcacagagcagctacgacataatcgacggggatggcacagcgcttttcgaaattacctctgacgcccaggcccaggatggaattatacggctgaggaaaccgctggacttcgaaaccaaaaagtcttacacactaaaagtggaagcggcaaatgtgcacatcgatcccaggttttccggcaggggaccattcaaggacaccgccaccgtgaaaatagtggtggaggatgccgacgagcctcctgtgttctcctccccaacgtacctgctggaggtgcacgaaaatgccgctctgaactccgtcatcgggcaagtgaccgctagagatcccgacatcacatcctctcccattagattctccattgataggcatactgatctggaacggcagttcaatatcaatgctgatgacggaaagatcacactggcaacaccattagatcgggagttgtcggtctggcataatatcacaataattgcaaccgagattcggaatcactcacagatttctcgagtgccggtcgctataaaggtcttagacgtgaatgataacgcccccgagtttgcaagtgaatacgaagcctttctttgcgagaatggaaaacccggacaagtgatccagaccgtgagcgctatggacaaggacgaccctaagaacggacactacttcctgtatagcctgttgcccgaaatggtgaacaatccgaatttcaccataaaaaagaacgaagataacagtctgagcattctcgccaaacacaatggtttcaaccgccagaagcaagaggtgtatctacttcctatcatcatatccgatagtggcaatccgcctctgtccagtacaagcactctcaccataagggtgtgcgggtgctctaatgacggtgttgtgcagtcctgcaacgttgaggcctacgtgctgccaattggtttgtctatgggagcgttgattgccatccttgcttgtatcatcctcctgctggtaattgtggtcctcttcgtcacactgaggcgacacaaaaatgaaccactcattataaaggatgatgaagacgtacgggaaaacattatcaggtacgacgacgaagggggcggggaggaagatacggaagcctttgacatcgcaacattacaaaacccagacggaatcaacggctttctgccacgcaaagacattaaacccgatttgcagttcatgccccgtcagggcttggccccggtccccaacggagtcgacgtggatgaatttatcaatgtccgactgcacgaagcagataatgatcctacagcgccaccatacgactccattcagatctatgggtatgaggggagagggtcagtagctggatccttatcctctctggaatcgaccactagcgacagcgatcagaacttcgactacctttccgattggggcccacggttcaagagactcggggagctctatagcgttggcgagagcgataaggagacctag

SEQ ID NO: 121108 - DNA, 2400 bp, Artificial Sequence
  derived and/or modified sequence
atgcccgaaaggttggctgagatgttactggacctgtggactcctctgatcatcctctggataacactacccccttgcatctatatggcacctatgaatcaaagtcaggttctcatgtccggatccccactggagctgaactccctgggcgaggaacagcggattttgaatcggagcaaacgtggctgggtgtggaatcagatgttcgtccttgaggaattttccggtcctgagcccatactcgtggggcgcttgcacaccgacctggatccaggatctaagaagatcaaatatatactgtccggcgacggtgcaggcaccatcttccagattaacgacgtcacaggggatattcacgcaattaaaaggttggacagggaagagaaggcagagtacaccctcacagctcaggccgttgattgggaaaccagcaagcccctcgagccaccatctgagtttattatcaaagtgcaagacatcaacgataacgcacccgagtttctgaacggtccctaccacgccacagtgccagaaatgtctattctaggtaccagcgtaacaaacgtaacagccaccgacgcagatgaccccgtatatggcaattccgctaaactggtctatagcattctggagggccagccctatttttccatagagcccgaaaccgccataatcaagacggcactcccaaacatggaccgggaggctaaggaggagtacctcgtagtgatccaggccaaggacatgggaggccactctggcggcttgtccggtacaaccactctgaccgtgactctgacagatgtaaacgataatccaccaaagtttgcgcagagtctgtaccatttctccgtccccgaggacgtagtgctaggaactgctattggccgcgtcaaggcgaacgaccaagatataggcgagaacgctcagagttcctacgatattattgatggagacggaactgcgctattcgaaataacttcggacgcacaggcacaggacgggattattaggctacgcaagcctcttgacttcgagaccaaaaaaagctacaccttgaaagttgaggctgcgaatgttcacattgatcctaggttttcaggacggggacccttcaaagacacggcaaccgttaagattgttgtcgaagacgccgacgaaccgccagttttcagcagtcccacctatttgctggaagttcacgagaatgcagccctcaatagtgtgatcggccaggtgaccgctagggatccagacatcacgagtagccctatcagattttctattgatcggcataccgatcttgaaaggcagttcaacataaacgcggatgatggtaaaatcacactagcgacgcctctggacagggagctgtcagtgtggcataacatcacaatcatcgctacagaaatacgtaaccattctcagatcagcagggtgcccgtcgccattaaagtcctcgacgtcaacgataatgcaccagaatttgcctctgagtacgaagctttcctgtgtgaaaacggaaagcccgggcaggtcatccagacagtgagtgccatggacaaggatgatcctaaaaatggacactactttctttacagcctgctacccgaaatggtcaataaccctaattttacaattaagaaaaacgaggacaactctctgagcatactcgcgaaacacaacggctttaaccgccaaaaacaggaggtgtacctcttaccgataattatcagtgatagcgggaatccgccactgagctctacgagcacattgaccatccgggtgtgtggttgtagcaatgacggggtcgtccagagctgtaatgtggaagcgtatgtcctgcccattggattatccatgggggctttgatagcaatcttggcctgtataattctgttactggtgattgtggttctgtttgttacacttcgccgacacaaaaatgagcctctgataatcaaggacgatgaggatgtgagggaaaatataattcgctatgatgatgaaggaggcggggaggaagacacagaagcctttgacattgccacactgcaaaatccggacggcattaatgggtttcttcccaggaaagacatcaagccagatctgcaattcatgcctaggcaaggccttgcccctgtgcctaacggagtggacgttgacgagttcattaatgtgcggctccacgaggctgacaacgatcccaccgctcccccttacgactcaatacagatttacggttacgagggtagaggttctgtggccgggtcactcagctccctcgagtctaccacatcggatagcgaccagaacttcgattacctgtccgactgggggcctagattcaagcgtctgggtgagctgtactctgtgggggaaagtgacaaagagacttag

SEQ ID NO: 121109 - DNA, 2400 bp, Artificial Sequence
  derived and/or modified sequence
atgcctgagcggctggccgagatgctgctggacctgtggacccccctcatcatcctgtggatcaccctgcccccctgcatctacatggcccccatgaaccagagccaggtgctgatgagcggcagccccctggagctgaacagcctgggggaggagcagaggatcctgaacagaagcaagaggggctgggtgtggaaccagatgtttgtgctggaggagttcagcggccctgagcccatcctggtgggccgcctgcacacagacctggaccccggcagcaagaagatcaagtacatcctgtctggagatggagctggcaccatcttccagatcaatgatgtgactggagacatccacgccatcaagaggctggaccgggaggagaaggccgagtacaccctgacagcccaggccgtggactgggagaccagcaagcccctggagcccccatctgagttcatcatcaaggtgcaggacatcaatgacaatgcccctgagttcctgaatggcccctaccacgccaccgtgcctgagatgagcatcctgggcacctctgtgaccaacgtgacagccacagatgctgatgatcctgtgtatggcaacagcgccaagctggtgtacagcatcctggagggccagccctacttcagcattgagcctgagacagccatcatcaagacagccctgcccaacatggaccgggaggccaaggaggagtacctggtggtgatccaggccaaggacatgggcggccacagcggcggcctgagcggcaccaccaccctgactgtgaccctgacagatgtgaatgacaacccccccaagtttgcccagagcctgtaccacttctctgtgcctgaagatgtggtgctgggcacagccatcggccgggtgaaggccaatgaccaggacattggagaaaatgcccagagcagctatgacatcattgatggagatggaacagccctgtttgagatcaccagtgatgcccaggcccaggacggcatcatccggctgaggaagcccctggactttgagaccaagaagagctacaccctgaaggtggaggccgccaacgtgcacatcgacccccgcttcagcggccggggccccttcaaggacacagccaccgtgaagatcgtggtggaggatgctgatgagccccctgtgttcagcagccccacctacctgctggaggtgcatgaaaatgctgccctgaacagcgtcatcggccaggtgacagcccgggaccctgacatcaccagcagccccatccgcttcagcattgacagacacacagacctggagcggcagttcaacatcaatgctgatgatggcaagatcaccctggccacccccctggaccgggagctgtctgtgtggcacaacatcaccatcatcgccacagagatccggaaccacagccagatcagccgggtgcctgtggccatcaaggtgctggatgtgaatgacaatgcccctgagtttgcctctgaatatgaggccttcctgtgtgaaaatggcaagccaggccaggtgatccagacagtgtctgccatggacaaggatgaccccaagaatggccactacttcctgtacagcctgctgcctgagatggtgaacaaccccaacttcaccatcaagaagaatgaagacaacagcctgagcatcctggccaagcacaacggcttcaaccggcagaagcaggaggtgtacctgctgcccatcatcatcagtgacagcggcaacccccccctgagcagcaccagcaccctgaccatccgggtgtgtggctgcagcaatgatggagtggtgcagagctgcaatgtggaggcctacgtgctgcccatcggcctgtccatgggcgccctgattgccatcctggcctgcatcatcctgctgctggtgattgtggtgctgtttgtgaccctgcggcggcacaagaatgagcccctcatcatcaaggatgatgaagatgtgcgggagaacatcatccgctatgatgatgaaggaggaggagaggaggacacagaggcctttgacatcgccaccctgcagaacccagatggcatcaatggcttcctgcccaggaaggacatcaagccagacctgcagttcatgccccggcagggcctggcccctgtgcccaatggagtggatgtggatgagttcatcaacgtgcggctgcacgaggccgacaatgaccccacagccccaccctatgacagcatccagatctacggctatgagggccggggctctgtggccggcagcctgagcagcctggagagcaccaccagtgacagcgaccagaactttgactacctgagtgactggggcccccgcttcaagaggctgggggagctgtacagcgtgggggagagtgacaaggagacctag

SEQ ID NO: 121110 - DNA, 2400 bp, Artificial Sequence
  derived and/or modified sequence
atgcccgagcggctggccgagatgctgctggacctgtggacccccctgatcatactgtggattaccctaccaccatgcatctacatggcacccatgaaccagtcccaggtcttgatgtcaggctcgcctctggagctgaattctctgggtgaggagcagaggattctgaatcgatctaagcgcggttgggtctggaaccaaatgtttgtacttgaggagttctctggcccagaacctatacttgtgggccgcttgcacacggatctggatcctggcagcaagaaaatcaagtacatcctgtcaggggacggagctgggacaattttccagataaacgatgtaactggcgacatacatgccatcaagcggctggatagggaggaaaaggcagaatatactcttaccgcacaggccgttgactgggaaacgtccaaacctctcgagccccctagtgagtttatcatcaaagtgcaggatattaacgacaacgccccagaatttctaaacggcccatatcacgcaacagttcctgagatgtctatcctggggacctctgtgactaacgtcacggcgactgacgcggatgatcccgtctacgggaacagcgctaagttggtgtatagtatcctggaggggcagccttatttcagcatcgagccagaaacggctatcattaagacagcattgcccaatatggatagagaggctaaggaggaatatctggtagtaatccaggctaaggacatgggtgggcactctggtggccttagcggaaccacaaccttaaccgtgacgctgacagacgtcaatgataatccccccaaatttgcacagtctctgtaccacttctccgtcccggaagacgtggtgttgggaacggctattggccgagtcaaggcaaatgatcaggatattggtgagaacgcccagagcagctacgatataatcgacggcgatgggaccgccctcttcgaaatcacgtctgacgcacaagcccaggacggcattattcgtctccgcaaacccttagattttgagacaaaaaagtcatatacattgaaggttgaggctgcaaatgtacatatagatcccagattttcaggaagggggccatttaaggatacagctaccgtcaagatagtagtggaggacgccgacgaacctccagtgttttccagccctacttatttgctggaagtgcacgagaatgcagctctcaactccgtcatcggtcaggtaaccgcaagagaccccgatatcacctccagccccatcagattctccatagacaggcacactgacctggagcggcagtttaatattaacgccgacgacgggaagataactctcgcaaccccactggacagggagctttcagtttggcacaatatcaccattatcgcaacagaaataagaaaccacagccagatatctcgcgtgccagtggcaatcaaggtcctggacgttaacgacaatgccccagaatttgcttctgaatacgaagcattcctctgtgaaaatgggaagcccgggcaggtgattcaaaccgtttcggcaatggacaaggatgatcctaagaacggccattactttctttatagcctgctccctgagatggtcaacaacccaaattttacgatcaaaaagaatgaagataacagcctgtcaatattggccaaacacaatgggtttaaccgacaaaagcaggaagtgtatcttctgccaatcattatctcagattccggaaacccccctctctcatctacttctacactcacaattcgggtgtgtgggtgtagcaacgacggcgttgtacaatcctgcaatgtcgaggcctatgtgctccccatcgggctgtccatgggcgcgctaatcgcaattctggcatgcattatcctgctcctggttattgtggtgctatttgtaaccctccggaggcacaaaaatgaacccctcatcatcaaagacgacgaggacgtgagggaaaacatcattaggtacgatgatgaaggcggcggggaggaagatacggaagctttcgatatagcgacactccaaaaccccgacgggattaatggttttttaccccggaaggatattaaacctgacctccagttcatgcccagacaagggctggcccccgtgccaaatggtgtcgatgtcgatgagtttatcaatgtccggctgcacgaagcagacaacgatccaaccgctccaccctacgactcgattcaaatctatggctacgagggacggggctcggtcgccggaagcctttcaagcctggagtccacgacatcggactcagatcagaactttgattacttaagcgattggggccctagatttaagagactaggagagttgtacagcgtgggggagagcgacaaggagacttag

SEQ ID NO: 121111 - DNA, 2400 bp, Artificial Sequence
  derived and/or modified sequence
atgcccgagcggctggccgagatgctgctggacctgtggacccccttgattatcctttggattactttaccaccctgcatatatatggcacccatgaatcaaagccaagtgttgatgagcggaagcccactggagttgaattccttaggcgaggaacagagaattcttaacaggagtaaacgcggttgggtgtggaaccagatgttcgtgctagaagagttctcaggcccagagccgatcttggtgggccgactgcatactgatctggatccgggctctaagaagataaagtacatcttatcaggagacggcgcagggacaatatttcagattaacgacgtgacaggggatatccacgcgatcaaacgactcgatcgggaagaaaaggctgagtacacactgactgcgcaggcagtagactgggaaaccagcaagccattagagcccccgtcggaatttatcatcaaggtgcaagatattaacgacaacgcacctgagtttttgaatgggccttatcatgctactgttcctgaaatgtcgattctcggcacttccgtcacaaacgttactgcaacggatgcagatgaccctgtctacgggaacagcgcaaaactcgtgtacagcattcttgagggccagccatatttctccatagagcctgagaccgctataatcaagacagcactgcctaatatggaccgcgaggccaaggaggagtacctcgtcgtgattcaagctaaagacatggggggacattccggaggactcagcggtactactaccctgacagtgacgctaaccgatgtgaacgacaacccacctaagttcgctcagtccttataccacttttccgtgcccgaagacgttgtgcttggcaccgcaattggaagagtgaaagctaacgaccaagacattggtgaaaacgctcaatcttcttatgacatcattgacggagacggtacggctttgttcgagatcacctcagacgctcaggctcaggatggcataatcaggttgaggaaaccactggactttgagactaagaagtcatacacgctgaaagtggaggccgcaaacgtccatatcgatccaagattctctggacggggccctttcaaggacacagcgacggtgaagattgtagttgaagacgcagatgagccaccagtgttttcctcccctacatatctcttggaagttcatgagaacgctgctctgaatagtgttattgggcaagtcacagccagggaccctgacataacgagctcaccaattcgttttagtatcgaccggcacacagatttggaaaggcagttcaacattaatgcggacgatggtaagatcacactggcaaccccgttggacagagaactgagtgtgtggcacaacatcactattattgctacagagataagaaaccatagccagatctctcgtgtgccagtcgcgattaaggtccttgatgtgaacgataatgcccccgaattcgcatctgagtatgaggcattcttgtgtgaaaacggtaagccagggcaagtcatccagactgtcagcgcgatggacaaagacgaccccaaaaatggccattatttcctgtacagcctcctgcctgagatggtcaacaaccctaatttcactatcaaaaagaatgaggacaattcactgtcaattctggccaaacataacggcttcaatcgtcagaagcaggaggtgtacctgctcccaattataatctctgacagtggtaatccacccctctcctctacttctacattgaccataagggtgtgcggatgttccaacgacggtgtggtgcagtcctgtaacgtggaggcatacgtgttgcctatagggctatctatgggagctctgatagctatcctggcatgtatcatcctactcctggtgattgtggttctattcgtgacattacggcggcacaaaaatgaacccctcatcatcaaagacgatgaagatgtgcgggagaacataatccgatacgatgatgaagggggaggagaggaggacacagaagcctttgatatagccactctccagaatcccgacggcatcaacggattcttgccgcgcaaggacatcaaacctgacctccaattcatgcctcgccaagggctggccccagtgccaaatggcgtggacgtcgacgagttcatcaatgtgaggctgcatgaggctgataacgatccaacggcaccgccgtacgattcaatccagatatatggctatgaaggcaggggcagtgtcgctgggtctctgagctcgttggaatctacgacgagcgacagcgatcagaattttgattatctctcagattggggcccgcgctttaaacgcctgggggagttatatagcgtgggagagagcgataaggagacatag

SEQ ID NO: 121112 - DNA, 2400 bp, Artificial Sequence
  derived and/or modified sequence
atgcccgagcgcctggctgagatgctactcgacctctggacacctctcatcatcctgtggatcacccttccaccttgcatatacatggcacctatgaatcagagtcaggtgctcatgagtggatctccactggagctaaacagcctgggagaagagcagcggatcctgaacagaagtaagagaggctgggtgtggaatcagatgttcgtactggaagagttctcagggccagaacctatccttgttgggagactccataccgatctggatccagggtcaaaaaaaatcaagtacatcctcagtggcgacggcgcaggcacaatatttcagatcaatgacgtcacaggcgacatccacgcaattaaaaggctcgatagagaggaaaaggcagagtacaccctgaccgcccaggccgtggactgggaaacaagcaagcccctggagcctccttccgaatttatcatcaaagtgcaggacatcaacgacaatgccccagaattcttgaatgggccttatcacgccaccgtgccagaaatgtcgattttggggacgtccgtaaccaacgtaactgctacagatgccgacgatccggtgtacgggaacagcgccaaactcgtgtatagcatacttgaagggcagccctatttcagcatagagcccgagactgcaattataaagaccgctttaccaaacatggatcgtgaggctaaagaggagtatctcgttgttattcaggctaaggacatgggtggccattctggtggcttaagcggaacaacaacgctgacagtcacactaaccgacgttaacgacaatcctcctaaatttgcgcagtctctgtatcacttctccgttccagaggacgttgtcctgggaacggctatcggccgagtcaaggcgaacgaccaagatataggcgaaaacgcacagtccagttatgacatcatcgatggtgacggcacagcgcttttcgagattacgtccgatgcgcaggcccaggatggaattatccgactgcggaaaccactagactttgagaccaaaaagagctacaccctgaaggttgaagccgctaatgtacatatcgatcccaggtttagcggacggggacctttcaaggataccgctaccgtaaaaatcgtggtggaggacgccgatgagccccctgtgttcagctctccaacctacctgctggaagtgcacgaaaatgcggctctgaatagcgtgattggccaggtgactgctagggaccccgacataacctcttctcctataaggttttccatcgatcgccatactgatctcgagaggcagttcaatattaacgctgacgatggcaaaataactcttgccacgcccctggatagagaactgagcgtttggcataacattacaatcatagcaacagaaatccggaatcactcccagatcagtagggttcccgttgctataaaagtgttagacgtgaatgacaacgcacctgaatttgcttccgagtacgaggccttcctctgtgagaacggcaaacctggacaggtgatccagactgtgtcagccatggacaaagatgaccctaagaacggtcattatttcttgtactctcttctgcctgagatggtgaataacccaaactttaccatcaagaagaatgaagataattcattaagcatcttagccaagcacaacgggtttaatcgtcagaagcaggaagtgtatttactcccaatcattatctccgacagcggtaaccctcctctttcatccacgagcacacttacgataagagtgtgtgggtgtagcaacgacggcgttgtccaaagttgtaatgtagaagcttatgtgctgcctatcgggttgtcgatgggagctcttatcgcaatcctcgcgtgcatcattttgcttctcgtgattgtcgttctctttgtgactttgagacgacacaaaaatgagccccttatcatcaaggacgatgaagacgttagggagaatatcataaggtatgacgatgagggcggaggagaagaagataccgaggccttcgacatcgctactttgcaaaaccccgacggaatcaacgggtttctgcctcgaaaggatattaaaccagatctgcagttcatgccccgtcaagggctagctcccgtcccaaatggcgtggatgtcgatgagttcataaatgtgagactgcacgaagcggataatgaccccacagcaccaccctacgactccatacagatttatgggtacgagggcagaggaagcgtggcaggcagtctctcaagtttggagagcactacttccgattctgatcagaacttcgattacttgtcagattggggtcccagattcaagaggctaggcgaactgtatagcgtgggagagtccgacaaggaaacttag

SEQ ID NO: 121113 - DNA, 2400 bp, Artificial Sequence
  derived and/or modified sequence
atgccagagaggctagccgagatgctgctggacttgtggaccccactaatcattctctggatcaccctccctccttgcatttatatggcacccatgaatcagagtcaggttctcatgagcggatctcccctggaattaaacagcctcggcgaagagcagcggattctcaaccgcagtaagcgagggtgggtgtggaaccagatgtttgttctcgaggaattttcagggccagagcccatcttggtgggtcgcctccatacggacttagatccaggatcaaaaaagatcaagtatatcttgagcggagatggggcaggaacgatcttccaaatcaacgatgtcacaggggacattcacgctatcaagcggctggacagagaggaaaaagcagagtacactctcacggcccaagctgtagattgggaaacgtcaaaaccactggaaccccctagcgagttcattataaaggttcaggacatcaatgacaatgcccctgagttcctgaacggaccctaccacgctacggtccccgaaatgagtatactgggcacttctgtcacaaacgttactgcaacagacgccgacgaccccgtgtacggtaactctgcaaaactggtttattctatcctggagggccaaccatactttagtattgaaccggaaaccgctattattaaaacagccctgcccaacatggatcgtgaagctaaagaagagtatcttgtagttatacaggctaaagacatggggggacacagtggcggactgagcggaacaacaaccctgacagtgacattaacggacgtgaacgacaaccctcccaagttcgcccagagcctctatcacttcagcgtgccagaggatgtggttctcggtacagcaatcgggagggtgaaagcgaacgaccaggacattggcgaaaatgcccagtcctcatatgatataattgacggcgacgggactgccttgtttgagattactagcgacgcccaagcacaggatgggatcatcaggctgagaaaacccctggacttcgaaactaagaagagctacactctgaaagtggaggccgctaatgtgcatatcgaccctagattctccgggaggggaccgtttaaagacacggccaccgtcaagattgtcgtggaggacgccgatgaacctccagttttctcatctcctacctacctgctcgaggtgcacgagaatgcggcattgaacagtgtgatcgggcaggtgacagctcgggatcccgatatcacatccagcccgatacgcttttctatcgacagacataccgatctggaacggcagttcaatatcaatgccgatgacgggaaaataactctggccacgccattggacagggagctgtccgtgtggcacaatataacgataatcgcaactgagatccgcaatcactcccagatttcaagagtgcccgtggccatcaaggtgcttgacgttaatgataatgcacccgaattcgcatccgaatacgaggctttcttgtgcgagaatggcaagcctgggcaggtaatccagaccgtctctgccatggataaggatgatccaaagaatggccactatttcttgtactctctgctgcccgagatggtgaataatcccaattttacaattaaaaagaatgaggataattcccttagtatcctcgcaaagcacaacggattcaataggcagaagcaagaggtttacttgctccctataattatctccgattctgggaaccctcccctgtccagtacctcaactttaaccattcgggtgtgcggctgttctaacgacggagttgtccagagttgtaacgtagaggcttacgtgctgccgatcggcctgagtatgggcgcactgatcgcaatactggcctgtatcatcctgctgctggttattgttgttctttttgtcactcttaggaggcacaagaatgagccactgattatcaaggatgacgaggatgttagggaaaatataatcaggtatgacgatgaggggggaggcgaggaggataccgaggcttttgatatcgctacacttcagaacccagatggcatcaacggctttttgcctcggaaagacataaaacctgacttacaattcatgcctcggcagggcctggcgcctgtgccaaatggggtggatgttgacgaattcataaatgtccgcctgcacgaggccgacaacgatcctacagctccaccctacgactcaattcagatatacggatatgagggcaggggatctgtggcgggatccctgagctctctcgagtctactacatcagatagcgaccagaattttgattacctctccgactggggaccacggtttaagagactcggggagctgtacagcgtgggcgaaagtgacaaagaaacatag

SEQ ID NO: 121114 - DNA, 9721 bp, Artificial Sequence
  derived and/or modified sequence
aacataacgccagccccagagctcaggtgagacctctagagagaaagctcgcaggtacctcatccgcatgctgttattatctgccagcccacttatccaggagctcggtcctcagcgggctgcgcgcaccgcgcggaagggcgcatcttcacctcgtggctctggcggcagagacgcgcggggcttgctcgggagcgaggagcgaaaagttgtgcgcccacttgggtagggggaaagagagcgatcgagccagcgcgggagagcgaagggggaaggcggggagggggcggggaggggggactgcttacatgaatttccaagtggtagacctgcctctgcgctctgcccaatgagatccgtcaggggaggcacccggctcacttttccacatcacttcacagttacatttggcaggcaggcgggctcgcacgccggagcgctcagcccagaattagtggatttatttggaatctccctgcctcctccaagctccgccgccgccgccggcttgtgcatagacggtagcgtcaagacaccagctgcactttgggttgcggacacccagagcccagcgcgcccgccctgcgtctccgcaccaagccctgtagctccgagaggcatgaacggaatccggaggcgcctgcctagcgagcgaggaccggtcggcgcttgccgccctcgggagctaaccccgagcacctccagccatttgtgaacctggaggcttgacattcgccagcgcagggccccacaagagaaatttcaatgaaaagaaaagccaatggattgtggtcttagaaaagctgcttagatgatgtctgtttcccgtgctatagacacgtggcagagctgtaagtaaatgctcggcactgcatgatgaattggatggctgcagaccggagacaaaaaaaataattgtctcattttcgtggtgatttgcttaactggtgggaccatgccagaacggctagcggaaatgctcttggatctctggactccattaataatattatggattactcttcccccttgcatttacatggctccgatgaatcagtctcaagttttaatgagtggatcccctttggaactaaacagtctgggtgaagaacagcgaattttgaaccgctccaaaagaggctgggtttggaatcaaatgtttgtcctggaagagttttctggacctgaaccgattcttgttggccggctacacacagacctggatcctgggagcaaaaaaatcaagtatatcctatcaggtgatggagctgggaccatatttcaaataaatgatgtaactggagatatccatgctataaaaagacttgaccgggaggaaaaggctgagtataccctaacagctcaagcagtggactgggagacaagcaaacctctggagcctccttctgaatttattattaaagttcaagacatcaatgacaatgcaccagagtttcttaatggaccctatcatgctactgtgccagaaatgtccattttgggtacatctgtcactaacgtcactgcgaccgacgctgatgacccagtttatggaaacagtgcaaagttggtttatagtatattggaagggcagccttatttttccattgagcctgaaacagctattataaaaactgcccttcccaacatggacagagaagccaaggaggagtacctggttgttatccaagccaaagatatgggtggacactctggtggcctgtctgggaccacgacacttacagtgactcttactgatgttaatgacaatcctccaaaatttgcacagagcctgtatcacttctcagtaccggaagatgtggttcttggcactgcaataggaagggtgaaggccaatgatcaggatattggtgaaaatgcacagtcatcatatgatatcatcgatggagatggaacagcactttttgaaatcacttctgatgcccaggcccaggatggcattataaggctaagaaaacctctggactttgagaccaaaaaatcctatacgctaaaggtagaggcagccaatgtccatattgacccacgcttcagtggcagggggccctttaaagacacggcgacagtcaaaatcgtggttgaagatgctgatgagcctccggtcttctcttcaccgacttacctacttgaagttcatgaaaatgctgctctaaactccgtgattgggcaagtgactgctcgtgaccctgatatcacttccagtcctataaggttttccatcgaccggcacactgacctggagaggcagttcaacattaatgcagacgatgggaagataacgctggcaacaccacttgacagagaattaagtgtatggcacaacataacaatcattgctactgaaattaggaaccacagtcagatatcacgagtacctgttgctattaaagtgctggatgtcaatgacaacgcccctgaattcgcatccgaatatgaggcatttttatgtgaaaatggaaaacccggccaagtcattcaaactgttagcgccatggacaaagatgatcccaaaaacggacattatttcttatacagtctccttccagaaatggtcaacaatccgaatttcaccatcaagaaaaatgaagataattccctcagtattttggcaaagcataatggattcaaccgccagaagcaagaagtctatcttttaccaatcataatcagtgatagtggaaatcctccactgagcagcactagcaccttgacaatcagggtctgtggctgcagcaatgacggtgtcgtccagtcttgcaatgtcgaagcttatgtccttccaattggactcagtatgggcgccttaattgccatattagcatgcatcattttgctgttagtcatcgtggtgctgtttgtaactctacggcggcataaaaatgaaccattaattatcaaagatgatgaagacgttcgagaaaacatcattcgctacgatgatgaaggaggaggggaggaggacacagaggcttttgacattgcaactttacaaaatccagatggaattaatggatttttaccccgtaaggatattaaaccagatttgcagtttatgccaaggcaagggcttgctccagttccaaatggtgttgatgtcgatgaatttataaatgtaaggctgcatgaggcagataatgatcccacggccccgccatatgactccattcagatatatggctatgaaggccgagggtcagtggctggctccctcagctccttggagtccaccacatcagactcagaccagaattttgactacctcagtgactggggtccccgctttaagagactgggcgaactctactctgttggtgaaagtgacaaagaaacttgacagtggattataaataaatcactggaactgagcattctgtaatattctagggtcactccccttagatacaaccaatgtggctatttgttttagaggcaagtttagcaccagtcatctataaactcaaccacattttaatgttgaaccaaaaaaagataataaaataaaaaagtatatgttaggaggttataaatcttgtggagtgtgaattaagtatgtggagtgtctagaagtccttggatatttgatatttacctgaccaccacagacaaagattgggatcctggctaatccttagataaatggtttaaatagaggaaaaaatcataattaaaaggtgctttcttagaaaaaaaaatacggacctgcaaggaatctgctgctgatatgtgtcttctgcaaggatttttatgaatgcaaatggttttttccccttcaccaataaggatcccgccacaaatgataaagcaatacttggtctgctgtacattataactttttggagttttgagaggcctcctagattatacagtacggtgaccacacattgtacataattgttggccccactcactagagactgaatagcatctttaaatattgtgtcgagccttaaaatattcacatgttcgtaatccattccagggtggggcttgccaattcagtggtgggaggagagaaatcccattcaaacatgcttgttttctagaagcaggattcctcgttccctcctcttcatcttcttccacaaggacacaaagataaactgtatcacacagtggactacataagagacagatggttttattgctagcgcgtgaatttatttgtttaatcctcgaaataaatattttattgatgtccattaatgcttttatttattaaggtcggtaatctatagattaaggggatatatgggaaaaaactaaattatatccattaataatcctttagattgttttatataaatatatatacaatgaatgtttaatacatgtacattttgatgagatgagtatggcaggcaatattatcgaaaggagagctaatagtctctttagagtagaaagtgttattgtaactggagatggcaggaacagcatcttcccagacaaacttttggactgttttctattttgttcataatcctagtatttggtgtttttactacaagcacaaacatcctaaagtatattgattcctgtgaatatttaaactctagacttttagatacctacatcatgccctgcccaataaacatgcttcaatttacccccacagttttagagcaggaactgatttgtacataatttcactgtttacgtttttagcactcctatccctgatcttcatggtgatgcacagaatgtcttagactccaaaaaggaacagcactagaagatgtgagcatatttaatttgtaatgcaaacctgccatttaggagtagaaaatgtatgataaaactcaagtattacatgcagatcattttaattttctactttgctttaatgcaatattgtttattcactccatgtattgtattcagagaaactcctgtattgtttcctactttgtgaaatatatttttataaatacctttgttgtcattaatttttttttcaatcagtggaagatctattaacagaatcatcaactcaaactaaaattctagaatactcaaccaaatcatcccaagggtcacttttgtttgtaagactctttattatagagaaacagagaagagaaatggcttgccagtgatcacacagcaagataccagcagggacataagaggaacatggaacacctaaaggctagtccagctgtgtcatttgggtccttctggaagcagacgcattgggcagggaaaaccttcagacaagtttgcagacctaaaacttgtaacaatagagggattgggagcaggatttggcaagagagtcttagactgcagtgcggacctggcaaaatctctgccagtctgacagggggttctagagtgaaaacacatccattaaagcagtcaggctgtggtcctctgtcatctcagtcattggtgcggggctgctaagaagagaacggtttttgactcaaaagctgaacgcaccaacttctagaggccaccttcactgtgacagaaactgcatgtttaaatactatactaacaatttataactatccggtggcttaatcaactttttattgagtttctgttgctgagaataagtcatcttttatgcgtattattacggctagtgaacactttttcttgaggtcaaagggatggtccaacatgactttaaaatatactaggacttggcacagtgtctaaaacaagtgcttggtgaatgtaaattattagtagtagttgcagtaataaccaatagtaatattccaactatcttacaccttccaaaccaaggagagattattatgttttatgtatctcttgaacaccagactcatttctagtgtactttgaagtgcccaaagattatagacacacaaatatgtctaacagaataattacagtattttttaaggagtataaaatctgtatcctcaaatattggtaatcaacaggataatcttcgtacagtggtttctgtgagcaggagataatgtctgctctactagttgcccaaatatcgcctaagtattctctttgcctaggaacacagaatgaaagcttgcatctcttgctgactttctttgccaccacagtgtcagcattttgtgtttaaaagcctatttcaggtcttgtaacatagaataaagtgactaataccttgatcctaataagattgacctatacttttagagtgtcatgaattaaactaaaaatctcaggaactatctctctctttctctctttctctctctctctctctctctctctcacacacacacacacacacacacacacacacacacaacaaacaaataaaaaacacacattttgacttgaagttttactttagcaatagacttgccaggactttcccaaccaaaagatatcaataaggttcctaacattttctaagatttaagtatcccatgctcaatttgttaaataacacattttaaaaactttattgaaatgactatatttttaaagctatgtgcattgttgtctgtttcatcaacattgacatagcagaaacaagagtactctctgctaaatagagaagaatgattaagttggagccaagtgagacaaagttatctccctctgcctacctcacaattcaaggttcccacctagggaactgatgcatccctgggtgattggacacaacatgggatcaattcagcctctactctgcctatgatttgatcaaatcatattagcaaagtgtctcttaaacatccatatatgaatattaaagagtattaaggggggcatttcttaacaatatttttatgagtatagttataagtttctaaacatttataatacgatgactaaaatatgctatttttaaattcaagtgttaaccttgccacacagaattatgacttctagggtgtaaactttaaagtgaaactgttttgaaaaaaatctgcagttaagtgtatgtgtatatatagaagaaaaggaaacttagatttactggtatcaccagtgaagcaagaatgcttagaaagatacaaatgtgtctttgggagagtctgcttaatcagatgcttaaagtaagacaagtctctgcatgagacttagaaatctcctaggagcagctggattccacactgagactcaacagagttctgggctatgctgtattttggaaaaggaaaagcgggtgctgagagctaagtagccaattactctttatagccacataaggactgaaggcaagtaggcccttccaacaagttgtattatgcgatcactggctttgcagggaatctcacgaatgtataaccttctgattgcctttttgattgaaagttccatctgagatcagggcagtgtaaccagtaataagatttcaaaaaaatcccatcactggcactgtcggaaaggctgagcatgactgaaatcctatcattgtcagtcaaaaagataaggtaacagcgggcatcactataaaagctctataaatgcacaacttaaacatgaatatcaacattaaaaagaatatatatatccttatacatatatttataaatatattcatatatataaatatgcacatatatacacaattcagttactggggataatttatagttttaatttttcatctcataatctcacgcactgccaacaaattgaaattgtggctctctgttttcatgaatctaaccttgaatttgaaagaagttgaattgagggtaaagggttttaaaagcagctttttatttgtgaacagaataatggctcataatacctgggattagaattaaatatgtcacgttgtgaggctgtacttagactttttaaatgtcattgtatttttttgtggacaaaataattgtagaatatactttgcaggaaatacttttctatattttttcaatttcaatactgttttatttgctataaaaagtgtctttgcactgttactcagccaaacagtgttgaatgtattatttgcccttgtaattattgcttcttatgataattgtagaagagcatgtctttatgatctatcatttaaaaatacatttattgtcattgtagttttagtcaacacaaatttatggattacatggtatactgttgctattgaagatattctagtcctagtattttgagcacagacctagcgttatggaggacataaaatttaaaaatttcctgacttgatggactatctgaggaaaaagaattttgtctgtcacatttattgagtatctatcagtacagaaattaagctacatggttgatacagaaagattaaatacagtagcattctcaaacttattttctttatttataaaatgtacctaatcaatctcataagaactaattgttgaattttttttttatctatggataaatactatttgagtctgggtttaagtttggttgatctgacactaaatccccttaactttcaactaaacagttatctctgtaattatgagacttttgatgataagaaatagaaactaagttatatatagtgctatggaagtactgaggaggaagtaagggaccccatatgggaagactcaagaagacgtcacggtgaaattttccaaaaagatgggaactcaagaatgggtgcaacagaaatcacagcttttccaaatactaaaagggaaaattataaaaagcaccaatggcacacttttggacattcagaaagatccagaaattaggtgcttataggaaactctaggtttgccaaattgtagtgttttatggataggaaaaatgaagttcagaaacgttataaggaattttcagggttaaattacacatcaaatatgtgagagaaacagaaattacatgctggtatttggggtcatctcctgagttgtaatgttgtaagtgtttttgtatgtattctcctccttcctttatgtgtggaagtttcatctaggtctcaaggttagtaggcatttgctggtgaaaatagtgcctttgggtactatttccccaacttgagttacctgccaccatctaattcacatcttgaatgcaagtattatttcttgcaagtatccctactaatagataatagatatttctattattatccacagattacagaagagggttgctaggaggaatatcacaagatgctgtctgaagagaaagactgtggaaaaccatggcttcaatgaactcagaggtcaggaccagaaaaggaaatgagaggtcaccaaagccaaatgttaatttcttgggatttcttctgtacatgcaaagaacttcaggccatcctatgattcctcaaaaataagaggaaaattttaacaattatgctctaagatggaccatgacaatttaggagtcattgggatcaccccccaaagccaaatgttaatttcttgggatttcttctgtacatgcaaagaacttcaggccatcctatgatccctcacaaataagaggaagattttaacaattatgctctaagatggaacatgacaatttaggagtcactgggatcaccccccccacctttccaacgttactctgctttaactacaaatatgtcgaatggttttctaatttttctttaacttaacctctaaagttcgagagctgtcatctttgtcaagtctgattgttgagtatgtgaatggatgtttttggctcaatgttagagccaaaatttataaataataattatttatacataatgatattgcaaataaactttaagaaagagctttaaacataaaaa

SEQ ID NO: 121115 - DNA, 4950 bp, Artificial Sequence
  derived and/or modified sequence
aacataacgccagccccagagctcaggtgagacctctagagagaaagctcgcaggtacctcatccgcatgctgttattatctgccagcccacttatccaggagctcggtcctcagcgggctgcgcgcaccgcgcggaagggcgcatcttcacctcgtggctctggcggcagagacgcgcggggcttgctcgggagcgaggagcgaaaagttgtgcgcccacttgggtagggggaaagagagcgatcgagccagcgcgggagagcgaagggggaaggcggggagggggcggggaggggggactgcttacatgaatttccaagtggtagacctgcctctgcgctctgcccaatgagatccgtcaggggaggcacccggctcacttttccacatcacttcacagttacatttggcaggcaggcgggctcgcacgccggagcgctcagcccagaattagtggatttatttggaatctccctgcctcctccaagctccgccgccgccgccggcttgtgcatagacggtagcgtcaagacaccagctgcactttgggttgcggacacccagagcccagcgcgcccgccctgcgtctccgcaccaagccctgtagctccgagaggcatgaacggaatccggaggcgcctgcctagcgagcgaggaccggtcggcgcttgccgccctcgggagctaaccccgagcacctccagccatttgtgaacctggaggcttgacattcgccagcgcagggccccacaagagaaatttcaatgaaaagaaaagccaatggattgtggtcttagaaaagctgcttagatgatgtctgtttcccgtgctatagacacgtggcagagctgtaagtaaatgctcggcactgcatgatgaattggatggctgcagaccggagacaaaaaaaataattgtctcattttcgtggtgatttgcttaactggtgggaccatgccagaacggctagcggaaatgctcttggatctctggactccattaataatattatggattactcttcccccttgcatttacatggctccgatgaatcagtctcaagttttaatgagtggatcccctttggaactaaacagtctgggtgaagaacagcgaattttgaaccgctccaaaagaggctgggtttggaatcaaatgtttgtcctggaagagttttctggacctgaaccgattcttgttggccggctacacacagacctggatcctgggagcaaaaaaatcaagtatatcctatcaggtgatggagctgggaccatatttcaaataaatgatgtaactggagatatccatgctataaaaagacttgaccgggaggaaaaggctgagtataccctaacagctcaagcagtggactgggagacaagcaaacctctggagcctccttctgaatttattattaaagttcaagacatcaatgacaatgcaccagagtttcttaatggaccctatcatgctactgtgccagaaatgtccattttgggtacatctgtcactaacgtcactgcgaccgacgctgatgacccagtttatggaaacagtgcaaagttggtttatagtatattggaagggcagccttatttttccattgagcctgaaacagctattataaaaactgcccttcccaacatggacagagaagccaaggaggagtacctggttgttatccaagccaaagatatgggtggacactctggtggcctgtctgggaccacgacacttacagtgactcttactgatgttaatgacaatcctccaaaatttgcacagagcctgtatcacttctcagtaccggaagatgtggttcttggcactgcaataggaagggtgaaggccaatgatcaggatattggtgaaaatgcacagtcatcatatgatatcatcgatggagatggaacagcactttttgaaatcacttctgatgcccaggcccaggatggcattataaggctaagaaaacctctggactttgagaccaaaaaatcctatacgctaaaggtagaggcagccaatgtccatattgacccacgcttcagtggcagggggccctttaaagacacggcgacagtcaaaatcgtggttgaagatgctgatgagcctccggtcttctcttcaccgacttacctacttgaagttcatgaaaatgctgctctaaactccgtgattgggcaagtgactgctcgtgaccctgatatcacttccagtcctataaggttttccatcgaccggcacactgacctggagaggcagttcaacattaatgcagacgatgggaagataacgctggcaacaccacttgacagagaattaagtgtatggcacaacataacaatcattgctactgaaattaggaaccacagtcagatatcacgagtacctgttgctattaaagtgctggatgtcaatgacaacgcccctgaattcgcatccgaatatgaggcatttttatgtgaaaatggaaaacccggccaagtcattcaaactgttagcgccatggacaaagatgatcccaaaaacggacattatttcttatacagtctccttccagaaatggtcaacaatccgaatttcaccatcaagaaaaatgaagataattccctcagtattttggcaaagcataatggattcaaccgccagaagcaagaagtctatcttttaccaatcataatcagtgatagtggaaatcctccactgagcagcactagcaccttgacaatcagggtctgtggctgcagcaatgacggtgtcgtccagtcttgcaatgtcgaagcttatgtccttccaattggactcagtatgggcgccttaattgccatattagcatgcatcattttgctgttagtcatcgtggtgctgtttgtaactctacggcggcataaaaatgaaccattaattatcaaagatgatgaagacgttcgagaaaacatcattcgctacgatgatgaaggaggaggggaggaggacacagaggcttttgacattgcaactttacaaaatccagatggaattaatggatttttaccccgtaaggatattaaaccagatttgcagtttatgccaaggcaagggcttgctccagttccaaatggtgttgatgtcgatgaatttataaatgtaaggctgcatgaggcagataatgatcccacggccccgccatatgactccattcagatatatggctatgaaggccgagggtcagtggctggctccctcagctccttggagtccaccacatcagactcagaccagaattttgactacctcagtgactggggtccccgctttaagagactgggcgaactctactctgttggtgaaagtgacaaagaaacttgacagtggattataaataaatcactggaactgagcattctgtaatattctagggtcactccccttagatacaaccaatgtggctatttgttttagaggcaagtttagcaccagtcatctataaactcaaccacattttaatgttgaaccaaaaaaagataataaaataaaaaagtatatgttaggaggttataaatcttgtggagtgtgaattaagtatgtggagtgtctagaagtccttggatatttgatatttacctgaccaccacagacaaagattgggatcctggctaatccttagataaatggtttaaatagaggaaaaaatcataattaaaaggtgctttcttagaaaaaaaaatacggacctgcaaggaatctgctgctgatatgtgtcttctgcaaggatttttatgaatgcaaatggttttttccccttcaccaataaggatcccgccacaaatgataaagcaatacttggtctgctgtacattataactttttggagttttgagaggcctcctagattatacagtacggtgaccacacattgtacataattgttggccccactcactagagactgaatagcatctttaaatattgtgtcgagccttaaaatattcacatgttcgtaatccattccagggtggggcttgccaattcagtggtgggaggagagaaatcccattcaaacatgcttgttttctagaagcaggattcctcgttccctcctcttcatcttcttccacaaggacacaaagataaactgtatcacacagtggactacataagagacagatggttttattgctagcgcgtgaatttatttgtttaatcctcgaaataaatattttattgatgtccattaatgcttttatttattaaggtcggtaatctatagattaaggggatatatgggaaaaaactaaattatatccattaataatcctttagattgttttatataaatatatatacaatgaatgtttaatacatgtacattttgatgagatgagtatggcaggcaatattatcgaaaggagagctaatagtctctttagagtagaaagtgttattgtaactggagatggcaggaacagcatcttcccagacaaacttttggactgttttctattttgttcataatcctagtatttggtgtttttactacaagcacaaacatcctaaagtatattgattcctgtgaatatttaaactctagacttttagatacctacatcatgccctgcccaataaacatgcttcaatttacccccacagttttagagcaggaactgatttgtacataatttcactgtttacgtttttagcactcctatccctgatcttcatggtgatgcacagaatgtcttagactccaaaaaggaacagcactagaagatgtgagcatatttaatttgtaatgcaaacctgccatttaggagtagaaaatgtatgataaaactcaagtattacatgcagatcattttaattttctactttgctttaatgcaatattgtttattcactccatgtattgtattcagagaaactcctgtattgtttcctactttgtgaaatatatttttataaat

SEQ ID NO: 121116 - DNA, 2400 bp, Artificial Sequence
  derived and/or modified sequence
atgcccgagagactggccgagatgctgctggacctgtggacccccctgatcatcctgtggatcaccctgcccccctgcatctacatggcccccatgaaccagagccaggtgctgatgagcggcagccccctggagctgaacagcctgggcgaggagcagagaatcctgaacagaagcaagagaggctgggtgtggaaccagatgttcgtgctggaggagttcagcggccccgagcccatcctggtgggcagactgcacaccgacctggaccccggcagcaagaagatcaagtacatcctgagcggcgacggcgccggcaccatcttccagatcaacgacgtgaccggcgacatccacgccatcaagagactggacagagaggagaaggccgagtacaccctgaccgcccaggccgtggactgggagaccagcaagcccctggagccccccagcgagttcatcatcaaggtgcaggacatcaacgacaacgcccccgagttcctgaacggcccctaccacgccaccgtgcccgagatgagcatcctgggcaccagcgtgaccaacgtgaccgccaccgacgccgacgaccccgtgtacggcaacagcgccaagctggtgtacagcatcctggagggccagccctacttcagcatcgagcccgagaccgccatcatcaagaccgccctgcccaacatggacagagaggccaaggaggagtacctggtggtgatccaggccaaggacatgggcggccacagcggcggcctgagcggcaccaccaccctgaccgtgaccctgaccgacgtgaacgacaacccccccaagttcgcccagagcctgtaccacttcagcgtgcccgaggacgtggtgctgggcaccgccatcggcagagtgaaggccaacgaccaggacatcggcgagaacgcccagagcagctacgacatcatcgacggcgacggcaccgccctgttcgagatcaccagcgacgcccaggcccaggacggcatcatcagactgagaaagcccctggacttcgagaccaagaagagctacaccctgaaggtggaggccgccaacgtgcacatcgaccccagattcagcggcagaggccccttcaaggacaccgccaccgtgaagatcgtggtggaggacgccgacgagccccccgtgttcagcagccccacctacctgctggaggtgcacgagaacgccgccctgaacagcgtgatcggccaggtgaccgccagagaccccgacatcaccagcagccccatcagattcagcatcgacagacacaccgacctggagagacagttcaacatcaacgccgacgacggcaagatcaccctggccacccccctggacagagagctgagcgtgtggcacaacatcaccatcatcgccaccgagatcagaaaccacagccagatcagcagagtgcccgtggccatcaaggtgctggacgtgaacgacaacgcccccgagttcgccagcgagtacgaggccttcctgtgcgagaacggcaagcccggccaggtgatccagaccgtgagcgccatggacaaggacgaccccaagaacggccactacttcctgtacagcctgctgcccgagatggtgaacaaccccaacttcaccatcaagaagaacgaggacaacagcctgagcatcctggccaagcacaacggcttcaacagacagaagcaggaggtgtacctgctgcccatcatcatcagcgacagcggcaacccccccctgagcagcaccagcaccctgaccatcagagtgtgcggctgcagcaacgacggcgtggtgcagagctgcaacgtggaggcctacgtgctgcccatcggcctgagcatgggcgccctgatcgccatcctggcctgcatcatcctgctgctggtgatcgtggtgctgttcgtgaccctgagaagacacaagaacgagcccctgatcatcaaggacgacgaggacgtgagagagaacatcatcagatacgacgacgagggcggcggcgaggaggacaccgaggccttcgacatcgccaccctgcagaaccccgacggcatcaacggcttcctgcccagaaaggacatcaagcccgacctgcagttcatgcccagacagggcctggcccccgtgcccaacggcgtggacgtggacgagttcatcaacgtgagactgcacgaggccgacaacgaccccaccgcccccccctacgacagcatccagatctacggctacgagggcagaggcagcgtggccggcagcctgagcagcctggagagcaccaccagcgacagcgaccagaacttcgactacctgagcgactggggccccagattcaagagactgggcgagctgtacagcgtgggcgagagcgacaaggagacctag

SEQ ID NO: 121117 - protein, 796 aa, Artificial Sequence
  derived and/or modified sequence
MKENYCLQAALVCLGMLCHSHAFAPERRGHLRPSFHGHHEKGKEGQVLQRSKRGWVWNQFFVIEEYTGPDPVLVGRLHSDIDSGDGNIKYILSGEGAGTIFVIDDKSGNIHATKTLDREERAQYTLMAQAVDRDTNRPLEPPSEFIVKVQDINDNPPEFLHETYHANVPERSNVGTSVIQVTASDADDPTYGNSAKLVYSILEGQPYFSVEAQTGIIRTALPNMDREAKEEYHVVIQAKDMGGHMGGLSGTTKVTITLTDVNDNPPKFPQSVYQMSVSEAAVPGEEVGRVKAKDPDIGENGLVTYNIVDGDGMESFEITTDYETQEGVIKLKKPVDFETKRAYSLKVEAANVHIDPKFISNGPFKDTVTVKISVEDADEPPMFLAPSYIHEVQENAAAGTVVGRVHAKDPDAANSPIRYSIDRHTDLDRFFTINPEDGFIKTTKPLDREETAWLNITVFAAEIHNRHQEAKVPVAIRVLDVNDNAPKFAAPYEGFICESDQTKPLSNQPIVTISADDKDDTANGPRFIFSLPPEIIHNPNFTVRDNRDNTAGVYARRGGFSRQKQDLYLLPIVISDGGIPPMSSTNTLTIKVCGCDVNGALLSCNAEAYILNAGLSTGALIAILACIVILLVIVVLFVTLRRQKKEPLIVFEEEDVRENIITYDDEGGGEEDTEAFDIATLQNPDGINGFIPRKDIKPEYQYMPRPGLRPAPNSVDVDDFINTRIQEADNDPTAPPYDSIQIYGYEGRGSVAGSLSSLESATTDSDLDYDYLQNWGPRFKKLADLYGSKDTFDDDS

SEQ ID NO: 121118 - protein, 171 aa, Artificial Sequence
  derived and/or modified sequence
MKENYCLQAALVCLGMLCHSHAFAPERRGHLRPSFHGHHEKGKEGQVLQRSKRGWVWNQFFVIEEYTGPDPVLVGRLHSDIDSGDGNIKYILSGEGAGTIFVIDDKSGNIHATKTLDREERAQYTLMAQAVDRDTNRNSLSRSRTLMTTLRSSCTRPIMPTCLRGPMWVRT

SEQ ID NO: 121119 - protein, 779 aa, Artificial Sequence
  derived and/or modified sequence
MGPGLAARRLRPPSRAPEITVFSAQRPCDIPSCCHLLSDQSDGWSVLQKLAASIQWVKKLHSDIDSGDGNIKYILSGEGAGTIFVIDDKSGNIHATKTLDREERAQYTLMAQAVDRDTNRPLEPPSEFIVKVQDINDNPPEFLHETYHANVPERSNVGTSVIQVTASDADDPTYGNSAKLVYSILEGQPYFSVEAQTGIIRTALPNMDREAKEEYHVVIQAKDMGGHMGGLSGTTKVTITLTDVNDNPPKFPQSVYQMSVSEAAVPGEEVGRVKAKDPDIGENGLVTYNIVDGDGMESFEITTDYETQEGVIKLKKPVDFETKRAYSLKVEAANVHIDPKFISNGPFKDTVTVKISVEDADEPPMFLAPSYIHEVQENAAAGTVVGRVHAKDPDAANSPIRYSIDRHTDLDRFFTINPEDGFIKTTKPLDREETAWLNITVFAAEIHNRHQEAKVPVAIRVLDVNDNAPKFAAPYEGFICESDQTKPLSNQPIVTISADDKDDTANGPRFIFSLPPEIIHNPNFTVRDNRDNTAGVYARRGGFSRQKQDLYLLPIVISDGGIPPMSSTNTLTIKVCGCDVNGALLSCNAEAYILNAGLSTGALIAILACIVILLVIVVLFVTLRRQKKEPLIVFEEEDVRENIITYDDEGGGEEDTEAFDIATLQNPDGINGFIPRKDIKPEYQYMPRPGLRPAPNSVDVDDFINTRIQEADNDPTAPPYDSIQIYGYEGRGSVAGSLSSLESATTDSDLDYDYLQNWGPRFKKLADLYGSKDTFDDDS

SEQ ID NO: 121120 - DNA, 2391 bp, Artificial Sequence
  derived and/or modified sequence
atgaaagaaaactactgtttacaggctgctctggtttgcctcgggatgctgtgccacagtcatgcattcgcacctgagcgtaggggacatctcagaccatcttttcatggccatcacgagaaggggaaggaaggacaggtgttgcagaggtctaagagggggtgggtgtggaaccagttctttgtcattgaagagtatacaggccctgatccagtgcttgtggggaggttgcactccgatatagattccggggatggcaatatcaagtatattttgagtggggaaggcgccgggacaatcttcgtgatcgatgacaagagcgggaatatccatgcaacaaaaacgctcgaccgggaagagcgagcacagtatacactgatggcccaagccgtggatagagatacaaacagaccactcgagccaccttctgagttcatcgtgaaggtgcaggatatcaatgataacccgcccgaattcctacacgaaacttatcatgcaaacgtgccagagagaagcaatgtcgggacgtctgtaatccaggtgacagcctccgacgctgatgatcctacttatggaaattctgcaaagctagtgtatagtattctggagggacagccttattttagcgttgaagcccagacaggcatcatccgcaccgcccttcctaacatggatcgcgaagccaaggaggaatatcatgtggtgatccaggccaaagacatgggcggacatatgggggggttgagtggcaccactaaggtcactatcaccttaaccgatgttaacgacaacccacccaagttcccccagtccgtgtatcagatgtccgttagcgaggctgccgtccccggggaagaggttggcagagtgaaagccaaagatcctgatatcggtgagaatgggttagtgacttacaacatcgttgatggcgacgggatggaaagttttgagattaccacagattacgaaacgcaggagggcgtcattaagttgaagaaacccgttgattttgaaacgaagagggcctacagcctcaaagtggaagctgctaatgtgcacattgaccctaagtttatatccaacggcccgttcaaagataccgttacggtgaagattagcgtggaggatgctgatgaaccgcccatgttccttgctccctcctatatccacgaagtacaggagaatgcggccgcaggcaccgtagtcgggcgggtgcacgcgaaggatcctgacgccgccaactcgccgattagatactcgattgataggcacactgatcttgatagattcttcactatcaaccctgaagatggcttcattaaaacaactaaaccccttgatagggaggaaacagcctggctgaatattacagtattcgcagccgaaattcacaaccgccaccaggaggccaaagtgcctgtcgccattagagtccttgatgtcaatgacaatgctcccaagttcgctgctccctacgagggctttatttgtgagagcgatcagaccaagcccctgtccaaccagccaatcgtcactatttcagcggacgataaggatgataccgctaatgggccacggttcattttttcactgcctcctgagatcatccacaatccaaattttaccgtacgggacaacagggataacaccgccggtgtctacgcccgaagaggagggtttagccgccagaaacaggacctctatctgttgcctatcgtcatctccgacggcggaatccctcccatgtcctctaccaacacgctgaccatcaaagtgtgtggatgcgatgtcaacggagcactgctatcttgcaatgctgaggcatacatcctgaatgccggactgtccactggagcactgattgctatcctagcttgcattgtgatcctgctcgtgattgtcgtcttattcgttacactgagaaggcagaagaaagagcctctcatagtctttgaagaggaggatgtgcgggaaaacataattacctacgatgatgagggaggcggagaagaggatactgaggctttcgacattgctacactgcaaaatccagacggtattaatggcttcataccccgaaaagacatcaagccggagtaccagtacatgcctcgcccaggcctgagacccgcacctaattccgttgatgtggatgactttatcaatacacggattcaggaggccgacaacgatccaacagcacccccgtacgattccatacagatatacggttacgagggtcgggggtccgttgcggggtccctttcctctctggagtccgccacaacagactcagacctggactacgattacttacagaactggggccctcggttcaagaagctggccgatctttacggtagcaaagacacattcgacgacgactcatag

SEQ ID NO: 121121 - DNA, 2340 bp, Artificial Sequence
  derived and/or modified sequence
atgggacccggtctggcagccagacgacttagacccccaagtagggcgcccgagattaccgtgttctcagctcagcgcccgtgcgatatcccctcttgttgtcacctcctatcagaccaaagcgatgggtggagcgttctgcaaaagcttgctgcaagcatccagtgggttaagaagctccactctgacatcgacagtggagacggaaatattaagtacatcctgtccggagaaggagccgggactattttcgtgatcgatgacaaatccggtaacatacacgcaacaaagacactagatagagaggaaagggctcagtatactctgatggcccaagctgtcgaccgtgacaccaataggccacttgagccacccagtgagttcattgttaaagtgcaggatatcaacgacaaccccccagagtttctccacgagacgtatcatgctaatgtgccggagagatctaatgtggggactagcgttatccaagtgactgccagtgatgccgacgaccccacatacgggaactctgccaagttggtgtactccatcttggagggccagccctacttctctgttgaggctcagacaggcataattcggactgccttacccaacatggatcgggaagccaaggaagagtaccacgtggtgatacaagccaaagacatggggggacacatgggggggctcagtggaaccacgaaggttactatcacattgaccgacgtcaatgataaccctcccaagttcccacaaagcgtttatcagatgtctgtgtcggaagccgcggttccaggcgaagaagtgggacgtgtgaaagccaaagatcccgatataggggaaaacgggctggttacttacaatatcgtggatggagatggcatggagagttttgaaatcactactgattatgaaactcaggagggcgtcattaagctgaaaaagcctgtggatttcgaaactaagagggcctacagcctgaaagtggaggccgctaacgtgcatatcgaccccaaatttatttctaatgggccattcaaggatacagtgacagtgaagatctcagtagaagacgccgatgaaccgcccatgtttctggccccctcctatatccacgaggttcaagagaacgctgctgctggaaccgttgtcgggcgtgtgcacgccaaggatcctgatgccgccaatagtccaattcgatactcgatagaccgccacaccgatcttgaccgcttctttactataaacccagaagatggattcatcaaaacgactaagcctcttgacagggaggaaacagcctggttaaacataactgttttcgcagccgaaatccataatagacatcaagaagcaaaggtgcccgtggccataagggtactggatgtgaatgataacgcgcccaaattcgctgcaccttacgaagggtttatctgcgagagtgaccagacgaagccactaagtaaccagccaatcgtgactatatccgccgatgacaaagacgatacagcgaacggacctcgatttatattttctttgccccctgagattatacacaaccctaatttcaccgtccgggacaatcgcgataataccgcaggcgtgtatgccagacgcggagggttcagccgacaaaaacaggatctgtatctactgccaatcgtcattagtgatggggggattccacccatgtcgtcaaccaatactctgacgatcaaggtgtgcggctgcgacgtgaacggggcccttcttagctgtaacgcagaggcctacatcttgaatgccggactgtctactggggccctgattgccattcttgcatgcatcgtaattctcctcgtcattgtggttctcttcgtgaccctcagacgacagaagaaggagcccctgatcgtattcgaggaagaagacgtcagagaaaatatcatcacatacgacgacgaaggaggaggcgaggaagacaccgaagccttcgacatcgccacactgcagaacccagacggcattaatggattcattcccaggaaagatatcaaaccagagtaccagtacatgccacgtccaggcttgcggcccgcccccaattctgtcgatgttgatgactttattaatactagaatacaagaggcggataatgatcctaccgctccgccatacgattcgatccagatctacggctacgaaggcagaggatcggtcgctggatcactgagctccctggagtccgccacaacagacagcgacctagactatgattaccttcaaaactggggacctcgctttaaaaaactcgctgatctgtatgggagcaaagataccttcgatgacgactcctag

SEQ ID NO: 121122 - DNA, 2391 bp, Artificial Sequence
  derived and/or modified sequence
atgaaggagaactactgcctgcaggccgccctggtgtgcctgggcatgctgtgccacagccacgcctttgcccctgagcggcggggccacctgcggcccagcttccacggccaccacgagaagggcaaggagggccaggtgctgcagaggagcaagaggggctgggtgtggaaccagttctttgtgattgaggagtacacaggccctgaccctgtgctggtgggccgcctgcacagcgacattgattctggagatggcaacatcaagtacatcctgtctggagagggcgccggcaccatctttgtgattgatgacaagagcggcaacatccacgccaccaagaccctggaccgggaggagcgggcccagtacaccctgatggcccaggccgtggaccgggacaccaaccggcccctggagcccccatctgagttcatcgtgaaggtgcaggacatcaatgacaaccccccagagttcctgcacgagacctaccacgccaacgtgcctgagaggagcaatgtgggcaccagcgtcatccaggtgacagccagtgatgctgatgaccccacctacggcaacagcgccaagctggtgtacagcatcctggagggccagccctacttctctgtggaggcccagacaggcatcatcagaacagccctgcccaacatggaccgggaggccaaggaggagtaccacgtggtgatccaggccaaggacatgggcggccacatgggcggcctgagcggcaccaccaaggtgaccatcaccctgacagatgtgaatgacaacccccccaagttcccccagagcgtgtaccagatgtctgtgtctgaggccgctgtgcctggagaggaggtgggccgggtgaaggccaaggaccctgacattggagaaaatggcctggtgacctacaacatcgtggatggagatggcatggagagctttgagatcaccacagattatgagacccaggagggcgtcatcaagctgaagaagcctgtggactttgagaccaagagggcctacagcctgaaggtggaggccgccaacgtgcacatcgaccccaagttcatcagcaatggccccttcaaggacacagtgacagtgaagatctctgtggaggatgctgatgagccccccatgttcctggcccccagctacatccacgaggtgcaggagaatgctgctgctggcaccgtggtgggccgggtgcacgccaaggaccctgatgctgccaacagccccatccgctacagcattgacagacacacagacctggaccgcttcttcaccatcaacccagaagatggcttcatcaagaccaccaagcccctggaccgggaggagacagcctggctgaacatcaccgtgtttgctgctgagatccacaacagacaccaggaggccaaggtgcctgtggccatccgggtgctggatgtgaatgacaatgcccccaagtttgctgccccctatgagggcttcatctgtgagagtgaccagaccaagcccctgagcaaccagcccatcgtgaccatctctgcagatgacaaggatgacacagccaacggcccccgcttcatcttcagcctgcccccagagatcatccacaaccccaacttcaccgtgcgggacaacagagacaacacagctggggtgtatgcccggcggggcggcttcagccggcagaagcaggacctgtacctgctgcccatcgtcatcagtgatggcggcatcccccccatgagcagcaccaacaccctgaccatcaaggtgtgtggctgtgatgtgaatggagccctgctgagctgcaatgctgaggcctacatcctgaatgccggcctgagcactggagccctgattgccatcctggcctgcatcgtcatcctgctggtgattgtggtgctgtttgtgaccctgcggcggcagaagaaggagcccctgattgtgtttgaggaggaggatgtgcgggagaacatcatcacctatgatgatgaaggaggaggagaggaggacacagaggcctttgacatcgccaccctgcagaacccagatggcatcaatggcttcatccccaggaaggacatcaagccagagtaccagtacatgccccggcccggcctgcggcctgcccccaacagcgtggatgtggatgacttcatcaacacccgcatccaggaggccgacaatgaccccacagccccaccctatgacagcatccagatctacggctatgagggccggggctctgtggccggcagcctgagcagcctggagagcgccaccacagacagcgacctggactatgactacctgcagaactggggcccccgcttcaagaagctggccgacctgtatggcagcaaggacacctttgatgatgacagctag

SEQ ID NO: 121123 - DNA, 2340 bp, Artificial Sequence
  derived and/or modified sequence
atgggccctggcctggccgcccggcggctgcggccccccagccgggcccctgagatcaccgtcttcagcgcccagaggccctgtgacatccccagctgctgccacctgctgagtgaccagagtgatggctggagcgtgctgcagaagctggccgccagcatccagtgggtgaagaagctgcacagcgacatcgacagcggagatggcaacatcaagtacatcctgagcggggagggcgccggcaccatctttgtgattgatgacaagagcggcaacatccacgccaccaagaccctggaccgggaggagcgggcccagtacaccctgatggcccaggccgtggaccgggacaccaaccggcccctggagccccccagcgagttcatcgtgaaggtgcaggacatcaatgacaaccccccagagttcctgcacgagacctaccacgccaacgtgcctgagaggagcaatgtgggcaccagcgtcatccaggtgacagccagtgatgctgatgaccccacctacggcaacagcgccaagctggtgtacagcatcctggagggccagccctacttctctgtggaggcccagacaggcatcatcagaacagccctgcccaacatggaccgggaggccaaggaggagtaccacgtggtgatccaggccaaggacatgggcggccacatgggcggcctgagcggcaccaccaaggtgaccatcaccctgacagatgtgaatgacaacccccccaagttcccccagagcgtgtaccagatgtctgtgtctgaggccgctgtgcctggagaggaggtgggccgggtgaaggccaaggaccctgacatcggggagaatggcctggtgacctacaacatcgtggatggagatggcatggagagctttgagatcaccacagattatgagacccaggagggcgtcatcaagctgaagaagcctgtggactttgagaccaagagggcctacagcctgaaggtggaggccgccaacgtgcacatcgaccccaagttcatcagcaatggccccttcaaggacacagtgacagtgaagatctctgtggaggatgctgatgagccccccatgttcctggcccccagctacatccacgaggtgcaggagaatgctgctgctggcaccgtggtgggccgggtgcacgccaaggaccctgatgctgccaacagccccatccgctacagcattgacagacacacagacctggaccgcttcttcaccatcaacccagaagatggcttcatcaagaccaccaagcccctggaccgggaggagacagcctggctgaacatcaccgtgtttgctgctgagatccacaacagacaccaggaggccaaggtgcctgtggccatccgggtgctggatgtgaatgacaatgcccccaagtttgctgccccctatgagggcttcatctgtgagagtgaccagaccaagcccctgagcaaccagcccatcgtgaccatctctgcagatgacaaggatgacacagccaacggcccccgcttcatcttcagcctgcccccagagatcatccacaaccccaacttcaccgtgcgggacaacagagacaacacagctggggtgtatgccaggagaggaggcttcagccggcagaagcaggacctgtacctgctgcccatcgtcatcagtgatggcggcatcccccccatgagcagcaccaacaccctgaccatcaaggtgtgtggctgtgatgtgaatggagccctgctgagctgcaatgctgaggcctacatcctgaatgccggcctgagcactggagccctgattgccatcctggcctgcatcgtcatcctgctggtgattgtggtgctgtttgtgaccctgcggcggcagaagaaggagcccctcatcgtgtttgaggaggaggatgtgcgggagaacatcatcacctatgatgatgagggcggcggggaggaggacacagaggcctttgatattgccaccctgcagaacccagatggcatcaatggcttcatccccaggaaggacatcaagccagagtaccagtacatgcccaggcctggcctgcggcctgcccccaacagcgtggatgtggatgacttcatcaacacccgcatccaggaggccgacaatgaccccacagccccaccctatgacagcatccagatctacggctatgagggccggggctctgtggccggcagcctgagcagcctggagagcgccaccacagacagcgacctggactatgactacctgcagaactggggcccccgcttcaagaagctggccgacctgtatggcagcaaggacacctttgatgatgacagctag

SEQ ID NO: 121124 - DNA, 2391 bp, Artificial Sequence
  derived and/or modified sequence
atgaaggagaactactgcctgcaggccgccctggtgtgcctgggcatgttgtgtcacagtcacgcatttgcccctgaacgcagaggtcatctgaggccctccttccacgggcatcatgagaaaggaaaggaggggcaggtgctacagcgctccaaaaggggatgggtatggaatcagtttttcgtaattgaagagtacacaggacctgatcctgtgctggtgggacgtctacactcagatattgattcaggcgatggcaatatcaagtatattctgagcggagaaggcgccgggacaattttcgtgatcgatgacaaatctggcaatatccacgctaccaagacccttgaccgagaggagcgcgctcagtatacccttatggctcaggcggttgacagggacacaaaccggcctcttgagccaccttctgagttcatcgtgaaggtgcaggacatcaatgataatccgcctgaatttttgcatgagacttatcatgctaatgttcctgagagatctaatgtcggcacttccgtgatccaagtgactgcaagcgacgccgacgatccaacttatggcaacagcgccaagttagtctattcaattttagaggggcaaccctactttagtgtcgaagctcaaaccggaatcatacggacagctttgcctaatatggaccgtgaagctaaagaggaataccatgtggtgattcaggccaaggacatgggcgggcacatgggtgggctctccggaactactaaagtgactatcactctgacagacgtgaatgacaacccgccaaaatttccccagtcagtctatcagatgagtgtcagcgaggcagccgtgcctggagaagaagtcggaagagtgaaggcgaaagaccctgatattggggagaacgggttagtcacctataatatcgtagacggggacgggatggaaagttttgaaattacgacagattatgagacacaggagggtgtgatcaaactcaagaagccagttgactttgagactaaacgagcatacagtcttaaagtcgaggccgctaacgtgcatatcgaccccaagttcatcagtaacggccccttcaaagacacggtgaccgtcaaaatttccgtcgaagatgcagacgagccaccaatgttcctggccccaagttatatccacgaagtacaagaaaatgccgctgctggcactgtcgtgggacgcgtccacgcaaaggatccagacgccgctaacagcccgattagatacagcattgaccggcacaccgatcttgaccgtttttttactatcaatcctgaggacgggtttatcaaaaccacgaaacctcttgatagggaggaaacagcctggctcaacatcaccgtgtttgccgccgagatccacaacaggcatcaagaggccaaagtccctgtggctatccgggtactggatgttaatgataacgctccaaaattcgctgccccatacgaaggatttatctgtgagtccgaccagaccaagccgttgtccaatcagcccattgtgaccatatccgcagatgacaaagatgacaccgccaacggcccccggttcatcttttcacttcctccggaaatcattcataatcctaatttcacggtgcgggataatcgagataatacggcaggtgtgtacgccagaagaggaggattcagcagacagaaacaagatctgtacctgctgcctatcgtgatttcggatggagggattccaccgatgtcaagcacgaacaccctgacaataaaagtctgcggatgtgacgtcaatggggcactgctttcgtgtaatgcagaagcttatattctaaacgccggtctaagtaccggcgcgctgattgctatcttggcatgcatcgtgatcctgctggtaattgttgttttgtttgttacattgcgacggcagaaaaaggaacctctcatcgtgtttgaggaggaggatgtccgggagaatatcatcacttacgacgatgaaggaggtggagaggaagacaccgaggctttcgacatcgcaactctccagaacccagatgggataaatggttttattccccgaaaagatattaaacctgaatatcagtatatgccacgccctggcttgcgccctgcccctaactctgtggatgtagacgatttcatcaatactagaatacaggaggctgacaatgatcctactgcccccccatatgactcaattcaaatctatggctatgagggcagggggtcagttgctggaagccttagctctcttgagtcggctaccactgactctgacctggactacgactacctgcaaaactggggcccgaggttcaagaaactggctgacttgtacggctcaaaagatacctttgatgatgatagttag

SEQ ID NO: 121125 - DNA, 2340 bp, Artificial Sequence
  derived and/or modified sequence
atgggccccggcctggccgcccggcggctgcggccccccagccgggctccagaaattactgtttttagtgctcagcggccatgtgacatacctagttgctgccatctcctgagtgatcagtcagatgggtggtccgtcctacagaagctagcagctagtatccagtgggtcaagaagctgcactctgatattgattctggtgacggtaatattaaatacatccttagtggagaaggagctgggaccatcttcgtcatcgatgacaaaagtggcaacatccacgccaccaaaacactggatagggaagaacgggcccaatacacgctaatggcgcaggccgtggaccgcgatacaaaccgaccactcgagccacccagcgaatttattgtcaaggtgcaggacataaatgacaacccccctgaattcttacatgagacttaccatgcgaacgtgcccgaaagaagcaacgtaggcacctcggtgatccaggtgaccgcctcagacgccgacgacccgacgtacggtaatagtgctaagctagtctactcaatcctcgaggggcagccttactttagcgtagaagcgcagacgggcattatcaggacagccttgcctaatatggaccgggaggctaaggaggagtaccacgtggtgatccaggcgaaagatatgggtggccacatgggtggccttagtggaacaacaaaagtcactattaccctgacagatgtaaatgataacccccccaaatttccccagtctgtgtaccagatgagtgtgtctgaggcagcggtccccggggaagaagtcgggcgggtcaaggctaaggaccccgacatcggggagaatgggctcgttacatacaatattgtggacggcgatggcatggagagcttcgaaatcactactgattacgaaacccaggaaggcgttattaagttgaaaaagccagtggacttcgagacaaagcgcgcttactccctgaaggtggaggctgcgaacgtccacatagatccaaaatttattagtaatggaccttttaaagataccgtcacagtaaaaatctccgtcgaagacgcggatgagccacctatgtttcttgcaccatcctatatacatgaggtacaggagaacgcagcagcagggaccgtggtcggacgggtacacgcgaaggatccagatgcagcaaattcccctattaggtattccattgatcgccataccgatctggaccgatttttcaccataaacccggaagatggcttcataaagaccaccaagcctttggatagggaggagaccgcatggctcaacatcaccgtgtttgccgccgaaatccataaccggcaccaagaagctaaggtgcctgtcgccatccgcgtgctagatgtgaatgataacgcccccaaatttgcagccccatatgaaggatttatctgcgaatctgaccaaacgaagcccctgtctaaccagcccatcgttactatttcagcagacgacaaggacgacactgctaacgggcccaggtttattttctccctgcctcctgagattattcataatccaaacttcaccgtgcgtgataacagggacaacacggcgggggtgtatgctcgacgcggaggcttcagtcgccagaaacaggacctttacctccttcctatagtgatatctgatggtggaatccctcccatgtctagcaccaacacactgactattaaagtctgtggctgtgacgttaacggggcactgctgtcttgcaacgccgaagcctacatactgaacgccggactgtccacaggcgcgctgattgcaatcctggcttgcatcgtgatcttgctagttatcgtcgtgctgttcgtcactttaaggcgacaaaagaaagaaccccttatcgtttttgaggaagaggatgtgcgggagaatataatcacatacgacgatgagggtgggggggaagaagataccgaagctttcgatattgctactctccaaaaccctgatgggattaatggttttatcccaaggaaagatattaaacctgagtatcagtacatgccaagacccggcctgcggccagctcccaattcagtcgatgtggacgatttcattaacacacggatccaggaggctgacaacgatcccactgcacctccttatgacagcatacagatttacgggtatgaaggccggggctcggttgctggatccctatcatcactggaaagcgccacaactgattcagatttggactatgattatctgcagaactggggtcccagatttaaaaagctggcagatctctatggttccaaagacaccttcgatgacgactcttag

SEQ ID NO: 121126 - DNA, 2391 bp, Artificial Sequence
  derived and/or modified sequence
atgaaagagaattattgtctgcaggccgctctggtttgcctagggatgctgtgccattctcacgccttcgctccggaacggagagggcacttacgtccaagctttcacggacatcatgaaaagggaaaggagggtcaggtgctgcagcgatctaaaagaggctgggtgtggaaccagttctttgtcatcgaagaatacacaggccctgatcccgtgctggttggcagactgcattccgacattgacagtggcgacggcaacattaaatacatcctctccggtgaaggtgccggtactatttttgtgatcgatgacaaatccggaaatatacatgcaacaaaaaccctggatagggaagaaagggcccagtacactttaatggcccaagcagtcgacagagatactaacagacctcttgaaccccctagtgaattcatcgtcaaggtgcaggacattaacgacaatccacctgaattcttgcatgagacataccacgccaatgtacctgaaagaagcaatgtgggaacctcagtgatccaggtcaccgcctcagacgccgacgacccaacctacgggaatagtgccaaactggtttactcaattctcgaaggccagccgtatttcagcgtcgaggctcaaactggcatcatccgcaccgccctgccgaacatggatagagaagccaaggaagagtatcatgttgtcattcaggccaaagatatgggcggacacatgggaggactgagcggcacaaccaaggtgacaataaccctcacagacgtcaacgataacccaccaaagtttccacagtctgtctatcaaatgtccgtttctgaggccgctgttccaggggaagaagtaggtcgagtcaaagctaaagatccggatattggtgagaacgggttggtcacatacaacattgtagacggggatggcatggaaagcttcgagatcacaaccgactacgaaacccaggaaggggtgatcaaactgaaaaagcccgtggattttgaaaccaagcgcgcttactccctgaaggtagaagctgctaacgtccacattgatccaaaattcatttctaatggccctttcaaggatacagtgaccgttaaaatctctgtggaggatgccgatgaacctcccatgttcctggcaccctcctatatccacgaggttcaagaaaacgcagcggctggaactgtggttggcagagtccacgccaaggacccagacgccgctaattcccctatcaggtacagtatagaccggcacacagatcttgacagattttttaccatcaacccagaagatggattcatcaagacaactaagccccttgatcgtgaggagacagcctggctcaatatcacagtttttgcggcagagatccacaacagacaccaggaagccaaggtccctgtggcaattagggtgctagatgttaacgacaatgcacccaagtttgccgcaccttatgaggggtttatctgtgagtccgatcagacaaagcccctgtcaaatcagccgatcgttactatctctgccgacgacaaagatgacaccgctaatgggcctcggttcatcttctctctgcctccagaaatcatccacaatcctaatttcaccgttcgggataatagagacaataccgccggtgtgtatgcacggagaggcggattttctcggcaaaagcaggacctgtatctactgcccattgtgatttccgacgggggaatccctcccatgtccagtactaatacactcactattaaggtgtgcggatgcgacgtgaacggcgcactcctgtcctgtaacgcggaagcctacatcctaaatgctggtttgtccaccggcgcactcatagccattcttgcttgcattgtgattttattagtgatagtggtgctctttgttactcttcgccgacagaaaaaggagcccctaatagtgtttgaggaagaggatgtcagggaaaacatcattacatatgacgacgaaggcggaggagaagaggacacagaagcttttgacatcgctacactccagaatccagacggcattaatggtttcatccctcggaaagacatcaagcccgagtaccagtacatgcctagacctggacttcggccagctcctaattccgttgacgtcgatgactttattaataccagaatccaagaagccgacaacgaccctaccgcccctccctacgacagtatacagatttacgggtacgagggcaggggcagcgtggccggatcccttagcagtctggagtctgctactactgacagcgacctggactatgattatctgcagaactggggcccaaggttcaagaagcttgctgatctgtacggatctaaagatacttttgatgatgactcgtag

SEQ ID NO: 121127 - DNA, 2340 bp, Artificial Sequence
  derived and/or modified sequence
atgggtccaggcctagccgctagacgtctgcgccctccctcccgcgctccggagattactgtgttctccgcgcaacggccttgcgatatcccgtcttgctgtcatctcctctcagatcaaagtgatgggtggagcgtgctacagaaactcgccgcatctattcaatgggttaagaaactgcatagtgatatagacagtggagacggcaacatcaaatatatcctctccggggagggcgctggcacgatctttgtcatcgacgacaagtccggaaatattcacgcaaccaagaccctggacagagaggagagagcccagtacacgttgatggcccaggcagtggatagggacactaatcggcctctcgagccacccagtgaattcatagtgaaggttcaggacattaatgacaaccctcccgaatttcttcacgaaacctaccatgcgaatgtgccggagcgaagtaacgtgggaaccagtgttattcaggtgactgcaagtgacgcggacgaccctacctatggcaatagtgccaaactggtttacagtatcttggagggacagccatacttctctgttgaagctcaaaccggtattattcgtacagccttacccaacatggatcgcgaggctaaggaagaataccacgttgtcattcaagcaaaggatatgggcggacacatggggggattgtcgggaaccacaaaggtaaccatcacattgacggacgttaatgacaatcccccaaaattcccccagtccgtctaccagatgagtgtatcagaagcggctgttcccggagaagaagtgggaagagtcaaagcaaaggatcccgacattggcgagaatgggttagtgacctataacatcgttgacggggatggaatggaatcctttgagataacaacagactacgagacacaggaaggggtgataaaattgaagaagccagtcgactttgaaactaagagagcatacagtttaaaagtggaagcagctaacgttcacattgatcccaagttcatctctaatggtccatttaaagatactgttacagtaaaaatcagcgtggaggacgccgatgagccccctatgttcctcgccccatcatacatccatgaggtccaggagaacgcagctgcaggcacagttgtcggacgtgttcacgctaaggatcccgatgcagcaaattccccaattcgttatagcatcgacagacacacagatctggaccgattcttcacaattaacccggaagacggcttcattaagaccactaagcccttagacagggaagagaccgcatggctaaacatcaccgtatttgctgctgaaattcacaacaggcaccaagaagccaaagtgcccgtggctatacgcgtactcgacgtaaacgataacgcacctaagttcgcagcaccatacgaaggtttcatctgcgagtcagaccaaaccaaacccctgtcaaaccagccaatcgttacaatcagtgctgatgacaaagatgacactgctaacgggccaaggttcattttcagcttgccgcctgagattatccataaccctaacttcaccgtacgagacaacagagataacaccgctggagtgtacgcccgacgcggaggcttttcccggcagaaacaggacctgtatctcctgcccatcgttatctccgatgggggaatcccaccaatgtcttctacaaacacactgaccattaaggtatgtggctgtgacgtcaacggggcactgctgtcctgcaacgctgaagcatacattttaaatgcaggcttgtcgactggtgccctcattgctatactggcttgtatagtgattctgttggtgatcgtggttctgttcgtgacactaaggcgccagaaaaaagagcccttgatcgtatttgaggaggaagatgttcgcgagaatatcatcacttacgacgatgaagggggaggtgaggaagatactgaggctttcgatatcgccaccctgcagaatcctgacggtatcaatggcttcattccaaggaaagatatcaagccagaatatcagtatatgcccagacctggcctgcgccctgcgcctaattccgtcgacgttgacgactttataaacacaaggatacaagaggccgataatgatcccaccgccccaccatacgattccattcagatttatggatacgagggtcggggatctgtcgccggtagtctttcctccctcgagagcgccaccactgattctgatttggattacgattacctgcagaactggggaccgagatttaagaaactggcagacctatacggtagtaaggacactttcgatgatgattcctag

SEQ ID NO: 121128 - DNA, 6857 bp, Artificial Sequence
  derived and/or modified sequence
ttctctcagcccccgccctttccttccctcacagcggcagcctccctcctcccgccccccccgccccgcacccgcctgcccgcccgccacctccccccggtttctcattcctgccactagcgcgctcggcggctcattccgcggccgccgccagctgaggggagcgtcgcgggccgaggagcagatgccgcgggggccgctcgcagccgccgctgacttgtgaatgggaccgggactggggccgggactgacaccgcagcgcttgccctgcgccagggactggcggctcggaggttgcgtccaccctcaagggccccagaaatcactgtgttttcagctcagcggccctgtgacattccttcgtgttgtcatttgttgagtgaccaatcagatgggtggagtgtgttacagaaattggcagcaagtatccaatgggtgaagaagaagctaactggggacgtgggcagccctgacgtgatgagctcaaccagcagagacattccatcccaagagaggtctgcgtgacgcgtccgggaggccaccctcagcaagaccaccgtacagttggtggaaggggtgacagctgcattctcctgtgcctaccacgtaaccaaaaatgaaggagaactactgtttacaagccgccctggtgtgcctgggcatgctgtgccacagccatgcctttgccccagagcggcgggggcacctgcggccctccttccatgggcaccatgagaagggcaaggaggggcaggtgctacagcgctccaagcgtggctgggtctggaaccagttcttcgtgatagaggagtacaccgggcctgaccccgtgcttgtgggcaggcttcattcagatattgactctggtgatgggaacattaaatacattctctcaggggaaggagctggaaccatttttgtgattgatgacaaatcagggaacattcatgccaccaagacgttggatcgagaagagagagcccagtacacgttgatggctcaggcggtggacagggacaccaatcggccactggagccaccgtcggaattcattgtcaaggtccaggacattaatgacaaccctccggagttcctgcacgagacctatcatgccaacgtgcctgagaggtccaatgtgggaacgtcagtaatccaggtgacagcttcagatgcagatgaccccacttatggaaatagcgccaagttagtgtacagtatcctcgaaggacaaccctatttttcggtggaagcacagacaggtatcatcagaacagccctacccaacatggacagggaggccaaggaggagtaccacgtggtgatccaggccaaggacatgggtggacatatgggcggactctcagggacaaccaaagtgacgatcacactgaccgatgtcaatgacaacccaccaaagtttccgcagagcgtataccagatgtctgtgtcagaagcagccgtccctggggaggaagtaggaagagtgaaagctaaagatccagacattggagaaaatggcttagtcacatacaatattgttgatggagatggtatggaatcgtttgaaatcacaacggactatgaaacacaggagggggtgataaagctgaaaaagcctgtagattttgaaaccaaaagagcctatagcttgaaggtagaggcagccaacgtgcacatcgacccgaagtttatcagcaatggccctttcaaggacactgtgaccgtcaagatctcagtagaagatgctgatgagccccctatgttcttggccccaagttacatccacgaagtccaagaaaatgcagctgctggcaccgtggttgggagagtgcatgccaaagaccctgatgctgccaacagcccgataaggtattccatcgatcgtcacactgacctcgacagatttttcactattaatccagaggatggttttattaaaactacaaaacctctggatagagaggaaacagcctggctcaacatcactgtctttgcagcagaaatccacaatcggcatcaggaagccaaagtcccagtggccattagggtccttgatgtcaacgataatgctcccaagtttgctgccccttatgaaggtttcatctgtgagagtgatcagaccaagccactttccaaccagccaattgttacaattagtgcagatgacaaggatgacacggccaatggaccaagatttatcttcagcctaccccctgaaatcattcacaatccaaatttcacagtcagagacaaccgagataacacagcaggcgtgtacgcccggcgtggagggttcagtcggcagaagcaggacttgtaccttctgcccatagtgatcagcgatggcggcatcccgcccatgagtagcaccaacaccctcaccatcaaagtctgcgggtgcgacgtgaacggggcactgctctcctgcaacgcagaggcctacattctgaacgccggcctgagcacaggcgccctgatcgccatcctcgcctgcatcgtcattctcctggtcattgtagtattgtttgtgaccctgagaaggcaaaagaaagaaccactcattgtctttgaggaagaagatgtccgtgagaacatcattacttatgatgatgaagggggtggggaagaagacacagaagcctttgatattgccaccctccagaatcctgatggtatcaatggatttatcccccgcaaagacatcaaacctgagtatcagtacatgcctagacctgggctccggccagcgcccaacagcgtggatgtcgatgacttcatcaacacgagaatacaggaggcagacaatgaccccacggctcctccttatgactccattcaaatctacggttatgaaggcaggggctcagtggccgggtccctgagctccctagagtcggccaccacagattcagacttggactatgattatctacagaactggggacctcgttttaagaaactagcagatttgtatggttccaaagacacttttgatgacgattcttaacaataacgatacaaatttggccttaagaactgtgtctggcgttctcaagaatctagaagatgtgtaaacaggtatttttttaaatcaaggaaaggctcatttaaaacaggcaaagttttacagagaggatacatttaataaaactgcgaggacatcaaagtggtaaatactgtgaaataccttttctcacaaaaaggcaaatattgaagttgtttatcaacttcgctagaaaaaaaaaacacttggcatacaaaatatttaagtgaaggagaagtctaacgctgaactgacaatgaagggaaattgtttatgtgttatgaacatccaagtctttcttcttttttaagttgtcaaagaagcttccacaaaattagaaaggacaacagttctgagctgtaatttcgccttaaactctggacactctatatgtagtgcatttttaaacttgaaatatataatattcagccagcttaaacccatacaatgtatgtacaatacaatgtacaattatgtctcttgagcatcaatcttgttactgctgattcttgtaaatctttttgcttctactttcatcttaaactaatacgtgccagatataactgtcttgtttcagtgagagacgccctatttctatgtcatttttaatgtatctatttgtacaattttaaagttcttattttagtatacgtataaatatcagtattctgacatgtaagaaaatgttacggcatcacacttatattttatgaacattgtactgttgctttaatatgagcttcaatataagaagcaatctttgaaataaaaaaagatttttttttaattctgggtttgattcttaacattgaaacaaacgttaagtatttctaatgatccatttatatttctaatttaattgtgatcttttaataaccctatttatgatctgttgttgtctgtctgctgcttttattgtttatttaaaatcaaatatgttttacaaatgttttttcagacaagattctgtaacatcatgtaaagcttttttgtacattcttggtgttaacctcctggcttctcttcacacacatcttctaaaaaagaaggatgtgaaagaactaggtcagtctatgactttgcaatatgtgttatatagtatgcatttatcttgtatatcagtaatttgatggttatgagagatgaatccatgagggaatggagctatcagaactctaatgttccaggtatacattctatgccccacactgagcactggggaactgggggactagagtcaaaaatataaatttgcccagactctaatgttattctattttttcttctgttgaacttaccaggctattgtaagactcttgatagttgaaactgcttatttttcctcctgtaattttaactaattgtaaaatgatgtggcattttatgttttaatgagaatgggcgattcatttaaaaaagctttgtttagaatatgcttggggccgtaagctcagaatgagggcagggaccattttggattctgagagtcgatgccatttggtccaggagtgtgtctacagtcccctgcattccagctagtttcttggggattgaaacttatgtgaagggcatttcacctgttcagttgggccaaaggtcaaaacgtagcaatacttggggaaagaccacataaagtcacactgcaagtgctttccctctttccccctacacacagggcacgtgctttttcttggattgcagacaatttttacagtttttttctgactttattgtgaaagtttgtttcaagcatttcttgatatcatgttatgtactatttttatgatttagtcaacatgcatacaaagaaatgttttttatgaagtgctcacttccattttactttgcattgaaatcaaattgggctgaacacttcaatggaatacattttgtggacaatgtcactttagaatctttcatctcagtgaaggattacacattctcaatacttccataattgcaggttgtgttcatttttttatatagtttttgtaatccaaagaatattttgctagatttgcacagatctccaattgaatttgcaatgaagaaataactcaaaaggaatatgaatagcatttaaataagtatacagctgtaagtaaccctgtcaccatggatgatccttttctctaggaatgtatttggattagagatgacaactacattttcgcatttttatgttgaagtcttttttaaaaaggctgtttacttttcagtagttaagaatacttgtttttctttttcttttttttttttttttttaccttttattttttcgttaagcctctattgtttgtagaacactcttagaaacttggaaataaaatgtctttcccaactagtggagtcctttttcatttggagcacattgccttaaaagaagtcttaatttaaacggtccttccttattctaaagtaatcactgttttataccatctatgcagctaaaagaaggaacatgcttctgttcttttcctcaagtaatggttattgtttctagtcatcattcattcattgattcattcattaattcatcaaaatcttattttataaaccctgttccacttactggaggattcagaatgaatcttactaccttttctgacatcttttgataattcagccctgtaccaaagtatccaccttgttgtcttataatcacctatttacctatttgccctcctagaaaatgcaagaagatattttctctccttccaaattgaaggaagaacataaaagatataacaggaaggagatggtgagatatagagtgtgagcggaaattaggccagctgtggcaattctggacagatcttgggtttagctaagttatttcttttaggcctgggtttctgggggtgacagggaagataaaagagtagtttatttgcacctcttggagaattgcttaaaaatatagagatcatggctctgtatgtcaggtggaaccaggtcaggagtatttgaaactgctcctgggtcattgtgacatatccttcacatctttttgagaaactttataagacaatgggggtgaatgggggctgggcagttggagtctctgagcagaagaggggcaaaatttatttggcaggcagtgtggaggacagattaggagcatataaacccagaggtgtgccccaggagggcttttgcaaaggtcaatatgagatagaatgagggcctgaaataattcagtaatttggagatggagaagaggaaagacttctctgctcttgcactgccatcagcctggtctgggccatggtcatctctgacccggaagactgaccccacctcttggctcaccctctgcctcccaacctcctcttcacaaagaagccagagggatacttttaacacacaacccagatcacatgacttcgtaacttaaacctcttcactggcttcccaaagacttaaaatgaattctgatgcctttattttattgctttacatgaacagggccctgcgaacctctccagtgtcattccactccatcctcctttcagtgcacgatgctccagccacactggccatctttcggttcctgatacaaaaaaaaacacgttccttttccatggaaagcaggtcacccttgttattttgtatcgatgacaactctttaaacttattttgctttttggctttatgtatgtgtgtgggtgggtgggactgactgccccactagaatgtaagctccatgagggcagggaatcttgctttcttgtttaccattgtatactcagttctttacacagtgcctgaaacataacaggtacacaataaatatctattgaatgaaagcaaa

SEQ ID NO: 121129 - DNA, 955 bp, Artificial Sequence
  derived and/or modified sequence
cgaggagcagatgccgcgggggccgctcgcagccgccgctgacttgtgaatgggaccgggactggggccgggactgacaccgcagcgcttgccctgcgccagggactggcggctcggaggttgcgtccaccctcaagggccccagaaatcactgtgttttcagctcagcggccctgtgacattccttcgtgttgtcatttgttgagtgaccaatcagatgggtggagtgtgttacagaaattggcagcaagtatccaatgggtgaagaagaagctaactggggacgtgggcagccctgacgtgatgagctcaaccagcagagacattccatcccaagagaggtctgcgtgacgcgtccgggaggccaccctcagcaagaccaccgtacagttggtggaaggggtgacagctgcattctcctgtgcctaccacgtaaccaaaaatgaaggagaactactgtttacaagccgccctggtgtgcctgggcatgctgtgccacagccatgcctttgccccagagcggcgggggcacctgcggccctccttccatgggcaccatgagaagggcaaggaggggcaggtgctacagcgctccaagcgtggctgggtctggaaccagttcttcgtgatagaggagtacaccgggcctgaccccgtgcttgtgggcaggcttcattcagatattgactctggtgatgggaacattaaatacattctctcaggggaaggagctggaaccatttttgtgattgatgacaaatcagggaacattcatgccaccaagacgttggatcgagaagagagagcccagtacacgttgatggctcaggcggtggacagggacaccaatcggaattcattgtcaaggtccaggacattaatgacaaccctccggagttcctgcacgagacctatcatgccaacgtgcctgagaggtccaatgtgggtgcgtacg

SEQ ID NO: 121130 - DNA, 2513 bp, Artificial Sequence
  derived and/or modified sequence
attcctgccactagcgcgctcggcggctcattccgcggccgccgccagctgaggggagcgtcgcgggccgaggagcagatgccgcgggggccgctcgcagccgccgctgacttgtgaatgggaccgggactggcggctcggaggttgcgtccaccctcaagggccccagaaatcactgtgttttcagctcagcggccctgtgacattccttcgtgttgtcatttgttgagtgaccaatcagatgggtggagtgtgttacagaaattggcagcaagtatccaatgggtgaagaagcttcattcagatattgactctggtgatgggaacattaaatacattctctcaggggaaggagctggaaccatttttgtgattgatgacaaatcagggaacattcatgccaccaagacgttggatcgagaagagagagcccagtacacgttgatggctcaggcggtggacagggacaccaatcggccactggagccaccgtcggaattcattgtcaaggtccaggacattaatgacaaccctccggagttcctgcacgagacctatcatgccaacgtgcctgagaggtccaatgtgggaacgtcagtaatccaggtgacagcttcagatgcagatgaccccacttatggaaatagcgccaagttagtgtacagtatcctcgaaggacaaccctatttttcggtggaagcacagacaggtatcatcagaacagccctacccaacatggacagggaggccaaggaggagtaccacgtggtgatccaggccaaggacatgggtggacatatgggcggactctcagggacaaccaaagtgacgatcacactgaccgatgtcaatgacaacccaccaaagtttccgcagagcgtataccagatgtctgtgtcagaagcagccgtccctggggaggaagtaggaagagtgaaagctaaagatccagacattggagaaaatggcttagtcacatacaatattgttgatggagatggtatggaatcgtttgaaatcacaacggactatgaaacacaggagggggtgataaagctgaaaaagcctgtagattttgaaaccaaaagagcctatagcttgaaggtagaggcagccaacgtgcacatcgacccgaagtttatcagcaatggccctttcaaggacactgtgaccgtcaagatctcagtagaagatgctgatgagccccctatgttcttggccccaagttacatccacgaagtccaagaaaatgcagctgctggcaccgtggttgggagagtgcatgccaaagaccctgatgctgccaacagcccgataaggtattccatcgatcgtcacactgacctcgacagatttttcactattaatccagaggatggttttattaaaactacaaaacctctggatagagaggaaacagcctggctcaacatcactgtctttgcagcagaaatccacaatcggcatcaggaagccaaagtcccagtggccattagggtccttgatgtcaacgataatgctcccaagtttgctgccccttatgaaggtttcatctgtgagagtgatcagaccaagccactttccaaccagccaattgttacaattagtgcagatgacaaggatgacacggccaatggaccaagatttatcttcagcctaccccctgaaatcattcacaatccaaatttcacagtcagagacaaccgagataacacagcaggcgtgtacgcccggcgtggagggttcagtcggcagaagcaggacttgtaccttctgcccatagtgatcagcgatggcggcatcccgcccatgagtagcaccaacaccctcaccatcaaagtctgcgggtgcgacgtgaacggggcactgctctcctgcaacgcagaggcctacattctgaacgccggcctgagcacaggcgccctgatcgccatcctcgcctgcatcgtcattctcctggtcattgtagtattgtttgtgaccctgagaaggcaaaagaaagaaccactcattgtctttgaggaagaagatgtccgtgagaacatcattacttatgatgatgaagggggtggggaagaagacacagaagcctttgatattgccaccctccagaatcctgatggtatcaatggatttatcccccgcaaagacatcaaacctgagtatcagtacatgcctagacctgggctccggccagcgcccaacagcgtggatgtcgatgacttcatcaacacgagaatacaggaggcagacaatgaccccacggctcctccttatgactccattcaaatctacggttatgaaggcaggggctcagtggccgggtccctgagctccctagagtcggccaccacagattcagacttggactatgattatctacagaactggggacctcgttttaagaaactagcagatttgtatggttccaaagacacttttgatgacgattcttaacaataacgatacaaatttggccttaagaactgtgtctggcgttctcaagaatctag

SEQ ID NO: 121131 - DNA, 2391 bp, Artificial Sequence
  derived and/or modified sequence
atgaaggagaactactgcctgcaggccgccctggtgtgcctgggcatgctgtgccacagccacgccttcgcccccgagagaagaggccacctgagacccagcttccacggccaccacgagaagggcaaggagggccaggtgctgcagagaagcaagagaggctgggtgtggaaccagttcttcgtgatcgaggagtacaccggccccgaccccgtgctggtgggcagactgcacagcgacatcgacagcggcgacggcaacatcaagtacatcctgagcggcgagggcgccggcaccatcttcgtgatcgacgacaagagcggcaacatccacgccaccaagaccctggacagagaggagagagcccagtacaccctgatggcccaggccgtggacagagacaccaacagacccctggagccccccagcgagttcatcgtgaaggtgcaggacatcaacgacaacccccccgagttcctgcacgagacctaccacgccaacgtgcccgagagaagcaacgtgggcaccagcgtgatccaggtgaccgccagcgacgccgacgaccccacctacggcaacagcgccaagctggtgtacagcatcctggagggccagccctacttcagcgtggaggcccagaccggcatcatcagaaccgccctgcccaacatggacagagaggccaaggaggagtaccacgtggtgatccaggccaaggacatgggcggccacatgggcggcctgagcggcaccaccaaggtgaccatcaccctgaccgacgtgaacgacaacccccccaagttcccccagagcgtgtaccagatgagcgtgagcgaggccgccgtgcccggcgaggaggtgggcagagtgaaggccaaggaccccgacatcggcgagaacggcctggtgacctacaacatcgtggacggcgacggcatggagagcttcgagatcaccaccgactacgagacccaggagggcgtgatcaagctgaagaagcccgtggacttcgagaccaagagagcctacagcctgaaggtggaggccgccaacgtgcacatcgaccccaagttcatcagcaacggccccttcaaggacaccgtgaccgtgaagatcagcgtggaggacgccgacgagccccccatgttcctggcccccagctacatccacgaggtgcaggagaacgccgccgccggcaccgtggtgggcagagtgcacgccaaggaccccgacgccgccaacagccccatcagatacagcatcgacagacacaccgacctggacagattcttcaccatcaaccccgaggacggcttcatcaagaccaccaagcccctggacagagaggagaccgcctggctgaacatcaccgtgttcgccgccgagatccacaacagacaccaggaggccaaggtgcccgtggccatcagagtgctggacgtgaacgacaacgcccccaagttcgccgccccctacgagggcttcatctgcgagagcgaccagaccaagcccctgagcaaccagcccatcgtgaccatcagcgccgacgacaaggacgacaccgccaacggccccagattcatcttcagcctgccccccgagatcatccacaaccccaacttcaccgtgagagacaacagagacaacaccgccggcgtgtacgccagaagaggcggcttcagcagacagaagcaggacctgtacctgctgcccatcgtgatcagcgacggcggcatcccccccatgagcagcaccaacaccctgaccatcaaggtgtgcggctgcgacgtgaacggcgccctgctgagctgcaacgccgaggcctacatcctgaacgccggcctgagcaccggcgccctgatcgccatcctggcctgcatcgtgatcctgctggtgatcgtggtgctgttcgtgaccctgagaagacagaagaaggagcccctgatcgtgttcgaggaggaggacgtgagagagaacatcatcacctacgacgacgagggcggcggcgaggaggacaccgaggccttcgacatcgccaccctgcagaaccccgacggcatcaacggcttcatccccagaaaggacatcaagcccgagtaccagtacatgcccagacccggcctgagacccgcccccaacagcgtggacgtggacgacttcatcaacaccagaatccaggaggccgacaacgaccccaccgcccccccctacgacagcatccagatctacggctacgagggcagaggcagcgtggccggcagcctgagcagcctggagagcgccaccaccgacagcgacctggactacgactacctgcagaactggggccccagattcaagaagctggccgacctgtacggcagcaaggacaccttcgacgacgacagctag

SEQ ID NO: 121132 - DNA, 2340 bp, Artificial Sequence
  derived and/or modified sequence
atgggccccggcctggccgccagaagactgagaccccccagcagagcccccgagatcaccgtgttcagcgcccagagaccctgcgacatccccagctgctgccacctgctgagcgaccagagcgacggctggagcgtgctgcagaagctggccgccagcatccagtgggtgaagaagctgcacagcgacatcgacagcggcgacggcaacatcaagtacatcctgagcggcgagggcgccggcaccatcttcgtgatcgacgacaagagcggcaacatccacgccaccaagaccctggacagagaggagagagcccagtacaccctgatggcccaggccgtggacagagacaccaacagacccctggagccccccagcgagttcatcgtgaaggtgcaggacatcaacgacaacccccccgagttcctgcacgagacctaccacgccaacgtgcccgagagaagcaacgtgggcaccagcgtgatccaggtgaccgccagcgacgccgacgaccccacctacggcaacagcgccaagctggtgtacagcatcctggagggccagccctacttcagcgtggaggcccagaccggcatcatcagaaccgccctgcccaacatggacagagaggccaaggaggagtaccacgtggtgatccaggccaaggacatgggcggccacatgggcggcctgagcggcaccaccaaggtgaccatcaccctgaccgacgtgaacgacaacccccccaagttcccccagagcgtgtaccagatgagcgtgagcgaggccgccgtgcccggcgaggaggtgggcagagtgaaggccaaggaccccgacatcggcgagaacggcctggtgacctacaacatcgtggacggcgacggcatggagagcttcgagatcaccaccgactacgagacccaggagggcgtgatcaagctgaagaagcccgtggacttcgagaccaagagagcctacagcctgaaggtggaggccgccaacgtgcacatcgaccccaagttcatcagcaacggccccttcaaggacaccgtgaccgtgaagatcagcgtggaggacgccgacgagccccccatgttcctggcccccagctacatccacgaggtgcaggagaacgccgccgccggcaccgtggtgggcagagtgcacgccaaggaccccgacgccgccaacagccccatcagatacagcatcgacagacacaccgacctggacagattcttcaccatcaaccccgaggacggcttcatcaagaccaccaagcccctggacagagaggagaccgcctggctgaacatcaccgtgttcgccgccgagatccacaacagacaccaggaggccaaggtgcccgtggccatcagagtgctggacgtgaacgacaacgcccccaagttcgccgccccctacgagggcttcatctgcgagagcgaccagaccaagcccctgagcaaccagcccatcgtgaccatcagcgccgacgacaaggacgacaccgccaacggccccagattcatcttcagcctgccccccgagatcatccacaaccccaacttcaccgtgagagacaacagagacaacaccgccggcgtgtacgccagaagaggcggcttcagcagacagaagcaggacctgtacctgctgcccatcgtgatcagcgacggcggcatcccccccatgagcagcaccaacaccctgaccatcaaggtgtgcggctgcgacgtgaacggcgccctgctgagctgcaacgccgaggcctacatcctgaacgccggcctgagcaccggcgccctgatcgccatcctggcctgcatcgtgatcctgctggtgatcgtggtgctgttcgtgaccctgagaagacagaagaaggagcccctgatcgtgttcgaggaggaggacgtgagagagaacatcatcacctacgacgacgagggcggcggcgaggaggacaccgaggccttcgacatcgccaccctgcagaaccccgacggcatcaacggcttcatccccagaaaggacatcaagcccgagtaccagtacatgcccagacccggcctgagacccgcccccaacagcgtggacgtggacgacttcatcaacaccagaatccaggaggccgacaacgaccccaccgcccccccctacgacagcatccagatctacggctacgagggcagaggcagcgtggccggcagcctgagcagcctggagagcgccaccaccgacagcgacctggactacgactacctgcagaactggggccccagattcaagaagctggccgacctgtacggcagcaaggacaccttcgacgacgacagctag

SEQ ID NO: 121133 - protein, 298 aa, Artificial Sequence
  derived and/or modified sequence
MENFQKVEKIGEGTYGVVYKARNKLTGEVVALKKIRLDTETEGVPSTAIREISLLKELNHPNIVKLLDVIHTENKLYLVFEFLHQDLKKFMDASALTGIPLPLIKSYLFQLLQGLAFCHSHRVLHRDLKPQNLLINTEGAIKLADFGLARAFGVPVRTYTHEVVTLWYRAPEILLGCKYYSTAVDIWSLGCIFAEMVTRRALFPGDSEIDQLFRIFRTLGTPDEVVWPGVTSMPDYKPSFPKWARQDFSKVVPPLDEDGRSLLSQMLHYDPNKRISAKAALAHPFFQDVTKPVPHLRL

SEQ ID NO: 121134 - DNA, 897 bp, Artificial Sequence
  derived and/or modified sequence
atggagaacttccagaaggtggagaagatcggcgagggcacctacggcgtggtgtacaaggccagaaacaagctgaccggcgaggtggtggccctgaagaagatcagactggacaccgagaccgagggcgtgcccagcaccgccatcagagagatcagcctgctgaaggagctgaaccaccccaacatcgtgaagctgctggacgtgatccacaccgagaacaagctgtacctggtgttcgagttcctgcaccaggacctgaagaagttcatggacgccagcgccctgaccggcatccccctgcccctgatcaagagctacctgttccagctgctgcagggcctggccttctgccacagccacagagtgctgcacagagacctgaagccccagaacctgctgatcaacaccgagggcgccatcaagctggccgacttcggcctggccagagccttcggcgtgcccgtgagaacctacacccacgaggtggtgaccctgtggtacagagcccccgagatcctgctgggctgcaagtactacagcaccgccgtggacatctggagcctgggctgcatcttcgccgagatggtgaccagaagagccctgttccccggcgacagcgagatcgaccagctgttcagaatcttcagaaccctgggcacccccgacgaggtggtgtggcccggcgtgaccagcatgcccgactacaagcccagcttccccaagtgggccagacaggacttcagcaaggtggtgccccccctggacgaggacggcagaagcctgctgagccagatgctgcactacgaccccaacaagagaatcagcgccaaggccgccctggcccaccccttcttccaggacgtgaccaagcccgtgccccacctgagactgtag

SEQ ID NO: 121135 - DNA, 2296 bp, Artificial Sequence
  derived and/or modified sequence
aacgcgggaagcaggggcggggcctctggtggcggtcgggaactcggtgggaggcggcaacattgtttcaagttggccaaattgacaagagcgagaggtatactgcgttccatcccgacccggggccacggtactgggccctgtttccccctcctcggcccccgagagccagggtccgccttctgcagggttcccaggcccccgctccagggccgggctgacccgactcgctggcgcttcatggagaacttccaaaaggtggaaaagatcggagagggcacgtacggagttgtgtacaaagccagaaacaagttgacgggagaggtggtggcgcttaagaaaatccgcctggacactgagactgagggtgtgcccagtactgccatccgagagatctctctgcttaaggagcttaaccatcctaatattgtcaagctgctggatgtcattcacacagaaaataaactctacctggtttttgaatttctgcaccaagatctcaagaaattcatggatgcctctgctctcactggcattcctcttcccctcatcaagagctatctgttccagctgctccagggcctagctttctgccattctcatcgggtcctccaccgagaccttaaacctcagaatctgcttattaacacagagggggccatcaagctagcagactttggactagccagagcttttggagtccctgttcgtacttacacccatgaggtggtgaccctgtggtaccgagctcctgaaatcctcctgggctgcaaatattattccacagctgtggacatctggagcctgggctgcatctttgctgagatggtgactcgccgggccctattccctggagattctgagattgaccagctcttccggatctttcggactctggggaccccagatgaggtggtgtggccaggagttacttctatgcctgattacaagccaagtttccccaagtgggcccggcaagattttagtaaagttgtacctcccctggatgaagatggacggagcttgttatcgcaaatgctgcactacgaccctaacaagcggatttcggccaaggcagccctggctcaccctttcttccaggatgtgaccaagccagtaccccatcttcgactctgatagccttcttgaagcccccagccctaatctcaccctctcctccagtgtgggcttgaccaggcttggccttgggctatttggactcaggtgggccctctgaacttgccttaaacactcaccttctagtcttggccagccaactctgggaatacaggggtgaaaggggggaaccagtgaaaatgaaaggaagtttcagtattagatgcacttaagttagcctccaccaccctttcccccttctcttagttattgctgaagagggttggtataaaaataattttaaaaaagccttcctacacgttagatttgccgtaccaatctctgaatgccccataattattatttccagtgtttgggatgaccaggatcccaagcctcctgctgccacaatgtttataaaggccaaatgatagcgggggctaagttggtgcttttgagaaccaagtaaaacaaaaccactgggaggagtctattttaaagaattcggttgaaaaaatagatccaatcagtttataccctagttagtgttttgcctcacctaataggctgggagactgaagactcagcccgggtggggctgcagaaaaatgattggccccagtccccttgtttgtcccttctacaggcatgaggaatctgggaggccctgagacagggattgtgcttcattccaatctattgcttcaccatggccttatgaggcaggtgagagatgtttgaatttttctcttccttttagtattcttagttgttcagttgccaaggatccctgatcccattttcctctgacgtccacctcctaccccataggagttagaagttagggtttaggcatcattttgagaatgctgacactttttcagggctgtgattgagtgagggcatgggtaaaaatatttctttaaaagaaggatgaacaattatatttatatttcaggttatatccaatagtagagttggctttttttttttttttttggtcatagtgggtggatttgttgccatgtgcaccttggggttttgtaatgacagtgctaaaaaaaaaaagcattttttttttatgatttgtctctgtcacccttgtccttgagtgctcttgctattaacgttatttgtaatttagtttgtagctcattaaaaaaatgtgcctagttttata

SEQ ID NO: 121136 - DNA, 897 bp, Artificial Sequence
  derived and/or modified sequence
atggaaaactttcagaaggtggaaaagattggggaagggacctacggggtggtctataaagcccggaataaacttaccggagaggtcgtggcgctgaagaaaattcgcctggatactgaaaccgagggtgtgccaagtaccgccatcagagaaatttcccttctgaaggaactgaaccatcccaatatcgtgaaactcctggacgtcattcatactgagaataagctctacctggtgtttgagtttctgcatcaggacctcaagaagttcatggacgcttccgccctgaccggaatcccgctcccactcattaaaagctacctcttccagctgttacagggcctcgcattctgtcatagccatagggttttgcatagagatctgaagccacaaaatctcttgattaacactgagggagcaataaagctggctgactttggcctggccagggcatttggagtcccagtccggacgtacacacatgaggttgtgaccctttggtatagagccccagagatccttctgggttgtaaatactactcgacagcggtagatatctggtcattggggtgtatcttcgctgagatggtcactcgccgggccctttttccgggagattcagagattgaccaacttttcagaattttccggaccttagggacccccgacgaggtggtatggccaggcgtgacaagcatgccggactacaagccctccttcccaaagtgggcccgtcaggacttctcaaaagtcgtccctcctttggatgaggatggccgctccttgctgtcacagatgcttcactatgaccctaataagaggatttcagctaaagcggctctcgcccatccattcttccaggacgttactaagcctgtgcctcacctcaggctctag

SEQ ID NO: 121137 - DNA, 897 bp, Artificial Sequence
  derived and/or modified sequence
atggagaacttccagaaggtggagaagatcggggagggcacctatggagtggtgtacaaggccaggaacaagctgaccggggaggtggtggccctgaagaagatccggctggacacagaaacagaaggagtgcccagcacagccatccgggagatcagcctgctgaaggagctgaaccaccccaacatcgtgaagctgctggatgtgatccacacagagaacaagctgtacctggtgtttgagttcctgcaccaggacctgaagaagttcatggatgccagcgccctgaccggcatccccctgcccctcatcaagagctacctgttccagctgctgcagggcctggccttctgccacagccaccgggtgctgcaccgggacctgaagccccagaacctgctgatcaacacagaaggagccatcaagctggccgactttggcctggcccgggccttcggcgtgcctgtgaggacctacacccatgaggtggtgaccctgtggtaccgggcccctgagatcctgctgggctgcaagtactacagcacagctgtggacatctggagcctgggctgcatctttgctgagatggtgacccggcgggccctcttccctggggacagcgagattgaccagctgttccgcatcttccgcaccctgggcaccccagatgaggtggtgtggccaggagtgacctccatgccagactacaagcccagcttccccaagtgggcccggcaggacttcagcaaggtggtgccccccctggatgaagatggccgcagcctgctgagccagatgctgcactatgaccccaacaagaggatcagcgccaaggccgccctggcccaccccttcttccaggatgtgaccaagcctgtgccccacctgcggctgtag

SEQ ID NO: 121138 - DNA, 897 bp, Artificial Sequence
  derived and/or modified sequence
atggagaacttccagaaggtggagaagatcggcgagggcacctacggagtggtgtacaaggcacggaacaagcttaccggagaggtcgtcgccctgaaaaaaatccggttagacaccgaaaccgagggcgtgccctctaccgccatcagggaaataagcctgctcaaagaactgaatcatcctaacattgtaaaactcctggacgtgatccatactgagaataagctctacctagtgtttgagtttctgcaccaggatctcaagaagttcatggacgctagtgccctgaccggaattcctttgcctctcatcaaatcttatctgttccagcttctgcagggtctggcgttttgccactcccaccgcgtactacacagggacctgaagccccagaatctccttattaacaccgaaggcgctatcaagctggccgacttcggactggcaagagcattcggagtccctgtccgcacctatacacacgaagtcgttaccttgtggtacagggcgcccgagatcctactcggatgcaagtactactccaccgccgtagacatttggtctcttggatgcatttttgctgaaatggtgacaaggcgcgcgcttttcccaggggattctgaaattgaccagttgttccgaatcttccggacgttggggaccccagatgaagtggtgtggccaggggtgacatcaatgcccgactataaaccatcatttcctaaatgggcacgccaggactttagcaaggtggtgccccccttggacgaagacggccgaagcctgttgtcccagatgctgcattatgacccaaataagcggataagcgcaaaagccgcattggcgcatcccttctttcaggacgtgaccaaacctgttccacatctccgcctctag

SEQ ID NO: 121139 - DNA, 897 bp, Artificial Sequence
  derived and/or modified sequence
atggaaaattttcagaaggtggaaaaaatcggagaagggacctacggtgtggtgtacaaggcaagaaacaaactgactggcgaagtggtagcactcaaaaaaattcgtcttgacaccgaaacagaaggagttcccagtaccgccattcgagaaatctccctgctcaaggagctgaatcaccctaacatcgtgaagctgttagatgtcattcacacagagaataaattatatctcgtgttcgaattcctacaccaggatctgaagaagtttatggacgcaagcgctttgacagggattcccctgcctctcatcaagtcatatctgttccagctgcttcaggggttagctttctgccacagccatagagtgctccatcgcgatctaaagccacagaatcttcttataaacacagaaggcgctatcaagttggctgatttcgggctggccagggcctttggagtgccggtgcggacctatacccatgaagtagtaaccctgtggtatagggcccctgagatactgttgggttgtaaatattattccactgcggttgatatctggagcctggggtgcatcttcgctgagatggtcacacgccgagcgctgttcccaggggattcggagatcgatcaactgtttagaatcttccgcaccctgggtacgcctgacgaggtagtatggcctggggtcacttccatgcctgattacaaaccctcattcccgaagtgggctcggcaggacttttccaaagttgtaccaccactggacgaagatggtaggagcctactgagccaaatgttacattacgaccctaacaaacggatatcagcgaaggccgcactcgcccatcccttcttccaggatgtaacgaaacccgtgcctcatttgaggctgtag

SEQ ID NO: 121140 - protein, 346 aa, Artificial Sequence
  derived and/or modified sequence
MALDVKSRAKRYEKLDFLGEGQFATVYKARDKNTNQIVAIKKIKLGHRSEAKDGINRTALREIKLLQELSHPNIIGLLDAFGHKSNISLVFDFMETDLEVIIKDNSLVLTPSHIKAYMLMTLQGLEYLHQHWILHRDLKPNNLLLDENGVLKLADFGLAKSFGSPNRAYTHQVVTRWYRAPELLFGARMYGVGVDMWAVGCILAELLLRVPFLPGDSDLDQLTRIFETLGTPTEEQWPDMCSLPDYVTFKSFPGIPLHHIFSAAGDDLLDLIQGLFLFNPCARITATQALKMKYFSNRPGPTPGCQLPRPNCPVETLKEQSNPALAIKRKRTEALEQGGLPKKLIF

SEQ ID NO: 121141 - DNA, 1041 bp, Artificial Sequence
  derived and/or modified sequence
atggccctggacgtgaagagcagagccaagagatacgagaagctggacttcctgggcgagggccagttcgccaccgtgtacaaggccagagacaagaacaccaaccagatcgtggccatcaagaagatcaagctgggccacagaagcgaggccaaggacggcatcaacagaaccgccctgagagagatcaagctgctgcaggagctgagccaccccaacatcatcggcctgctggacgccttcggccacaagagcaacatcagcctggtgttcgacttcatggagaccgacctggaggtgatcatcaaggacaacagcctggtgctgacccccagccacatcaaggcctacatgctgatgaccctgcagggcctggagtacctgcaccagcactggatcctgcacagagacctgaagcccaacaacctgctgctggacgagaacggcgtgctgaagctggccgacttcggcctggccaagagcttcggcagccccaacagagcctacacccaccaggtggtgaccagatggtacagagcccccgagctgctgttcggcgccagaatgtacggcgtgggcgtggacatgtgggccgtgggctgcatcctggccgagctgctgctgagagtgcccttcctgcccggcgacagcgacctggaccagctgaccagaatcttcgagaccctgggcacccccaccgaggagcagtggcccgacatgtgcagcctgcccgactacgtgaccttcaagagcttccccggcatccccctgcaccacatcttcagcgccgccggcgacgacctgctggacctgatccagggcctgttcctgttcaacccctgcgccagaatcaccgccacccaggccctgaagatgaagtacttcagcaacagacccggccccacccccggctgccagctgcccagacccaactgccccgtggagaccctgaaggagcagagcaaccccgccctggccatcaagagaaagagaaccgaggccctggagcagggcggcctgcccaagaagctgatcttctag

SEQ ID NO: 121142 - DNA, 1432 bp, Artificial Sequence
  derived and/or modified sequence
cccggtggacggaagtgggtgttggaggctttaaggtagctttaaattcgtgttgtcctgggagctcgcccttttcggctggagtcgggctttacggcgccggatggctctggacgtgaagtctcgggcaaagcgttatgagaagctggacttccttggggagggacagtttgccaccgtttacaaggccagagataagaacaccaaccaaattgtcgccattaagaaaatcaaacttggacatagatcagaagctaaagatggtataaatagaaccgccttaagagagataaaattattacaggagctaagtcatccaaatataattggtctccttgatgcttttggacataaatctaatattagccttgtctttgattttatggaaactgatctagaggttataataaaggataatagtcttgtgctgacaccatcacacatcaaagcctacatgttgatgactcttcaaggattagaatatttacatcaacattggatcctacatagggatctgaaaccaaacaacttgttgctagatgaaaatggagttctaaaactggcagattttggcctggccaaatcttttgggagccccaatagagcttatacacatcaggttgtaaccaggtggtatcgggcccccgagttactatttggagctaggatgtatggtgtaggtgtggacatgtgggctgttggctgtatattagcagagttacttctaagggttccttttttgccaggagattcagaccttgatcagctaacaagaatatttgaaactttgggcacaccaactgaggaacagtggccggacatgtgtagtcttccagattatgtgacatttaagagtttccctggaatacctttgcatcacatcttcagtgcagcaggagacgacttactagatctcatacaaggcttattcttatttaatccatgtgctcgaattacggccacacaggcactgaaaatgaagtatttcagtaatcggccagggccaacacctggatgtcagctgccaagaccaaactgtccagtggaaaccttaaaggagcaatcaaatccagctttggcaataaaaaggaaaagaacagaggccttagaacaaggaggattgcccaagaaactaattttttaaagagaacactggacaacattttactactgagggaaatagccaaaaaggcaaataatggaaaaatagtaaacattaagtaaatgctgtagaagtgagtttgtaaatattctacacatgtaaaatatgtaaaactatgggttatttttattaaatgtattttaaaataaaaatttaattctggtttttctgattagagtgcaaaagtgagaaaagttcaatactcttgaaatgtagaattgaaaatgcattagggaaaacttaataaaaattattaccagttatttggaa

SEQ ID NO: 121143 - DNA, 1041 bp, Artificial Sequence
  derived and/or modified sequence
atggctctggacgttaagtccagagctaaacgttacgaaaagttggatttcctaggagagggccagttcgcaactgtgtataaggcaagggacaaaaatactaatcagatcgtcgctataaaaaagattaagctgggccacagatcagaggcaaaggacggtattaacagaactgctctaagggaaattaagctcttacaggagctttcccatccgaatatcattggcttactggacgcctttggacataagagtaacatttccctggtctttgactttatggagaccgatctcgaagtaatcattaaggataacagtcttgttctgacccccagccacatcaaagcgtacatgctgatgacactgcagggcttggaatatttacatcagcactggatcttgcacagggatctgaaacctaataacctattgctggatgagaacggagttctgaagttggctgactttggccttgccaagtctttcggatcgcccaacagagcctatacacaccaggtggttaccagatggtatcgggcacctgaattactattcggagccagaatgtacggggtgggcgtggacatgtgggccgtggggtgtatccttgcggaactgctgctccgggtaccctttcttcccggtgatagcgatttggaccagttgacgagaatcttcgaaaccttaggcaccccgaccgaagaacagtggcccgacatgtgttcactaccagactatgtaaccttcaagagtttccccgggatacctctccaccacattttctctgccgctggggatgatcttctcgatttgatccagggcctctttctatttaatccgtgcgccaggatcactgcaacacaagcactgaagatgaaatacttcagcaataggccagggcccacacccggatgccaattgccccgacctaattgtccagtggagacgctcaaagagcagtccaatccggccctggccattaaaagaaagagaactgaagccttggagcaaggggggttgcctaagaagttgatattctag

SEQ ID NO: 121144 - DNA, 1041 bp, Artificial Sequence
  derived and/or modified sequence
atggccctggatgtgaagagccgggccaagagatatgagaagctggacttcctgggggagggccagtttgccaccgtgtacaaggcccgggacaagaacaccaaccagatcgtggccatcaagaagatcaagctgggccacaggtctgaggccaaggatggcatcaacagaacagccctgcgggagatcaagctgctgcaggagctgagccaccccaacatcatcggcctgctggatgccttcggccacaagagcaacatcagcctggtgtttgacttcatggagacagacctggaggtgatcatcaaggacaacagcctggtgctgacccccagccacatcaaggcctacatgctgatgaccctgcagggcctggagtacctgcaccagcactggatcctgcaccgggacctgaagcccaacaacctgctgctggatgaaaatggagtgctgaagctggccgactttggcctggccaagagctttggcagccccaacagagcctacacccaccaggtggtgacccgctggtaccgggcccctgagctgctgtttggagccaggatgtatggagtgggcgtggacatgtgggccgtgggctgcatcctggccgagctgctgctgcgggtgcccttcctgcccggggacagcgacctggaccagctgacccgcatctttgagaccctgggcacccccacagaggagcagtggccagacatgtgcagcctgcctgactatgtgaccttcaagagcttccctggcatccccctgcaccacatcttctctgctgctggagatgacctgctggacctgatccagggcctcttcctgttcaacccctgtgcccgcatcacagccacccaggccctgaagatgaagtacttcagcaacagacctggccccaccccaggctgccagctgccccggcccaactgccctgtggagaccctgaaggagcagagcaacccagccctggccatcaagaggaagaggacagaggccctggagcagggcggcctgcccaagaagctgatcttctag

SEQ ID NO: 121145 - DNA, 1041 bp, Artificial Sequence
  derived and/or modified sequence
atggccctggacgtgaagagccgggccaagcggtacgagaagctggactttctgggagaagggcagttcgctacagtctataaagcacgcgacaagaacacgaatcagattgtggctataaagaagatcaagctgggtcatagatctgaagccaaagacggcataaacagaacagcgctgcgggaaatcaaactccttcaggagttgtctcatcccaacattataggtctgctggatgcatttgggcataagagtaacatttccctcgtattcgacttcatggaaaccgacctcgaagtgatcattaaggataactccctggtcctgaccccgtcccatatcaaggcatacatgctgatgacgctccagggtttagagtatcttcatcagcactggatcctgcatcgggacttgaaacccaacaatctgctacttgatgaaaacggcgttctgaaattggcagactttggcctggctaaatcattcggctcccccaaccgggcctacacgcaccaggttgttacgaggtggtaccgagcccctgagcttctttttggtgccagaatgtatggcgttggtgtcgacatgtgggccgtgggctgtatcctggccgagttactgctccgagtcccgtttctgccaggcgacagtgacctggatcaactgacccgcatattcgaaaccctgggaaccccaacagaagagcagtggcccgacatgtgttcgttgcctgactatgtgacgtttaagtccttccccggtatccccttgcaccacatcttctccgccgcgggggatgatctgttagacctgatccagggcttgttcctttttaacccttgcgcacgcattaccgcgactcaggcactgaaaatgaaatacttttccaataggcccggtcccactcctgggtgtcagctgccgagaccaaattgccccgtggaaaccttaaaggaacagagcaaccctgcccttgcaattaaaaggaaaaggactgaagcactcgagcagggcggactgccaaaaaagttgattttctag

SEQ ID NO: 121146 - DNA, 1041 bp, Artificial Sequence
  derived and/or modified sequence
atggcgctggatgtgaaatcacgcgctaagagatatgaaaagctcgactttctgggtgagggccagttcgctacagtgtataaagctagagacaaaaatacaaaccagatagtcgcaataaaaaagataaagcttggacacaggagcgaagcgaaagatggcatcaatcgcaccgccctgcgggaaattaagttgttgcaggagctgagccatcctaacattattggactgctcgacgcctttgggcacaaatcaaatatctccctggtgttcgactttatggagactgacttagaggtgatcatcaaggacaattccctcgtcttgacgccaagtcacattaaagcctacatgctgatgactctgcagggccttgaatacctgcaccagcactggattttacaccgggacttaaagccaaacaatctgctgttggatgagaacggcgtcctgaagcttgccgacttcgggttggccaagtcctttgggtccccaaaccgagcatacacacatcaggtcgtgacccgatggtaccgcgctcctgagctcctgtttggcgctcgcatgtacggcgtgggcgtggacatgtgggcagttggatgcatcctcgcggagctcctcctcagagtccccttcctccccggtgactcagacctggatcagctgacccggatctttgagactctgggaactcctaccgaggagcagtggcctgatatgtgttctcttcctgattacgttaccttcaaatccttcccagggatcccactgcaccatatcttttcagccgctggcgacgacctattggacctcatccaaggcttatttttattcaacccgtgtgccagaatcacagccactcaggcacttaagatgaagtatttttccaatcgacccggacccacaccgggttgccagctgcctcggcctaattgccccgtggagacattgaaggagcagtccaacccagctctggctattaagcgcaaacgaacggaagcgctggagcagggtggcttgccaaaaaaattaattttttag

SEQ ID NO: 121147 - protein, 166 aa, Artificial Sequence
  derived and/or modified sequence
MLLEEVRAGDRLSGAAARGDVQEVRRLLHRELVHPDALNRFGKTALQVMMFGSTAIALELLKQGASPNVQDTSGTSPVHDAARTGFLDTLKVLVEHGADVNVPDGTGALPIHLAVQEGHTAVVSFLAAESDLHRRDARGLTPLELALQRGAQDLVDILQGHMVAPL

SEQ ID NO: 121148 - DNA, 501 bp, Artificial Sequence
  derived and/or modified sequence
atgctgctggaggaggtgagagccggcgacagactgagcggcgccgccgccagaggcgacgtgcaggaggtgagaagactgctgcacagagagctggtgcaccccgacgccctgaacagattcggcaagaccgccctgcaggtgatgatgttcggcagcaccgccatcgccctggagctgctgaagcagggcgccagccccaacgtgcaggacaccagcggcaccagccccgtgcacgacgccgccagaaccggcttcctggacaccctgaaggtgctggtggagcacggcgccgacgtgaacgtgcccgacggcaccggcgccctgcccatccacctggccgtgcaggagggccacaccgccgtggtgagcttcctggccgccgagagcgacctgcacagaagagacgccagaggcctgacccccctggagctggccctgcagagaggcgcccaggacctggtggacatcctgcagggccacatggtggcccccctgtag

SEQ ID NO: 121149 - DNA, 1144 bp, Artificial Sequence
  derived and/or modified sequence
agagcagaccccgcccggcgaggaggagggagggccgccagtgtcgacatgctgctggaggaggttcgcgccggcgaccggctgagtggggcggcggcccggggcgacgtgcaggaggtgcgccgccttctgcaccgggagctggtgcatcccgacgccctcaaccgcttcggcaagacggcgctgcaggtcatgatgtttggcagcaccgccatcgccctggagctgctgaagcaaggtgccagccccaatgtccaggacacctccggtaccagtccagtccatgacgcagcccgcactggattcctggacaccctgaaggtcctagtggagcacggggctgatgtcaacgtgcctgatggcaccggggcacttccaatccatctggcagttcaagagggtcacactgctgtggtcagctttctggcagctgaatctgatctccatcgcagggacgccaggggtctcacacccttggagctggcactgcagagaggggctcaggacctcgtggacatcctgcagggccacatggtggccccgctgtgatctggggtcaccctctccagcaagagaaccccgtggggttatgtatcagaagagaggggaagaaacactttctcttcttgtttctcctgcccactgctgcagtaggggaggagcacagtttgtggcttataggtgttggttttgggggtgtgagtgtttgggggacgtttctcatttgtttttctcactccttttggtgtgttggacagagaagggctcctgcaggccacagccacctaaacggttcagtttcttctgcgcctcaggctgctggggcctcagacgagacccaagggcagagcatttaagagtgaagtcatgacctccagggagcctagaagctggtggccttggccggctgtgctcagagacctgaagtgtgcacgttgcttcaggcatggggggtggggggagcgtcccaaatcaataagaaggtagaatgagttatgagttattcatattctgttggaagcttgttttccagtctcttgtacagcgttttaaaagaaatggattctatttattatgctttattggaaaaaatgttgtaataatttaatgtttttacccattaaattaagacttgtgcatgatc

SEQ ID NO: 121150 - DNA, 1398 bp, Artificial Sequence
  derived and/or modified sequence
ggagggagggtgagttagggggagacccggcccccaaggggcgggcgccgggcagggccccgcgggcggccgagggttgggcccggctcccagcccctcgccgtcctccggctgacagggggaggagcccgccgggagggccggggtctcgggctggggagccgggacgggagagcagcgcagccgggtgcaccgcggccgcgccccgggagggctgttcgggccagcgcccgccggctgctccgcgctgacagcgccgggctggggcggggcggggggctttgcaggccgccagtgtcgacatgctgctggaggaggttcgcgccggcgaccggctgagtggggcggcggcccggggcgacgtgcaggaggtgcgccgccttctgcaccgggagctggtgcatcccgacgccctcaaccgcttcggcaagacggcgctgcaggtcatgatgtttggcagcaccgccatcgccctggagctgctgaagcaaggtgccagccccaatgtccaggacacctccggtaccagtccagtccatgacgcagcccgcactggattcctggacaccctgaaggtcctagtggagcacggggctgatgtcaacgtgcctgatggcaccggggcacttccaatccatctggcagttcaagagggtcacactgctgtggtcagctttctggcagctgaatctgatctccatcgcagggacgccaggggtctcacacccttggagctggcactgcagagaggggctcaggacctcgtggacatcctgcagggccacatggtggccccgctgtgatctggggtcaccctctccagcaagagaaccccgtggggttatgtatcagaagagaggggaagaaacactttctcttcttgtttctcctgcccactgctgcagtaggggaggagcacagtttgtggcttataggtgttggttttgggggtgtgagtgtttgggggacgtttctcatttgtttttctcactccttttggtgtgttggacagagaagggctcctgcaggccacagccacctaaacggttcagtttcttctgcgcctcaggctgctggggcctcagacgagacccaagggcagagcatttaagagtgaagtcatgacctccagggagcctagaagctggtggccttggccggctgtgctcagagacctgaagtgtgcacgttgcttcaggcatggggggtggggggagcgtcccaaatcaataagaaggtagaatgagttatgagttattcatattctgttggaagcttgttttccagtctcttgtacagcgttttaaaagaaatggattctatttattatgctttattggaaaaaatgttgtaataatttaatgtttttacccattaaattaagacttgtgcatgatc

SEQ ID NO: 121151 - DNA, 501 bp, Artificial Sequence
  derived and/or modified sequence
atgctcctggaggaggtacgagccggggaccgtcttagcggggcggctgctaggggagatgtgcaagaggtacggcgccttctccacagagagctggtccaccccgatgctctgaaccgctttgggaaaaccgcattgcaagtcatgatgttcgggtctactgccattgcgctggaactgttgaaacagggggcatctcccaacgtgcaggatacatcgggtacgtctcccgtgcacgatgccgcccgcactgggttccttgacacgcttaaagtgcttgttgagcacggagcggatgtgaatgtgcccgacggcacaggtgctctcccaatacatctggccgtacaggagggacatacggccgtggtctcctttttggcggcagaatctgacttacaccgcagggacgcccgtggcttgacacccctggagttggccctgcaacgcggtgcacaggatctagtggatattttacaggggcacatggtggcccccctgtag

SEQ ID NO: 121152 - DNA, 501 bp, Artificial Sequence
  derived and/or modified sequence
atgttgcttgaggaggtacgggccggagaccgactatccggggccgccgcaagaggtgacgttcaggaagtccggcggttgcttcaccgagagctagttcacccagacgctctgaacaggtttggtaagaccgcactacaggttatgatgttcggatccactgcgatcgcgctcgaactgctgaaacagggggcatccccgaacgtacaagacacctcaggaacttcaccagttcatgacgccgctaggacgggcttcctcgatactcttaaagttttggtcgaacacggtgctgacgtcaatgtgccagatgggactggggccctgcccatacaccttgccgtgcaggaggggcacaccgctgtggttagttttctggctgcagagtccgaccttcaccggcgcgatgctcgggggctgacccccctggaattggccttgcaacggggggcccaggacctggtggacatcttacaggggcacatggtggccccactgtag

SEQ ID NO: 121153 - DNA, 501 bp, Artificial Sequence
  derived and/or modified sequence
atgctgctggaggaggtgcgggccggggaccggctgtctggagctgctgcccggggagatgtgcaggaggtgcggcggctgctgcaccgggagctggtgcacccagatgccctgaacagatttgggaagacagccctgcaggtgatgatgtttggcagcacagccatcgccctggagctgctgaagcagggcgccagccccaacgtgcaggacaccagcggcaccagccctgtgcatgatgctgccaggacaggcttcctggacaccctgaaggtgctggtggagcacggggctgatgtgaatgtgcctgatggcaccggggccctgcccatccacctggccgtgcaggagggccacacagctgtggtgtccttcctggccgctgagagtgacctgcacagaagagatgcccggggcctgacccccctggagctggccctgcagagaggagcccaggacctggtggacatcctgcagggccacatggtggcccccctgtag

SEQ ID NO: 121154 - DNA, 501 bp, Artificial Sequence
  derived and/or modified sequence
atgctgctggaggaggtgcgggccggcgaccggctgagcggcgccgcagcacgaggtgatgttcaggaagtccggagactgctacacagagaactggttcatcctgacgcattaaaccgcttcggaaagaccgcgctgcaggtgatgatgttcgggagtactgctatcgccctggagctgttgaagcaaggtgctagcccaaacgttcaggacaccagtggcacaagtccggtgcatgacgctgccaggacagggttcctagatacactgaaagttttagtagaacacggggccgacgtcaacgtacctgatgggacaggggcccttcctatccacctggctgttcaagagggccatactgccgtggttagcttcctggctgcagagagtgatctccaccgaagggatgcccgtggactaacacctctcgagttagccctgcagcgcggtgctcaggacttggtggacatcctgcagggccacatggtagctcctctttag

SEQ ID NO: 121155 - DNA, 501 bp, Artificial Sequence
  derived and/or modified sequence
atgctgctggaggaggtgcgggccggcgaccggctgagcggcgccgccgctcgaggggacgtacaggaggtgcgcaggctcctgcatagggagctggtccacccagacgctttaaatcggtttggaaagaccgccctgcaggtgatgatgttcgggtcaacagctatcgccctggaacttctgaaacagggcgccagtccgaatgtacaggacacaagtggtacctcccccgttcatgacgccgctaggacaggcttcctcgacacattaaaggtactggtggagcatggggcggatgtgaacgtgccagatggcaccggagcgttgcctatccaccttgccgtccaggaggggcacactgccgtggtgagcttcctggccgccgagtctgacttgcatagacgagatgcacgtggcctcacccccctcgagttagcgctgcagaggggagctcaagacctcgtcgacatcctgcagggtcacatggtggcacctctttag

SEQ ID NO: 121156 - DNA, 501 bp, Artificial Sequence
  derived and/or modified sequence
atgctactggaagaagtaagagctggcgaccgcctcagcggcgcagctgcacgtggtgacgtgcaggaagtgaggagattgcttcatagggagctcgtgcatccagacgctctcaatcggttcggcaagactgccctgcaggtgatgatgtttgggtcgacagcaatcgccttagagttgctaaaacagggcgcttctccaaatgtacaagacacctcagggacttcaccggtgcatgatgctgctcgaacaggtttcctggatacgcttaaggttctggtcgagcatggagctgacgtaaatgtacccgacggtacaggtgcgctgcctatacacctcgccgtacaggaaggtcatacagctgtagtgagcttcttagccgctgagtcagaccttcatcgaagagatgctaggggtttgactccactggagctcgctctgcagcgcggagcgcaggatttggtcgatatcctacagggccacatggtcgcccctttgtag

SEQ ID NO: 121157 - DNA, 501 bp, Artificial Sequence
  derived and/or modified sequence
atgctgctcgaggaagttagagctggagataggctgtctggggcagctgccagaggtgacgttcaagaggtgcgtagactgcttcaccgagaactggtccacccagatgcacttaacaggttcggaaagacggccttgcaggtcatgatgtttgggtccacagcaatcgccttggagctcctcaagcagggagcctcacccaatgtgcaggataccagcggcacatcccccgttcatgacgccgctcggaccggctttctggatactctgaaagtgctcgtcgagcacggagccgacgtcaatgtgcccgatggtactggagctctgcctattcacctcgccgtgcaagaaggccacaccgctgtcgtgagttttctcgcagctgaatcagatctgcatcgcagagatgcacgcggactgacccccctggaattagccttgcagcgaggggcacaggatcttgttgatattctccaaggtcatatggtcgcccctctctag

SEQ ID NO: 121158 - protein, 200 aa, Artificial Sequence
  derived and/or modified sequence
MEQTEVLKPRTLADLIRILHQLFAGDEVNVEEVQAIMEAYESDPTEWAMYAKFDQYRYTRNLVDQGNGKFNLMILCWGEGHGSSIHDHTNSHCFLKMLQGNLKETLFAWPDKKSNEMVKKSERVLRENQCAYINDSIGLHRVENISHTEPAVSLHLYSPPFDTCHAFDQRTGHKNKVTMTFHSKFGIRTPNATSGSLENN

SEQ ID NO: 121159 - DNA, 603 bp, Artificial Sequence
  derived and/or modified sequence
atggagcagacggaggtcttaaagccgcgaaccctcgcagacctgattcgaattctgcaccaacttttcgccggtgacgaagtgaatgtcgaggaggttcaggccatcatggaggcctacgagtctgaccctaccgagtgggccatgtacgcaaagtttgatcagtatcgctacacccgcaatctggtcgaccagggcaatgggaagtttaatctgatgatactttgttggggtgagggacacggtagcagcatccatgatcataccaatagtcactgttttctaaagatgcttcaggggaatttaaaggagaccctcttcgcctggcccgacaaaaaaagtaatgagatggtgaaaaagtcagagcgagtactgcgcgaaaatcaatgcgcttacatcaacgatagcattggcctgcacagggtagagaacatttcgcacaccgagccagcagtgagccttcacctctacagcccaccattcgacacctgtcacgcatttgatcagcgaactgggcacaaaaataaggtgacgatgacattccatagcaaatttggcattcgtactcctaacgctacctccggctccctcgaaaataattag

SEQ ID NO: 121160 - DNA, 603 bp, Artificial Sequence
  derived and/or modified sequence
atggagcagacagaggtgctgaagcccaggaccctggccgacctgatccgcatcctgcaccagctgtttgctggagatgaggtgaatgtggaggaggtgcaggccatcatggaggcctatgaaagtgaccccacagagtgggccatgtatgccaagtttgaccagtaccgctacaccaggaacctggtggaccagggcaatggcaagttcaacctgatgatcctgtgctggggcgagggccacggcagcagcatccatgaccacaccaacagccactgcttcctgaagatgctgcagggcaacctgaaggagaccctgtttgcctggccagacaagaagagcaatgagatggtgaagaagtctgagcgggtgctgcgggagaaccagtgtgcctacatcaatgacagcatcggcctgcaccgggtggagaacatcagccacacagagcctgctgtgtccctgcacctgtacagccccccatttgacacctgccacgcctttgaccagaggacaggccacaagaacaaggtgaccatgaccttccacagcaagtttggcatccgcaccccaaatgccaccagcggcagcctggagaacaactag

SEQ ID NO: 121161 - DNA, 603 bp, Artificial Sequence
  derived and/or modified sequence
atggagcagaccgaggtgctgaagccccggaccctggccgacctgattagaatcctacatcagctgttcgctggcgatgaggtgaacgtcgaagaggttcaggcaatcatggaagcctatgaatctgaccccaccgaatgggcaatgtacgctaagtttgatcaatacagatatactcggaatctcgtcgaccagggaaacggcaagtttaaccttatgattctctgctggggcgagggtcatggctcttctattcacgatcatacaaactctcactgctttttgaaaatgcttcagggaaatctaaaagagacgctgttcgcttggcccgacaagaagtcaaacgaaatggtcaagaagagcgagagagtgctgcgagagaatcaatgtgcctacatcaacgactctatcggattgcaccgggtcgaaaatatcagccacactgagccggccgtcagtctgcatctctattctccaccattcgatacttgtcacgcttttgatcagaggacagggcataagaacaaggtgacgatgacattccatagcaagtttgggatcaggactcccaacgcgacttctgggtccctagaaaataattag

SEQ ID NO: 121162 - DNA, 603 bp, Artificial Sequence
  derived and/or modified sequence
atggagcagactgaggtgctcaagcctcgcacgctggccgatctcataaggatcctccaccaactgtttgccggagatgaagtcaacgttgaggaggtacaggcgatcatggaggcctacgagtcggatcctaccgagtgggccatgtatgccaaatttgatcaatatagatacacacggaacctagtggatcaggggaatggaaagttcaaccttatgatcctctgctggggcgaaggacacggcagttccattcatgaccataccaactctcactgttttctgaagatgctgcagggtaatctgaaggagactttattcgcatggccagacaaaaagtcaaacgagatggtgaaaaagtccgaaagggtgctgagggagaatcagtgtgcctatatcaacgactcgatagggctccaccgtgtggagaatatcagtcacacagaacccgcagtgtccttgcatctgtatagtcctccatttgatacatgccatgcgttcgaccagaggactggccataagaacaaggtgactatgacgttccactcaaagtttgggatacgtactccaaatgctactagtgggtctctcgagaacaactag

SEQ ID NO: 121163 - DNA, 1860 bp, Artificial Sequence
  derived and/or modified sequence
agcggcggaggtggagcggggagaggcgttaggccgggcggctaaaacgcgccgttaaagtgggggagagattgcgcggagcccacgcgatccctgggacgccggagacaacggggctcttgggaaggcgcggagcccggggaagccggggatgtgcgcgtgagccgtgcccgcagggtctccccgcctccgccacctttcttgggtggctctccgcctcgtcctccctccgagggccgttggtacattcctagtgactccaagcgcttaaaaggggcccgggaggatgaaccccacagatctgaacctgatttgtgtgtgcaccgcgtctccagcgatcccggatccactgcgctgccaggggcctgggggtgggtctcttgctgtctctgcgacgacatccttacgtttcggcactctaatgctgggtttgtgcgtgtgtgtctgcttagcggtctagcgggctgttaggctccctcgcccccagctccttggctcgctcagctcctccaccgcagcccagcagtgagacgcgcgcgcagccagctccccacgagatggaacagaccgaagtgctgaagccacggaccctggctgatctgatccgcatcctgcaccagctctttgccggcgatgaggtcaatgtagaggaggtgcaggccatcatggaagcctacgagagcgaccccaccgagtgggcaatgtacgccaagttcgaccagtacaggtatacccgaaatcttgtggatcaaggaaatggaaaatttaatctgatgattctctgttggggtgaaggacatggcagcagtattcatgatcataccaactcccactgctttctgaagatgctacagggaaatctaaaggagacattatttgcctggcctgacaaaaaatccaatgagatggtcaagaagtctgaaagagtcttgagggaaaaccagtgtgcctacatcaatgattccattggcttacatcgagtagagaacatcagccatacggaacctgctgtgagccttcacttgtacagtccaccttttgatacatgccatgcctttgatcaaagaacaggacataaaaacaaagtcacaatgacattccatagtaaatttggaatcagaactccaaatgcaacttcgggctcgctggagaacaactaaggggcaccaaaccctctgaggttttactttaaggttcgctgtatgtttgccttggacaaaaaggctacctaccacgtgctatccagtaatatacttaaataagccaatacttagatctactgtaaggcagatgctaattataaggcattaagtaagcaaatagtgccctcagctactgcagaagaaaagtcccactgaggaaaagaaagtcttgtgatttttaaaggcaagttttcaagtgctctcatagttctatcctctaattccattaaatccatactaggagcgtcagtgagggttttcatagcttttggaaatactttggtctctgaactgtaattagcaagaagtaaaaacagaaacgtcaaacgtcaaatgtttgctttgttacctggaggactaaatgtagatgtctttagtatactttgtatgttcttaatattggaagataattttgtgaatctgtagattttattttttcagtcttaccttacaaatttcttttctatgaataatagaggaacttacggcactctgccatttgttaatgaaaggaagtgcagaggatttagaaaagtacatgatccccagaccacaacaaaccaaaacataaactcatgtctgtgtcccatggtcatagtcaaagattttgtactgctaaaattaccaaataatttaaataaagtggatttgaacacaa

SEQ ID NO: 121164 - DNA, 603 bp, Artificial Sequence
  derived and/or modified sequence
atggagcagaccgaggtgctgaagcccagaaccctggccgacctgatcagaatcctgcaccagctgttcgccggcgacgaggtgaacgtggaggaggtgcaggccatcatggaggcctacgagagcgaccccaccgagtgggccatgtacgccaagttcgaccagtacagatacaccagaaacctggtggaccagggcaacggcaagttcaacctgatgatcctgtgctggggcgagggccacggcagcagcatccacgaccacaccaacagccactgcttcctgaagatgctgcagggcaacctgaaggagaccctgttcgcctggcccgacaagaagagcaacgagatggtgaagaagagcgagagagtgctgagagagaaccagtgcgcctacatcaacgacagcatcggcctgcacagagtggagaacatcagccacaccgagcccgccgtgagcctgcacctgtacagcccccccttcgacacctgccacgccttcgaccagagaaccggccacaagaacaaggtgaccatgaccttccacagcaagttcggcatcagaacccccaacgccaccagcggcagcctggagaacaactag

SEQ ID NO: 121165 - protein, 454 aa, Artificial Sequence
  derived and/or modified sequence
MLAENLVEEFEMKEDEPWYDHQDLQQDLQLAAELGKTLLDRNTELEDSVQQMYTTNQEQLQEIEYLTKQVELLRQMNEQHAKVYEQLDVTARELEETNQKLVADSKASQQKILSLTETIECLQTNIDHLQSQVEELKSSGQGRRSPGKCDQEKPAPSFACLKELYDLRQHFVYDHVFAEKITSLQGQPSPDEEENEHLKKTVTMLQAQLSLERQKRVTMEEEYGLVLKENSELEQQLGATGAYRARALELEAEVAEMRQMLQSEHPFVNGVEKLVPDSLYVPFKEPSQSLLEEMFLTVPESHRKPLKRSSSETILSSLAGSDIVKGHEETCIRRAKAVKQRGISLLHEVDTQYSALKVKYEELLKKCQEEQDSLSHKAVQTSRAAAKDLTGVNAQSEPVASGWELASVNPEPVSSPTTPPEYKALFKEIFSCIKKTKQEIDEQRTKYRSLSSHS

SEQ ID NO: 121166 - DNA, 1365 bp, Artificial Sequence
  derived and/or modified sequence
atgctggctgagaatcttgtggaggagtttgaaatgaaagaggacgagccctggtacgatcaccaggacttgcagcaggacctgcagctggccgccgagctgggcaagacactcttagatcgcaatacggaactggaggacagtgtccagcaaatgtataccaccaatcaagaacaactacaggagatcgaatacctgacgaagcaggttgaattgctgagacagatgaatgagcagcacgcgaaagtgtatgaacagctggacgtgacagcccgagaactagaggaaacaaatcagaagcttgttgccgactccaaggcctctcaacagaaaatcttgtccctaaccgagaccattgagtgcctccagacaaacatcgaccacctgcaatcacaggtcgaagaactcaagtcgtctggacaggggagacgttcacctgggaaatgcgatcaggagaagcctgctccctcattcgcatgtctcaaggagctgtatgatttaaggcagcatttcgtttacgatcacgtcttcgcagaaaagataacttcgcttcaaggacagccctcacccgacgaggaggaaaatgaacacctcaaaaaaacagtgactatgctccaagcgcagttgagcctggaacgccagaaaagagtgacaatggaggaggagtacggccttgtgctcaaggaaaattccgagctagagcaacaattgggggctaccggcgcctaccgcgctcgggccttggaactggaggctgaagtggccgaaatgagacagatgttgcaaagcgaacatccatttgtgaatggggtcgaaaagctcgtgcccgactccctttatgtgccattcaaggaacctagccagagcttgctcgaagagatgttcctcacggtgcccgagagccaccgtaagccactcaaacggagttcctctgaaaccatattatcttccttggccggttctgacatcgttaaaggccacgaagaaacatgtattcgacgagctaaggcagtaaagcagcgtggtatcagtttgttgcacgaggtggatacacagtatagtgcactgaaggtaaaatacgaggagcttctgaaaaaatgccaagaagagcaggacagtctgagccacaaggccgtccaaacctccagagccgcagccaaagacctgaccggcgtcaatgcacagtccgagcccgtggccagcggctgggaacttgcctcagtcaatcctgaaccagtgtcctctcccacaacaccaccagagtacaaggcgctcttcaaggagatcttctcgtgcattaagaagacaaaacaggagatagacgagcagaggaccaaataccgctctctatcctcccacagctag

SEQ ID NO: 121167 - DNA, 1365 bp, Artificial Sequence
  derived and/or modified sequence
atgctggccgagaacctggtggaggagtttgagatgaaggaggatgagccctggtatgaccaccaggacctgcagcaggacctgcagctggccgctgagctgggcaagaccctgctggacaggaacacagagctggaggacagcgtgcagcagatgtacaccaccaaccaggagcagctgcaggagattgagtacctgaccaagcaggtggagctgctgcggcagatgaatgagcagcacgccaaggtgtatgagcagctggatgtgacagcccgggagctggaggagaccaaccagaagctggtggccgacagcaaggccagccagcagaagatcctgagcctgacagagaccatcgagtgcctgcagaccaacatcgaccacctgcagagccaggtggaggagctgaagagcagcggccagggcagaagaagccctggaaaatgtgaccaggagaagccagcccccagctttgcctgcctgaaggagctgtatgacctgcggcagcactttgtgtatgaccacgtgtttgctgagaagatcaccagcctgcagggccagcccagcccagatgaggaggagaatgagcacctgaagaagacagtgaccatgctgcaggcccagctgagcctggagcggcagaagagggtgaccatggaggaggagtatggcctggtgctgaaggaaaattctgagctggagcagcagctgggcgccaccggggcctaccgggcccgggccctggagctggaggccgaggtggccgagatgaggcagatgctgcagagcgagcacccctttgtgaatggagtggagaagctggtgcctgacagcctgtatgtgcccttcaaggagcccagccagagcctgctggaggagatgttcctgactgtgcctgagagccacaggaagcccctgaagaggagcagcagcgagaccatcctgagcagcctggccggcagtgacatcgtgaagggccacgaggagacctgcatcagaagagccaaggctgtgaagcagaggggcatcagcctgctgcacgaggtggacacccagtacagcgccctgaaggtgaagtatgaggagctgctgaagaagtgccaggaggagcaggacagcctgagccacaaggctgtgcagaccagcagagctgctgccaaggacctgactggagtgaatgcccagagcgagcctgtggccagcggctgggagctggcctctgtgaaccctgagcctgtgagcagccccaccaccccacctgagtacaaggccctcttcaaggagatcttcagctgcatcaagaagaccaagcaggagattgatgagcagaggaccaagtaccgcagcctgagcagccacagctag

SEQ ID NO: 121168 - DNA, 1365 bp, Artificial Sequence
  derived and/or modified sequence
atgctggccgagaacctggtggaggagttcgagatgaaggaggacgaaccttggtatgatcatcaggatttacagcaagacctccagcttgcagccgaattgggtaaaaccctgttagaccggaacaccgaactcgaagattctgtgcaacagatgtatactacaaatcaggagcagttacaggagattgaataccttactaaacaagtggaattgttgcgtcagatgaacgagcagcatgccaaagtgtacgaacagctcgacgtgactgcgcgagagctcgaagaaacaaatcagaagctggtcgctgatagcaaggccagccagcagaaaatactgtcactgaccgagacgattgagtgcttgcagaccaatatagaccatctgcagagccaggtggaggagctaaagagtagcggtcagggacggcgttctccaggaaaatgcgatcaagagaaaccagctccttcattcgcctgcctgaaagagctttacgatcttcgacaacattttgtgtatgaccacgtttttgctgagaaaattacgagcctgcagggacagcccagtcccgacgaggaggaaaacgaacatttaaaaaagacggtaactatgcttcaggctcagctgtcacttgaaagacaaaaacgggttaccatggaagaagaatatggtcttgtcctcaaagagaactctgaactggaacagcaactgggcgcaacaggcgcctatcgggcaagggccctggagttggaggccgaggtggcggaaatgagacaaatgcttcagtcagagcatcccttcgtaaatggcgttgaaaaactcgtgcctgattctctgtatgtcccattcaaggagcccagccaatcccttttagaagaaatgttcctgactgtgcccgagtctcacaggaagccactcaagcgcagttcctctgagacgattctgagtagccttgccgggtcagatattgtcaagggacatgaggagacctgtatcaggagagccaaggccgtaaaacagagggggatctccctgctgcacgaggtggatacacaatacagtgccttgaaggtgaagtacgaggaactgctgaagaaatgccaggaagagcaggactcactgtctcacaaggcggtgcaaacctctcgggccgctgccaaagacctcaccggtgtgaacgctcagagcgagcctgtagccagcggttgggaactggcatcggtgaatcctgaacctgtgagcagccccaccacacctcctgagtataaagccctcttcaaagaaatcttctcctgcatcaagaagaccaagcaggagattgatgagcagagaaccaagtaccgaagcctgtcctcccacagctag

SEQ ID NO: 121169 - DNA, 1365 bp, Artificial Sequence
  derived and/or modified sequence
atgctcgctgaaaatttagtggaggagtttgaaatgaaggaagacgaaccgtggtacgaccaccaggatttacagcaagatctgcagcttgctgctgagctcgggaagaccctgctggatagaaatacagaattagaagacagtgtgcaacagatgtacaccacgaaccaggagcagctgcaggaaatcgaatatctaaccaaacaggtagagctgcttcgacagatgaatgagcagcacgcaaaagtgtatgagcagttggacgtgactgcaagagaactcgaggaaaccaatcaaaagctcgtggccgatagcaaagcttctcaacagaaaatcctctctcttacagaaactattgaatgcttacagactaacatcgatcatctgcagtcacaagtagaggaactgaaatcgtcgggacaggggcgaaggtcccccggaaagtgtgatcaggagaaaccagccccttcttttgcttgtttgaaagagctgtacgacttgcgccagcactttgtgtacgatcacgtctttgcagaaaaaatcaccagcctacagggacagccctccccagacgaggaagaaaatgaacacttgaagaaaactgttacaatgctgcaggcccaactctccctggaaaggcagaagagggtgacaatggaagaagagtatggcctggttctgaaggagaattctgagctcgaacagcagctgggcgcaactggcgcttatagagcgagggcactggagcttgaagctgaagtggcagagatgcgccagatgctgcaaagcgaacaccctttcgtgaacggtgtcgaaaagttagtgcctgacagcctatacgtcccgttcaaagagccaagccagtctctcctcgaagaaatgttcctgacagttcctgagagccatcggaagccccttaaacgatcctcctcggagacgattctcagtagcctggccggtagcgacatagtcaagggccatgaggagacgtgtatccggagggccaaagctgtcaaacagagagggatcagtctgctccacgaggtggacacacagtattctgccttgaaagtgaagtatgaggagcttttgaaaaagtgccaggaagagcaggattcattgtctcacaaggctgtgcagacatcgcgcgctgccgctaaggatctgaccggggtgaacgcgcaatctgaacctgttgcttcgggctgggagttggcctccgtgaacccagaacccgtgtcttcccccactaccccaccggaatacaaggctctgtttaaagaaatcttttcatgtatcaaaaaaactaagcaagagatcgatgagcagcgaaccaaatatcggtctctctcatcacattcttag

SEQ ID NO: 121170 - DNA, 2702 bp, Artificial Sequence
  derived and/or modified sequence
gccaaagtgccacgttgggcccggcggcggcgtgaagactggcggctgcgtgagactccggctccaggcgttcgcaccgtaatgcccggccgttggggccgtcggtaggcgcgaggcgagtcgaggcagccggccggtcggcggccgccggcgggaacggggctgaggcggcgcagcggagtctgggcggcggcgcgtcccgcccgagggcggctctggctgagggcggaggggccggggaagagcccggggcagcggctgaggcgggacggcggcgggggccgctgcccctagaagacccagccgagatgctggcggaaaacctggtagaggagtttgagatgaaggaggacgagccgtggtacgaccaccaggacctccagcaagatcttcaacttgctgctgagcttgggaagacattactggatcggaacacagagttggaggactctgttcagcagatgtatacaaccaatcaggagcagttacaggaaattgagtatctgacgaagcaagtggaacttctacggcagatgaacgaacaacatgcaaaggtttatgaacaattagacgtcacagcaagggaactggaagaaacaaatcaaaagctagttgctgacagcaaggcctcacagcaaaagattctgagcctgactgaaacgattgaatgcctgcaaaccaacattgatcacctccagagccaagtggaggagctgaagtcatctggccaagggagaaggagcccgggaaagtgtgaccaggagaaaccggcacccagctttgcatgtctgaaggagctgtatgacctccgccaacacttcgtgtatgatcatgtgttcgctgagaagatcacttccttgcaaggtcagccaagccctgatgaagaggaaaatgagcacttgaaaaaaacagtgacaatgttgcaggcccagctgagcctggagcggcagaagcgggtgactatggaggaggaatatgggctcgtgttaaaggagaacagtgaactggagcagcagctgggggccacaggtgcctaccgagcacgggcgctggaactagaggccgaggtggcagagatgcgacagatgttgcagtcagagcatccatttgtgaatggagttgagaagctggtgccagactctctgtatgttcctttcaaagagcccagccagagcctgctggaagagatgttcctgactgtgccggaatcacatagaaagcctctcaagcgcagcagcagtgagacgatcctcagcagcttggcagggagtgacatcgtgaagggccacgaggagacctgcatcaggagggccaaggctgtgaaacagaggggcatctcccttctgcacgaagtggacacgcagtacagcgccctgaaggtgaagtatgaagagttgctgaagaagtgccaagaggaacaggactccctgtcacacaaggctgtgcagacctccagggctgcagccaaggacctgactggagtgaacgcccagtctgagcctgttgccagcggctgggaactggcctctgtcaacccagagcccgtgagttcccctacaacacctccagaatacaaagcgttgtttaaggagatctttagttgcatcaagaaaactaagcaggaaatagatgaacagagaacaaaataccgatcactctcctctcattcttaattgaacctctagctctactactaatttgcctattgcctatcgcctctctctcccattcagacaagtgtttgtagactctgaagcctaatgttactcatgacgtttgcctcattgctttgcttatttagcaaatgcatacaacgaggaaaggaggtggctagtggtatcagttctctgatccacttccatttaagctccccaggaaatcccatgacaaactggcctctggctggcgcgctgattagacttcagttcctgaaaaggaccagtggagggaagagctatacttctggagaagtaggcctggagttactacagtatgggggaaaagggtcgagttagaacaaagctaaggcaattcctattgcttccttgcgcaacttctcaaaacgatgaaagtcagaaggctgtcaaactcaaatatctttgcaaacagtttgaatactgtgaattcattacgaagaatgttcgagagaaagcaggggtctaatccaaaagaaatgtcattaaccaatactccaagtccttgagttttgttatatctgaactagttgaactgtgactgacaggtaatcctaatatatccaaatccaactgaataccaaattgagatggcaaatttttgtttgatataagttagcttgttagcatatgccctagagggcctccatccctgtattctaatgtttttactcaaagctctagcctttaggataggtgaatatgtaaatcttttatcactttctcaaattcaaactaaaggggaaagatcaaaccccttcccttcctacctgttttctgagctggctgacttgccagccacaagctgctcttgcagagttcttaccattcctgtaaatgttttgacttgttgcagaaattcctatctactttattaagcagtattgatctgactgtggaaacatcctctcacttgcattcttttaacttaaaactatttaagaactgatgttccgattattgtatatatttttctaaaaaccaaataaagctacctatgaaaatgaa

SEQ ID NO: 121171 - DNA, 1365 bp, Artificial Sequence
  derived and/or modified sequence
atgctggccgagaacctggtggaggagttcgagatgaaggaggacgagccctggtacgaccaccaggacctgcagcaggacctgcagctggccgccgagctgggcaagaccctgctggacagaaacaccgagctggaggacagcgtgcagcagatgtacaccaccaaccaggagcagctgcaggagatcgagtacctgaccaagcaggtggagctgctgagacagatgaacgagcagcacgccaaggtgtacgagcagctggacgtgaccgccagagagctggaggagaccaaccagaagctggtggccgacagcaaggccagccagcagaagatcctgagcctgaccgagaccatcgagtgcctgcagaccaacatcgaccacctgcagagccaggtggaggagctgaagagcagcggccagggcagaagaagccccggcaagtgcgaccaggagaagcccgcccccagcttcgcctgcctgaaggagctgtacgacctgagacagcacttcgtgtacgaccacgtgttcgccgagaagatcaccagcctgcagggccagcccagccccgacgaggaggagaacgagcacctgaagaagaccgtgaccatgctgcaggcccagctgagcctggagagacagaagagagtgaccatggaggaggagtacggcctggtgctgaaggagaacagcgagctggagcagcagctgggcgccaccggcgcctacagagccagagccctggagctggaggccgaggtggccgagatgagacagatgctgcagagcgagcaccccttcgtgaacggcgtggagaagctggtgcccgacagcctgtacgtgcccttcaaggagcccagccagagcctgctggaggagatgttcctgaccgtgcccgagagccacagaaagcccctgaagagaagcagcagcgagaccatcctgagcagcctggccggcagcgacatcgtgaagggccacgaggagacctgcatcagaagagccaaggccgtgaagcagagaggcatcagcctgctgcacgaggtggacacccagtacagcgccctgaaggtgaagtacgaggagctgctgaagaagtgccaggaggagcaggacagcctgagccacaaggccgtgcagaccagcagagccgccgccaaggacctgaccggcgtgaacgcccagagcgagcccgtggccagcggctgggagctggccagcgtgaaccccgagcccgtgagcagccccaccaccccccccgagtacaaggccctgttcaaggagatcttcagctgcatcaagaagaccaagcaggagatcgacgagcagagaaccaagtacagaagcctgagcagccacagctag

SEQ ID NO: 121172 - protein, 265 aa, Artificial Sequence
  derived and/or modified sequence
MYVGYVLDKDSPVYPGPARPASLGLGPQAYGPPAPPPAPPQYPDFSSYSHVEPAPAPPTAWGAPFPAPKDDWAAAYGPGPAAPAASPASLAFGPPPDFSPVPAPPGPGPGLLAQPLGGPGTPSSPGAQRPTPYEWMRRSVAAGGGGGSGKTRTKDKYRVVYTDHQRLELEKEFHYSRYITIRRKSELAANLGLTERQVKIWFQNRRAKERKVNKKKQQQQQPPQPPMAHDITATPAGPSLGGLCPSNTSLLATSSPMPVKEEFLP

SEQ ID NO: 121173 - protein, 154 aa, Artificial Sequence [sequence omitted]

SEQ ID NO: 121174 - protein, 60 aa, Artificial Sequence
  derived and/or modified sequence
MRGGPRGHHVCGLCAGQGFARVPRPSQASQPRPGPASLCPSNTSLLATSSPMPVKEEFLP

SEQ ID NO: 121175 - DNA, 1772 bp, Artificial Sequence
  derived and/or modified sequence
aggacagccgagttcaggtgagcggttgctcgtcgtcggggcggccggcagcggcggctccagggcccagcatgcgcgggggaccccgcggccaccatgtatgtgggctatgtgctggacaaggattcgcccgtgtaccccggcccagccaggccagccagcctcggcctgggcccgcaagcctacggccccccggccccgcccccggcgcccccgcagtaccccgacttctccagctactctcacgtggagccggcccccgcgcccccgacggcctggggggcgcccttccctgcgcccaaggacgactgggccgccgcctacggcccgggccccgcggcccctgccgccagcccagcttcgctggcattcgggccccctccagactttagcccggtgccggcgccccctgggcccggcccgggcctcctggcgcagcccctcgggggcccgggcacaccgtcctcgcccggagcgcagaggccgacgccctacgagtggatgcggcgcagcgtggcggccggaggcggcggtggcagcggtaagactcggaccaaggacaagtaccgcgtggtctacaccgaccaccaacgcctggagctggagaaggagtttcattacagccgttacatcacaatccggcggaaatcagagctggctgccaatctggggctcactgaacggcaggtgaagatctggttccaaaaccggcgggcaaaggagcgcaaagtgaacaagaagaaacagcagcagcaacagcccccacagccgccgatggcccacgacatcacggccaccccagccgggccatccctggggggcctgtgtcccagcaacaccagcctcctggccacctcctctccaatgcctgtgaaagaggagtttctgccatagccccatgcccagcctgtgcgccgggggacctggggactcgggtgctgggagtgtggctcctgtgggcccaggaggtctggtccgagtctcagccctgaccttctgggacatggtggacagtcacctatccaccctctgcatccccttggcccatctgtgcagtaagcctgttggataaagaccttccagctcctgtgttctagacctctgggggataagggagtccagggtggatgatctcaatctcccgtgggcatctcaagccccaaatggttgggggaggggcctagacaaggctccaggccccacctcctcctccatacgttcagaggtgcagctggaggctgctgtggggaccacactgatcctggagaaaagggatggagctgaaaaagatggaatgcttgcagagcatgacctgaggagggaggaacgtggtcaactcacacctgcctcttcctgcagcctcacttctacctgcccccatcataagggcactgagcccttcccaggctggatactaagcacaaagcccatagcactgggctctgatggctgctccactgggttacagaatcacagccctcatgatcattctcagtgagggctctggattgagagggaggccctgggaggagagaagggggcagagtcttccctaccaggtttctacacccccgccaggctgcccatcagggcccagggagcccccagaggactttattcggaccaagcagagctcacagctggacaggtgttgtatatagagtggaatctcttggatgcagcttcaagaataaatttttcttctcttttcaaaaatgtataaaaatcattatacatagcattaaagaaacatttttgagaagtacaaatca

SEQ ID NO: 121176 - DNA, 798 bp, Artificial Sequence
  derived and/or modified sequence
atgtacgtgggctacgtgctggacaaggacagccccgtgtaccccggccccgccagacccgccagcctgggcctgggcccccaggcctacggcccccccgcccccccccccgcccccccccagtaccccgacttcagcagctacagccacgtggagcccgcccccgccccccccaccgcctggggcgcccccttccccgcccccaaggacgactgggccgccgcctacggccccggccccgccgcccccgccgccagccccgccagcctggccttcggccccccccccgacttcagccccgtgcccgccccccccggccccggccccggcctgctggcccagcccctgggcggccccggcacccccagcagccccggcgcccagagacccaccccctacgagtggatgagaagaagcgtggccgccggcggcggcggcggcagcggcaagaccagaaccaaggacaagtacagagtggtgtacaccgaccaccagagactggagctggagaaggagttccactacagcagatacatcaccatcagaagaaagagcgagctggccgccaacctgggcctgaccgagagacaggtgaagatctggttccagaacagaagagccaaggagagaaaggtgaacaagaagaagcagcagcagcagcagcccccccagccccccatggcccacgacatcaccgccacccccgccggccccagcctgggcggcctgtgccccagcaacaccagcctgctggccaccagcagccccatgcccgtgaaggaggagttcctgccctag

SEQ ID NO: 121177 - DNA, 798 bp, Artificial Sequence
  derived and/or modified sequence
atgtatgtgggatacgtcctggataaggattccccggtgtacccagggccggcccgcccagcaagtcttggactgggtcctcaggcatacggcccgcccgctccaccccccgccccaccccagtatcctgacttttcatcctactctcatgtggaaccagctcctgccccacccaccgcctggggcgcccccttccctgcccccaaagacgactgggccgccgcctacgggccaggtccggcggccccagctgcgtccccggccagtttagccttcggtcccccacccgactttagcccagtgccagcacctccaggccccgggccgggcctgctggcacagcccctgggggggcccggaacccctagcagtcccggagcccagagacccactccatatgagtggatgagacgttccgttgcagccggcggaggcgggggtagcggtaaaacccgcactaaggataaatatagggtggtttacaccgaccaccagcgactggagttggaaaaggagtttcattatagtaggtacattaccataagacgcaaatcagagctggcggctaacctgggtttgacggagagacaggtgaagatctggtttcagaacagacgagctaaggaacggaaggtgaataaaaagaagcagcagcagcagcagcccccacagccaccaatggctcacgacatcaccgctacgcccgcaggcccaagtttgggtgggctgtgcccatctaatacgtcccttcttgcgacgtcctcccccatgcctgtgaaagaggagtttctcccttag

SEQ ID NO: 121178 - DNA, 798 bp, Artificial Sequence
  derived and/or modified sequence
atgtatgtgggctacgtgctggacaaggacagccctgtgtacccaggccctgcccggcctgccagcctgggcctgggcccccaggcctacggccccccagcccctcctccagccccaccccagtacccagacttcagcagctacagccacgtggagcccgccccagccccacccacagcctggggcgcccccttccctgcccccaaggatgactgggccgccgcctacggccctggccctgctgccccagctgccagccctgccagcctggccttcggccccccaccagacttcagccctgtgcctgcccctcctggccctggccctggcctgctggcccagcccctgggcggccctggcacccccagcagccctggggcccagaggcccaccccctatgagtggatgagaagatctgtggccgccggcggcggcggcggcagcggcaagaccaggaccaaggacaagtacagagtggtgtacacagaccaccagaggctggagctggagaaggagttccactacagccgctacatcaccatccggaggaagtctgagctggccgccaacctgggcctgacagagcggcaggtgaagatctggttccagaacagaagagccaaggagaggaaggtgaacaagaagaagcagcagcagcagcagcccccccagccccccatggcccatgacatcacagccaccccagctggccccagcctgggcggcctgtgccccagcaacaccagcctgctggccaccagcagccccatgcctgtgaaggaggagttcctgccctag

SEQ ID NO: 121179 - DNA, 798 bp, Artificial Sequence
  derived and/or modified sequence
atgtacgtgggctacgtgctggacaaggacagccccgtgtaccccggccctgctcgacccgcttcactcggcctgggacctcaggcatacgggcctcccgcacccccacctgctcctccacagtatcctgatttctcttcatattcccacgtggagcctgctcccgcccctcctaccgcgtggggagcacccttcccagcgccaaaggacgactgggccgctgcctacggcccaggcccagccgcccccgcagccagccctgcttcactcgccttcgggccccctcccgatttctcccccgttcccgctcctccaggtcctggacccggactgctggcacagccactcggcggtcccggcacacctagcagtcccggcgctcagcggcccacgccgtacgagtggatgcgccggtcagtagctgctggagggggcggcggctctgggaagacccgaacaaaagacaagtatagagtggtatacactgatcaccagaggctcgagcttgagaaggaattccattacagtcgatatatcacaatccggcgcaagagcgaactggccgccaatctcggactgaccgagaggcaggtgaaaatttggttccagaaccgacgtgcaaaagagcgcaaggtgaacaaaaaaaagcaacaacagcagcagcccccgcagccaccaatggctcacgacatcactgctacgcctgccggcccaagtctgggcggcctgtgcccaagtaacacttctctgctggcgacttcatcaccaatgcctgtcaaggaagaatttctcccctag

SEQ ID NO: 121180 - DNA, 798 bp, Artificial Sequence
  derived and/or modified sequence
atgtatgttggatatgttctggataaggatagcccagtctatcctgggccagctcgcccagcttctctcggcctagggccacaggcctacggccctccagcccctcctccggctccgccacagtaccccgatttttcttcctacagtcatgtggaacccgctccggcaccccctaccgcttggggcgctcccttccccgcacccaaagacgactgggcagcagcatatggccctggacccgcagccccagctgcctccccagcatcgctggcatttggtccaccacccgatttttcaccagtacccgcaccgccaggaccgggacctggtctcctagcacagccgctgggtggccctggcactccctcatcccctggagcccaacgtcctacaccctacgagtggatgcggcgaagcgtggccgcaggcggtggtgggggttccggcaaaacacgcaccaaggacaagtatagggtagtgtacaccgaccaccagcggctggaactggagaaagagtttcactactccagatacataactatccgcagaaaatctgagctagccgcaaatctgggacttaccgagagacaggtgaaaatttggtttcagaacagacgggcaaaggagcggaaggtgaataagaaaaaacagcagcagcagcagccacctcagccacccatggcccatgatataaccgcaacaccagccggaccctcactgggaggactatgtcccagcaacaccagcctgctggccacttctagtcctatgccagttaaagaggagtttcttccttag

SEQ ID NO: 121181 - DNA, 465 bp, Artificial Sequence
  derived and/or modified sequence
atgtgttggacaaggattagacccgggactcccagcagtccaggcgcacagagacctacaccatacgagtggatgaggcgcagtgtcgcggctggcggtgggggaggctccggtaagactagaaccaaagataaatatagggtggtctacactgatcaccagcggcttgaactcgagaaggagttccactatagcaggtatattactatccgacgcaaaagcgagctggcagcgaacctcggacttactgagcggcaagtgaaaatttggtttcagaataggagagcaaaagaaagaaaagtcaataagaaaaagcagcagcaacaacagcctccacagccacctatggcccatgatatcaccgcgacccccgccggcccctctctgggaggcctttgtcctagcaatacgtccttgttagctacttccagtcctatgcctgtcaaggaggaatttctcccttag

SEQ ID NO: 121182 - DNA, 183 bp, Artificial Sequence
  derived and/or modified sequence
atgagaggcggacctaggggtcatcacgtttgtggactgtgcgccgggcaaggcttcgccagggtgccccggccctctcaggcctcccagccgcgtcctggtccggcttcgctctgcccctcaaatacaagtctgttagccacctcttctcctatgcccgtaaaagaggagtttttgccttag

SEQ ID NO: 121183 - DNA, 465 bp, Artificial Sequence
  derived and/or modified sequence
atgtgctggacccgcatccggcccggcacccccagcagccctggggcccagaggcccaccccctatgagtggatgagaagatctgtggccgccggcggcggcggcggcagcggcaagaccaggaccaaggacaagtacagagtggtgtacacagaccaccagaggctggagctggagaaggagttccactacagccgctacatcaccatccggaggaagtctgagctggccgccaacctgggcctgacagagcggcaggtgaagatctggttccagaacagaagagccaaggagaggaaggtgaacaagaagaagcagcagcagcagcagcccccccagccccccatggcccatgacatcacagccaccccagctggccccagcctgggcggcctgtgccccagcaacaccagcctgctggccaccagcagccccatgcctgtgaaggaggagttcctgccctag

SEQ ID NO: 121184 - DNA, 183 bp, Artificial Sequence
  derived and/or modified sequence
atgagaggaggcccccggggccaccacgtgtgtggcctgtgtgccggccagggctttgcccgggtgccccggcccagccaggccagccagcccaggcctggccctgccagcctgtgccccagcaacaccagcctgctggccaccagcagccccatgcctgtgaaggaggagttcctgccctag

SEQ ID NO: 121185 - DNA, 465 bp, Artificial Sequence
  derived and/or modified sequence
atgtgctggacccggatccggcccggcacccccagcagccccggcgcacaaaggcccactccgtacgaatggatgagaaggagcgtggctgccggcggcggaggtggttctggtaaaaccagaactaaagacaagtacagagtggtttacacggaccaccagcgcttggagctggaaaaagaattccactatagcaggtacataaccataaggcgtaaatctgaactggctgccaatctaggactgaccgagcgtcaggtaaagatctggtttcagaataggcgcgctaaggagcgaaaggtcaacaagaaaaagcagcagcaacaacagccgcctcagcccccaatggcacatgacatcacagccacccccgccggcccaagcctcggtggcctgtgcccttctaatacatcacttctcgccacgtccagccctatgccagtaaaagaggagttcctcccctag

SEQ ID NO: 121186 - DNA, 183 bp, Artificial Sequence
  derived and/or modified sequence
atgcggggcggcccccggggccaccacgtgtgcggcctgtgcgccggccagggttttgccagagtgccacgccctagccaggccagccaaccgcgaccaggccctgcatctctgtgtccatcaaatactagcttgctcgctacatcttcacccatgcccgttaaggaagaattcctgccatag

SEQ ID NO: 121187 - DNA, 465 bp, Artificial Sequence
  derived and/or modified sequence
atgtgctggactcgcattcggccaggtacaccgtctagccccggtgctcagcggccaactccctacgagtggatgcgtaggtccgtagcagctggaggcggaggtggcagcggcaaaacccggaccaaggacaaatacagagtggtatacaccgaccaccagcgcctggaactcgagaaagaatttcactattccaggtacattacgattcggaggaagtcggagctggcggctaacctgggcttgacggaacgacaggtgaagatttggttccagaatagacgggctaaagagcggaaggtgaataagaaaaagcagcaacaacagcagccccctcagccaccaatggctcacgatatcacagccacgcccgcaggacccagcttgggaggtctgtgtcccagtaatacgtccctgttagccaccagctctccaatgcccgtgaaggaagaattcctgccatag

SEQ ID NO: 121188 - DNA, 183 bp, Artificial Sequence
  derived and/or modified sequence
atgaggggaggtcctcgcggacaccacgtctgtgggctgtgtgccggacaaggctttgctcgggtaccgagaccctctcaggcctcgcagcctcggcctggaccagcatctctttgcccaagcaatacaagcttgctagccactagcagccccatgcctgttaaggaagagtttttaccttag

SEQ ID NO: 121189 - DNA, 2743 bp, Artificial Sequence
  derived and/or modified sequence
aggtgagcggttgctcgtcgtcggggcggccggcagcggcggctccagggcccagcatgcgcgggggaccccgcggccaccatgtatgtgggctatgtgctggacaaggattcgcccgtgtaccccggcccagccaggccagccagcctcggcctgggcccgcaagcctacggccccccggccccgcccccggcgcccccgcagtaccccgacttctccagctactctcacgtggagccggcccccgcgcccccgacggcctggggggcgcccttccctgcgcccaaggacgactgggccgccgcctacggcccgggccccgcggcccctgccgccagcccagcttcgctggcattcgggccccctccagactttagcccggtgccggcgccccctgggcccggcccgggcctcctggcgcagcccctcgggggcccgggcacaccgtcctcgcccggagcgcagaggccgacgccctacgagtggatgcggcgcagcgtggcggccggaggcggcggtggcagcggtaagactcggaccaaggacaagtaccgcgtggtctacaccgaccaccaacgcctggagctggagaaggagtttcattacagccgttacatcacaatccggcggaaatcagagctggctgccaatctggggctcactgaacggcaggtgaagatctggttccaaaaccggcgggcaaaggagcgcaaagtgaacaagaagaaacagcagcagcaacagcccccacagccgccgatggcccacgacatcacggccaccccagccgggccatccctggggggcctgtgtcccagcaacaccagcctcctggccacctcctctccaatgcctgtgaaagaggagtttctgccatagccccatgcccagcctgtgcgccgggggacctggggactcgggtgctgggagtgtggctcctgtgggcccaggaggtctggtccgagtctcagccctgaccttctgggacatggtggacagtcacctatccaccctctgcatccccttggcccatctgtgcagtaagcctgttggataaagaccttccagctcctgtgttctagacctctgggggataagggagtccagggtggatgatctcaatctcccgtgggcatctcaagccccaaatggttgggggaggggcctagacaaggctccaggccccacctcctcctccatacgttcagaggtgcagctggaggctgctgtggggaccacactgatcctggagaaaagggatggagctgaaaaagatggaatgcttgcagagcatgacctgaggagggaggaacgtggtcaactcacacctgcctcttcctgcagcctcacttctacctgcccccatcataagggcactgagcccttcccaggctggatactaagcacaaagcccatagcactgggctctgatggctgctccactgggttacagaatcacagccctcatgatcattctcagtgagggctctggattgagagggaggccctgggaggagagaagggggcagagtcttccctaccaggtttctacacccccgccaggctgcccatcagggcccagggagcccccagaggactttattcggaccaagcagagctcacagctggacaggtgttgtatatagagtggaatctcttggatgcagcttcaagaataaatttttcttctcttttcaaaaatgtataaaaatcattatacatagcattaaagaaacatttttgagaagtacaaatcatcctcaccttccccagcaattgtgtattcctttcccgtttgtttaggcccacaacaaggtcacctttaaaatacatttgaaagatcaaaacagaacaccattcgtttaggtctatgagactacgtaaaaatgtgagtccattttgtaagcagattcatcagactcaacatatcagtcttttgaatttttcagatatgttcagttcaggtttttctttcaataatgacattcattgctcaccccatgtgctacgcgtggctgggcctgggaagcacacagtccttgtcccctagactggagaaggggtgcgagatcatgtcttgggaagatgtggagggggaaggttacagagaagggcatctccagggtaggagagcaagatctagagggggagaatgcattcagagtccatgtggtctgggcagctggagcaggagagaagccacaaagcccccctcagggtctgacttcaggggtcctgaattgctctgcagaagtccccagtccagtggggaagactgctatgcacacagatgacactaatataacaggataagggccaatctgagcgtcaggggagccagggcatccaacgagagcagagcacatgcctagcttatcctggaaggcttcctggagtaggtaatgtttgaactgagactgaaaaggactagcgagtatggatcaggccaagaagggaataaaggagaaaaggaacttgagcaatatggactgaaagtataattttttttgaactcgggagtctactacccggggccttctctccccgggggctctggtgccagctgcctgcccctctgtttactgttctgggaggtggccaggccataaaaagtgtgcacagcctgcctgacatcgccctttgctcccatgataacagtgcacaaggtggatcctggcctggcacaggcccctgaagtgcagcaggcacttctctctctcctcctaccagtggcctgggagac

SEQ ID NO: 121190 - DNA, 1302 bp, Artificial Sequence
  derived and/or modified sequence
gtgagcggttgctcgtcgtcggggcggccggcagcggcggctccagggcccagcatgcgcgggggaccccgcggccaccatgtatgtgggctatgtgctggacaaggattcgcccgggcacaccgtcctcgcccggagcgcagaggccgacgccctacgagtggatgcggcgcagcgtggcggccggaggcggcggtggcagcggtaagactcggaccaaggacaagtaccgcgtggtctacaccgaccaccaacgcctggagctggagaaggagtttcattacagccgttacatcacaatccggcggaaatcagagctggctgccaatctggggctcactgaacggcaggtgaagatctggttccaaaaccggcgggcaaaggagcgcaaagtgaacaagaagaaacagcagcagcaacagcccccacagccgccgatggcccacgacatcacggccaccccagccgggccatccctggggggcctgtgtcccagcaacaccagcctcctggccacctcctctccaatgcctgtgaaagaggagtttctgccatagccccatgcccagcctgtgcgccgggggacctggggactcgggtgctgggagtgtggctcctgtgggcccaggaggtctggtccgagtctcagccctgaccttctgggacatggtggacagtcacctatccaccctctgcatccccttggcccatctgtgcagtaagcctgttggataaagaccttccagctcctgtgttctagacctctgggggataagggagtccagggtggatgatctcaatctcccgtgggcatctcaagccccaaatggttgggggaggggcctagacaaggctccaggccccacctcctcctccatacgttcagaggtgcagctggaggctgctgtggggaccacactgatcctggagaaaagggatggagctgaaaaagatggaatgcttgcagagcatgacctgaggagggaggaacgtggtcaactcacacctgcctcttcctgcagcctcacttctacctgcccccatcataagggcactgagcccttcccaggctggatactaagcacaaagcccatagcactgggctctgatggctgctccactgggttacagaatcacagccctcatgatcattctcagtgagggctctggattgagagggaggccctgggaggagagaagggggcagagtcttccctaccaggtttctacacccccgccaggctgcccatcagggcccagggagcccccagaggactttattcggaccaagcagagctcaca

SEQ ID NO: 121191 - DNA, 982 bp, Artificial Sequence
  derived and/or modified sequence
gtgagcggttgctcgtcgtcggggcggccggcagcggcggctccagggcccagcatgcgcgggggaccccgcggccaccatgtatgtgggctatgtgctggacaaggattcgcccgtgtaccccggcccagccaggccagccagcctcggcctgggcccgcaagcctgtgtcccagcaacaccagcctcctggccacctcctctccaatgcctgtgaaagaggagtttctgccatagccccatgcccagcctgtgcgccgggggacctggggactcgggtgctgggagtgtggctcctgtgggcccaggaggtctggtccgagtctcagccctgaccttctgggacatggtggacagtcacctatccaccctctgcatccccttggcccatctgtgcagtaagcctgttggataaagaccttccagctcctgtgttctagacctctgggggataagggagtccagggtggatgatctcaatctcccgtgggcatctcaagccccaaatggttgggggaggggcctagacaaggctccaggccccacctcctcctccatacgttcagaggtgcagctggaggctgctgtggggaccacactgatcctggagaaaagggatggagctgaaaaagatggaatgcttgcagagcatgacctgaggagggaggaacgtggtcaactcacacctgcctcttcctgcagcctcacttctacctgcccccatcataagggcactgagcccttcccaggctggatactaagcacaaagcccatagcactgggctctgatggctgctccactgggttacagaatcacagccctcatgatcattctcagtgagggctctggattgagagggaggccctgggaggagagaagggggcagagtcttccctaccaggtttctacacccccgccaggctgcccatcagggcccagggagcccccagaggactttattcggaccaagcagagctcaca

SEQ ID NO: 121192 - DNA, 465 bp, Artificial Sequence
  derived and/or modified sequence
atgtgctggaccagaatcagacccggcacccccagcagccccggcgcccagagacccaccccctacgagtggatgagaagaagcgtggccgccggcggcggcggcggcagcggcaagaccagaaccaaggacaagtacagagtggtgtacaccgaccaccagagactggagctggagaaggagttccactacagcagatacatcaccatcagaagaaagagcgagctggccgccaacctgggcctgaccgagagacaggtgaagatctggttccagaacagaagagccaaggagagaaaggtgaacaagaagaagcagcagcagcagcagcccccccagccccccatggcccacgacatcaccgccacccccgccggccccagcctgggcggcctgtgccccagcaacaccagcctgctggccaccagcagccccatgcccgtgaaggaggagttcctgccctag

SEQ ID NO: 121193 - DNA, 183 bp, Artificial Sequence
  derived and/or modified sequence
atgagaggcggccccagaggccaccacgtgtgcggcctgtgcgccggccagggcttcgccagagtgcccagacccagccaggccagccagcccagacccggccccgccagcctgtgccccagcaacaccagcctgctggccaccagcagccccatgcccgtgaaggaggagttcctgccctag

SEQ ID NO: 121194 - protein, 281 aa, Artificial Sequence
  derived and/or modified sequence
MSHGTYYECEPRGGQQPLEFSGGRAGPGELGDMCEHEASIDLSAYIESGEEQLLSDLFAVKPAPEARGLKGPGTPAFPHYLPPDPRPFAYPPHTFGPDRKALGPGIYSSPGSYDPRAVAVKEEPRGPEGSRAASRGSYNPLQYQVAHCGQTAMHLPPTLAAPGQPLRVLKAPLATAAPPCSPLLKAPSPAGPLHKGKKAVNKDSLEYRLRRERNNIAVRKSRDKAKRRILETQQKVLEYMAENERLRSRVEQLTQELDTLRNLFRQIPEAANLIKGVGGCS

SEQ ID NO: 121195 - DNA, 1250 bp, Artificial Sequence
  derived and/or modified sequence
gagagaggccacacaggagtgggtgacagaggagactgcagagggcaggtctagggcagaagatcgagagagggcaggcccaggtcaggaggaggtagagagagggcagccggagcaccccaaggggtgcctcaagagcaggtgggggcggggagccgagggggcgggccggccatgtcccacgggacctactacgagtgtgagccccggggtggccagcagccactcgagttctcagggggccgagctgggcccggggagctaggggacatgtgtgagcatgaggcctccattgacctctccgcctacatcgagtctggggaagagcagcttctctccgatctctttgccgtgaagccagcgcctgaggccagaggcctcaagggccccggaacccctgccttcccccactacttgccgcctgaccctcggccctttgcctaccctccacataccttcggcccagacaggaaggcgctggggcctggcatctacagcagcccagggagctacgaccccagggctgtggcggtgaaggaggagccccgggggccagagggcagccgagctgccagccgaggcagctacaatcccctgcagtaccaagtggcacactgtgggcagacagccatgcacctgcccccaactctggcagcacccggccagcctctgcgcgttctcaaggcccctttggccactgccgcacccccctgcagtcccctcctgaaggcgccctccccggctggccccttacacaagggcaagaaggcagtgaacaaagatagccttgagtaccggctgaggcgggagcgcaacaacatcgccgtgcgcaagagccgagacaaggccaagaggcgcattctggagacgcagcagaaggtgctggagtacatggcagagaacgagcgcctccgcagccgcgtggagcagctcacccaggagctagacaccctccgcaacctcttccgccagattcctgaggcggccaacctcatcaagggcgtggggggttgcagctgaggctggctggtggattgtgggcaccaggctccctggcacggcctaactctgcggacccccatcctgctgggggcctagaaccctgagacatagaccatggataaatggcaaccggggtggcaaagagggcaggacccagcataatgattatatggctgaataaagttgcactgtgactgggaaaaaaaaaaaaaaaaaaaaaaaaaaaaaaaaaaaaaaaaaaaaaaaaa

SEQ ID NO: 121196 - DNA, 846 bp, Artificial Sequence
  derived and/or modified sequence
atgagccacggcacctactacgagtgcgagcccagaggcggccagcagcccctggagttcagcggcggcagagccggccccggcgagctgggcgacatgtgcgagcacgaggccagcatcgacctgagcgcctacatcgagagcggcgaggagcagctgctgagcgacctgttcgccgtgaagcccgcccccgaggccagaggcctgaagggccccggcacccccgccttcccccactacctgccccccgaccccagacccttcgcctaccccccccacaccttcggccccgacagaaaggccctgggccccggcatctacagcagccccggcagctacgaccccagagccgtggccgtgaaggaggagcccagaggccccgagggcagcagagccgccagcagaggcagctacaaccccctgcagtaccaggtggcccactgcggccagaccgccatgcacctgccccccaccctggccgcccccggccagcccctgagagtgctgaaggcccccctggccaccgccgcccccccctgcagccccctgctgaaggcccccagccccgccggccccctgcacaagggcaagaaggccgtgaacaaggacagcctggagtacagactgagaagagagagaaacaacatcgccgtgagaaagagcagagacaaggccaagagaagaatcctggagacccagcagaaggtgctggagtacatggccgagaacgagagactgagaagcagagtggagcagctgacccaggagctggacaccctgagaaacctgttcagacagatccccgaggccgccaacctgatcaagggcgtgggcggctgcagctag

SEQ ID NO: 121197 - DNA, 846 bp, Artificial Sequence
  derived and/or modified sequence
atgtcccacggaacatactacgaatgcgagcctcgagggggtcaacagcctctcgaattcagtggcggacgcgcgggaccaggagaactgggcgatatgtgcgagcatgaggcttcaattgacctgagcgcttatattgaatcgggggaggagcagctgctatctgacctgttcgccgtgaaaccagcccctgaggcacggggcctcaagggaccgggcacacctgcctttccacactatcttcctccagacccacggcccttcgcctacccccctcatacttttggacctgacaggaaggccctggggcccgggatatactcaagccccggcagttacgacccccgggctgtcgcggtgaaagaggagcctaggggtcctgaaggcagtcgggctgcttcgcgtggatcatacaatccactccagtatcaagtcgcccactgcggccagaccgctatgcatctacctcctacactggccgcccctggacagccactcagagtcctcaaggcccctctggccacagcagctcccccatgcagcccattgctcaaggcacctagccccgccggaccactgcacaaagggaagaaagctgttaataaagatagtcttgagtaccgcctcaggcgagagaggaataatattgctgtgcggaagtctagagacaaggccaaaaggaggattctggaaacgcagcaaaaagttttagagtacatggccgagaacgaacggctgcgaagccgtgtagaacagttgacccaggaactggacactctgcgcaacctttttagacagatcccagaggccgccaacctgattaagggagtgggcggatgcagctag

SEQ ID NO: 121198 - DNA, 846 bp, Artificial Sequence
  derived and/or modified sequence
atgagccacggcacctactatgaatgtgagccccggggcggccagcagcccctggagttcagcggcggccgggccggccctggagagctgggggacatgtgtgagcacgaggccagcattgacctgagcgcctacatcgagagcggggaggagcagctgctgagtgacctgtttgctgtgaagccagcccctgaggcccggggcctgaagggccctggcaccccagccttcccccactacctgcccccagacccccggccctttgcctacccaccccacacctttggaccagacaggaaggccctgggccctggcatctacagcagccctggcagctatgaccccagggctgtggccgtgaaggaggagccccggggccctgagggcagccgggccgccagccggggcagctacaaccccctgcagtaccaggtggcccactgcggccagacagccatgcacctgccccccaccctggccgcccctggccagcccctgcgggtgctgaaggcccccctggccacagctgccccaccctgcagccccctgctgaaggcccccagccctgctggccccctgcacaagggcaagaaggctgtgaacaaggacagcctggagtaccgcctgcggcgggagaggaacaacattgctgtgaggaagagccgggacaaggccaagaggcgcatcctggagacccagcagaaggtgctggagtacatggccgagaatgaaaggctgcggagccgggtggagcagctgacccaggagctggacaccctgaggaacctcttccggcagatccctgaggccgccaacctgatcaagggcgtgggcggctgcagctag

SEQ ID NO: 121199 - DNA, 846 bp, Artificial Sequence
  derived and/or modified sequence
atgagccacggcacctactacgagtgcgagccccggggcggccagcagcctttggaattctccgggggaagggccggtcccggtgagctgggagacatgtgtgaacacgaagcatcgattgatctgagtgcatacatagaatccggcgaggagcagctgttgagcgacctatttgccgtaaaaccggccccagaggcccggggcctcaaagggcccggcacccctgcttttccacactatctcccacccgaccctaggcccttcgcctatccccctcacacattcggacccgatcggaaggcgctgggccccggaatttactcttctccaggcagttatgacccacgggctgtggcggtgaaggaggaaccgcgaggacctgaaggctcaagagcagcatcgcgcggatcctacaacccactgcagtaccaggttgcgcattgtgggcagactgcaatgcacctgccccccactctcgccgccccagggcaacctctacgggtgttaaaggctccactggccactgcggcacctccatgtagtccgctcctcaaagctccttcccctgccggcccactgcacaagggtaaaaaggccgtgaataaagacagtttggaatatcgtctgaggcgcgagaggaacaacatcgctgttcgaaaatctcgtgacaaggccaagcgtagaatcctggagacacagcagaaagtgttggaatacatggcagaaaacgagcgcttgcgctctcgcgtagaacagctcacccaggagctggacacccttcggaatctgtttcggcagataccagaggccgcaaatctgatcaagggtgtcgggggatgttcctag

SEQ ID NO: 121200 - DNA, 846 bp, Artificial Sequence
  derived and/or modified sequence
atgtcccacggcacctactacgagtgtgaacctcgcggaggacagcagcctctcgagttcagcggaggaagagctggtccaggcgagctgggggatatgtgtgagcacgaagcctcaatcgacttaagcgcatatatcgaaagtggagaggagcagcttctgagcgatctgttcgctgtcaagcctgctcccgaagccagagggttaaagggaccagggaccccagcctttccacactacctgccccctgatcccagaccatttgcctacccaccccacactttcggacctgacagaaaggcgctgggacctggtatctatagctcaccagggtcctacgatccccgagccgtagccgtcaaagaagagccgagagggccagaagggtcccgtgcagccagtagaggctcttacaatccacttcagtaccaagtggctcattgcggacagactgcaatgcacctgcccccaaccctggcggcaccaggacagcctttgcgagtgttaaaagctccgctggctactgcggctccaccgtgtagtcctctgctcaaagctccaagccctgcaggcccactgcacaagggaaaaaaggccgtaaataaggattctttggaatataggctgagacgagagcggaataatattgcagttaggaaaagtcgggacaaagccaagaggcgtattttagaaacacagcaaaaagtgttggagtacatggcggagaacgagcgactgcgtagccgagttgagcagttaacccaggagctggacacactccgtaacttattccgccaaataccagaggccgcaaatttgatcaagggggtaggaggatgcagctag

SEQ ID NO: 121201 - DNA, 1554 bp, Artificial Sequence
  derived and/or modified sequence
ggaacctcattctgcatagaactttttcaaagtcggagggaggaggttgctcagagtggggtgttgccctctgcgaggatttggagtcccctggcctcccagcagggagtggagaggcattcccagaagcatcagcttcgggcatctccagaaccctggcttggtccctgaccaaggagtgtccccaactgctgaataggccaggagtcgcctttctctaaggcttacatctctccctctggggtgtgtcctgcccctccctgagtcaccccaaggggagagaggggaaaaaagggaagagaagagaggcattgactacagaggaaggaaaaggaagcagagcagaggggggagagaggccacacaggagtgggtgacagaggagactgcagagggcaggtctagggcagaagatcgagagagggcaggcccaggtcaggaggaggtagagagagggcagccggagcaccccaaggggtgcctcaagagcaggtgggggcggggagccgagggggcgggccggccatgtcccacgggacctactacgagtgtgagccccggggtggccagcagccactcgagttctcagggggccgagctgggcccggggagctaggggacatgtgtgagcatgaggcctccattgacctctccgcctacatcgagtctggggaagagcagcttctctccgatctctttgccgtgaagccagcgcctgaggccagaggcctcaagggccccggaacccctgccttcccccactacttgccgcctgaccctcggccctttgcctaccctccacataccttcggcccagacaggaaggcgctggggcctggcatctacagcagcccagggagctacgaccccagggctgtggcggtgaaggaggagccccgggggccagagggcagccgagctgccagccgaggcagctacaatcccctgcagtaccaagtggcacactgtgggcagacagccatgcacctgcccccaactctggcagcacccggccagcctctgcgcgttctcaaggcccctttggccactgccgcacccccctgcagtcccctcctgaaggcgccctccccggctggccccttacacaagggcaagaaggcagtgaacaaagatagccttgagtaccggctgaggcgggagcgcaacaacatcgccgtgcgcaagagccgagacaaggccaagaggcgcattctggagacgcagcagaaggtgctggagtacatggcagagaacgagcgcctccgcagccgcgtggagcagctcacccaggagctagacaccctccgcaacctcttccgccagattcctgaggcggccaacctcatcaagggcgtggggggttgcagctgaggctggctggtggattgtgggcaccaggctccctggcacggcctaactctgcggacccccatcctgctgggggcctagaaccctgagacatagaccatggataaatggcaaccggggtggcaaagagggcaggacccagcataatgattatatggctgaataaagttgcactgtgactgggtg

SEQ ID NO: 121202 - protein, 722 aa, Artificial Sequence
  derived and/or modified sequence
MLTMGRLQLVVLGLTCCWAVASAAKLGAVYTEGGFVEGVNKKLGLLGDSVDIFKGIPFAAPTKALENPQPHPGWQGTLKAKNFKKRCLQATITQDSTYGDEDCLYLNIWVPQGRKQVSRDLPVMIWIYGGAFLMGSGHGANFLNNYLYDGEEIATRGNVIVVTFNYRVGPLGFLSTGDANLPGNYGLRDQHMAIAWVKRNIAAFGGDPNNITLFGESAGGASVSLQTLSPYNKGLIRRAISQSGVALSPWVIQKNPLFWAKKVAEKVGCPVGDAARMAQCLKVTDPRALTLAYKVPLAGLEYPMLHYVGFVPVIDGDFIPADPINLYANAADIDYIAGTNNMDGHIFASIDMPAINKGNKKVTEDFYKLVSEFTITKGLRGAKTTFDVYTESWAQDPSQENKKKTVVDFETDVLFLVPTEIALAQHRANAKSAKTYAYLFSHPSRMPVYPKWVGADHADDIQYVFGKPFATPTGYRPQDRTVSKAMIAYWTNFAKTGDPNMGDSAVPTHWEPYTTENSGYLEITKKMGSSSMKRSLRTNFLRYWTLTYLALPTVTDQEATPVPPTGDSEATPVPPTGDSETAPVPPTGDSGAPPVPPTGDSGAPPVPPTGDSGAPPVPPTGDSGAPPVPPTGDSGAPPVPPTGDAGPPPVPPTGDSGAPPVPPTGDSGAPPVTPTGDSETAPVPPTGDSGAPPVPPTGDSEAAPVPPTDDSKEAQMPAVIRF

SEQ ID NO: 121203 - protein, 687 aa, Artificial Sequence
  derived and/or modified sequence
MGRLQLVVLGLTCCWAVASAAKLGAVYTEGGFVEGVNKKLGLLGDSVDIFKGIPFAAPTKALENPQPHPGWQGTLKAKNFKKRCLQATITQDSTYGDEDCLYLNIWVPQGRKQVSRDLPVMIWIYGGAFLMGSGHGANFLNNYLYDGEEIATRGNVIVVTFNYRVGPLGFLSTGDANLPGNYGLRDQHMAIAWVKRNIAAFGGDPNNITLFGESAGGASVSLQTLSPYNKGLIRRAISQSGVALSPWVIQKNPLFWAKKVAEKVGCPVGDAARMAQCLKVTDPRALTLAYKVPLAGLEYPMLHYVGFVPVIDGDFIPADPINLYANAADIDYIAGTNNMDGHIFASIDMPAINKGNKKVTEEDFYKLVSEFTITKGLRGAKTTFDVYTESWAQDPSQENKKKTVVDFETDVLFLVPTEIALAQHRANAKDPNMGDSAVPTHWEPYTTENSGYLEITKKMGSSSMKRSLRTNFLRYWTLTYLALPTVTDQEATPVPPTGDSEATPVPPTGDSETAPVPPTGDSGAPPVPPTGDSGAPPVPPTGDSGAPPVPPTGDSGAPPVPPTGDSGAPPVPPTGDSGAPPVPPTGDSGAPPVPPTGDSGAPPVPPTGDAGPPPVPPTGDSGAPPVPPTGDSGAPPVTPTGDSETAPVPPTGDSGAPPVPPTGDSEAAPVPPTDDSKEAQMPAVIRF

SEQ ID NO: 121204 - protein, 756 aa, Artificial Sequence
  derived and/or modified sequence
MLTMGRLQLVVLGLTCCWAVASAAKLGAVYTEGGFVEGVNKKLGLLGDSVDIFKGIPFAAPTKALENPQPHPGWQGTLKAKNFKKRCLQATITQDSTYGDEDCLYLNIWVPQGRKQVSRDLPVMIWIYGGAFLMGSGHGANFLNNYLYDGEEIATRGNVIVVTFNYRVGPLGFLSTGDANLPGNYGLRDQHMAIAWVKRNIAAFGGDPNNITLFGESAGGASVSLQTLSPYNKGLIRRAISQSGVALSPWVIQKNPLFWAKKVAEKVGCPVGDAARMAQCLKVTDPRALTLAYKVPLAGLEYPMLHYVGFVPVIDGDFIPADPINLYANAADIDYIAGTNNMDGHIFASIDMPAINKGNKKVTEEDFYKLVSEFTITKGLRGAKTTFDVYTESWAQDPSQENKKKTVVDFETDVLFLVPTEIALAQHRANAKSAKTYAYLFSHPSRMPVYPKWVGADHADDIQYVFGKPFATPTGYRPQDRTVSKAMIAYWTNFAKTGDPNMGDSAVPTHWEPYTTENSGYLEITKKMGSSSMKRSLRTNFLRYWTLTYLALPTVTDQEATPVPPTGDSEATPVPPTGDSETAPVPPTGDSGAPPVPPTGDSGAPPVPPTGDSGAPPVPPTGDSGAPPVPPTGDSGAPPVPPTGDSGAPPVPPTGDSGAPPVPPTGDSGAPPVPPTGDAGPPPVPPTGDSGAPPVPPTGDSGAPPVTPTGDSETAPVPPTGDSGAPPVPPTGDSEAAPVPPTDDSKEAQMPAVIRF

SEQ ID NO: 121205 - DNA, 2169 bp, Artificial Sequence
  derived and/or modified sequence
atgctgacaatgggccggctccagctggtggtgctggggctcacatgttgctgggccgtggctagtgccgcaaagcttggagccgtgtacaccgaaggcggctttgttgagggagtaaataagaaactcggactgttgggagactccgtggacatctttaagggcataccctttgccgctcctaccaaagcccttgagaacccgcagccacacccagggtggcaaggcaccctgaaggctaaaaacttcaagaagcgatgtctgcaggcaactataacgcaggatagtacatatggagacgaggactgtctttaccttaacatctgggttccccagggccgtaagcaggtcagcagagatctaccggtgatgatctggatctatggtggcgcattcctgatgggatccggacacggagctaacttcctgaataactatctgtacgatggggaggaaattgccacgcggggcaacgttattgtggtgacttttaattatcgggtgggtccgctaggatttctgtccaccggcgacgcgaaccttccaggcaactatggccttcgagaccagcacatggccattgcttgggtgaagcgtaatatcgctgctttcggcggtgaccccaataacattacgctcttcggggagtccgccggcggtgcttccgtgtctctgcagactcttagcccatacaataagggtctcatccgcagagcgatcagtcagtctggggtggcgttgtcaccttgggtgatccagaaaaatccgctgttctgggccaagaaagtggcggaaaaagtcggatgtcccgttggcgacgccgccagaatggcccagtgtctgaaggtgaccgaccctcgcgcactgacactggcttacaaagtccccctcgctggtctcgagtatccgatgctccactatgtgggattcgtgcctgtcatcgacggcgactttataccagcagatcctatcaacctctacgccaacgcggctgacattgattatattgctgggacaaataacatggacggccacattttcgctagtattgacatgcccgccatcaacaagggaaataagaaggtgacagaagacttctacaagcttgtttccgaattcacaataactaaggggttgagaggggcgaagacaactttcgacgtgtatactgaaagctgggcccaggacccctctcaggagaataagaaaaagacggtggtggattttgagaccgacgtgttgtttttagttcccaccgagatcgctctggctcaacaccgcgctaacgcaaaaagcgcaaaaacgtatgcctacttattctctcacccatctagaatgcctgtgtatccgaaatgggtgggcgccgatcatgctgatgatattcagtatgtgtttgggaaaccgttcgcaacccctaccggatatcggcctcaagatagaactgtcagcaaggccatgatcgcatactggaccaactttgccaagactggagatcctaacatgggtgatagcgcggtgcccacgcattgggagccctacactacagaaaactctggctatctggaaattaccaagaagatggggtcctcgtccatgaaaaggtcgttgcggaccaacttcctccggtactggacactgacttatcttgccctgcccactgttactgaccaagaggccacgcctgtccccccgaccggcgactccgaggccacccctgtgccccccacgggcgattcagaaactgcccctgtccctcctactggagatagcggcgcgccgccggtaccacccacaggcgacagcggcgcccccccggtgccgcccaccggcgactcaggagctccacccgtgcctcccaccggcgatagtggagcaccccccgtgccaccaaccggcgatagcggcgctcctccagtgcctcccacaggggatgcgggacctcctcccgttccaccgaccggggattccggagcgccccctgtgccaccgacgggtgattccggcgcaccacctgtgactcctactggggattctgagaccgccccagtgccccctacgggggacagcggagcccctcctgtgcccccaacaggagatagtgaggctgcccctgtccccccaacagacgactcaaaagaggctcagatgcccgcggtgatcagattttag

SEQ ID NO: 121206 - DNA, 2064 bp, Artificial Sequence
  derived and/or modified sequence
atgggcaggttacagcttgtcgttctagggttgacttgctgctgggcagtggcctcagcagctaagttgggggcagtgtataccgaaggaggatttgtcgagggcgtcaataagaagctgggcctactaggtgattcagttgatattttcaaaggcatccccttcgctgcacccaccaaggccttagaaaacccacagccacatccgggctggcagggtaccctgaaagctaagaatttcaaaaaaagatgcctccaagccactattacccaggatagcacctatggagacgaggattgtctgtatctgaatatctgggtaccgcagggacgaaagcaggtgtcacgagacctacccgtcatgatttggatttacggcggggcgttccttatggggtccggccacggtgcaaattttctgaacaattacctttatgacggcgaggaaatcgccacccgcggcaatgtgatcgtcgttacctttaactacagggttggtccactcggctttctgtcaacaggcgacgccaatctccctggaaactatggactgcgagaccaacacatggctatcgcctgggttaagaggaatattgcagcattcgggggtgatccaaataatatcacgctattcggggaaagtgccggaggcgctagcgtgtccctccagactctgtcaccttataacaaagggcttatcaggagagctatttcacagtcaggcgttgctctctccccatgggtcattcagaagaaccccctgttctgggccaagaaggttgcggaaaaggtgggatgccctgtgggtgacgcagctcgcatggcccagtgcctgaaggtaacagatcccagagccttaaccttggcctacaaagtgcccctcgccggcttggagtatcctatgctacattatgtgggattcgtccctgtcatcgatggcgatttcatcccagctgatccgatcaatctatacgcgaatgccgccgacatcgattacatagccggtaccaacaacatggacggtcatattttcgcgagcatcgacatgccagctataaacaagggcaataagaaagtgacggaggaggacttctacaaactggtgtctgaatttaccatcacaaaaggccttaggggtgccaagacaactttcgatgtttatactgagagttgggcccaagacccaagtcaggagaacaagaaaaagaccgtcgtggactttgagactgatgtcctatttctcgttcccactgagatcgcactggcccagcacagagctaacgcgaaagaccctaacatgggcgactccgccgtccccacccattgggagccatatacaaccgagaactctgggtacctggagatcactaaaaagatgggctcttcctccatgaaaaggagcctgcgaacaaacttccttcgatactggaccttaacatacctggcactgccaaccgttactgaccaagaagccactcctgttcccccaacaggggatagcgaagctactcctgtgcctcccaccggggatagcgaaaccgcacctgtgccccccaccggagacagtggcgcaccccccgtcccacccaccggagatagcggggctccccccgtgccccccaccggagatagcggcgcaccacctgtccccccaaccggggacagcggcgctccgccggtgccgcctaccggtgacagcggcgccccaccagtccctcctaccggcgacagcggtgcgcccccagtgccacctacaggagattccggcgctccccccgtcccaccaacaggcgatagcggggcaccgcccgtgcctcccactggcgatgccgggcccccacccgtgccccccacaggcgacagcggcgctccgcccgtcccccctacgggtgattcaggggcaccaccggtgacccctactggtgattcggaaaccgcacccgtgccccctactggtgactcgggcgctccgccggttccaccgacaggagactccgaagccgctccagtccccccaacggacgattccaaagaagctcagatgccggcagtgatacgcttttag

SEQ ID NO: 121207 - DNA, 2271 bp, Artificial Sequence
  derived and/or modified sequence
atgttgactatgggccgcctgcagttggtggtgttgggcctgacgtgttgctgggcggtagcctctgcagcaaaattgggcgctgtgtacactgaaggtggattcgtcgagggcgtaaacaagaaactagggctcctgggcgactctgttgatattttcaagggcattcccttcgccgccccaaccaaagcgctagagaaccctcaaccccacccgggctggcagggcacactcaaagccaagaacttcaagaaacgatgtctccaggcaactatcactcaggattccacgtacggcgatgaagactgtctgtacctcaacatttgggtgcctcagggccgcaagcaggtctctcgagacctgccagtgatgatttggatatacgggggcgcattcctgatgggatcaggacacggagccaacttccttaacaactatttgtatgatggagaggagatagcaacccgtggcaatgttatcgtcgtgactttcaactacagggttggacctctgggcttcctgtcaactggggatgccaacctcccgggtaactatggcttgagggaccagcatatggcaatcgcctgggtgaaacggaatatcgctgccttcgggggtgaccccaacaacattactctgtttggcgaatctgccggaggcgcgagcgttagtctacagactctgtcaccctacaacaaaggcctgattaggcgggctatcagccagtccggagtcgcactcagcccttgggtgattcagaagaaccctctattctgggccaagaaggtggctgaaaaagtcgggtgtccagttggcgatgcagccaggatggcgcaatgcctaaaagtaactgatcctagagccctcaccttagcatacaaggtgcctctagctggcctggaatatcccatgctgcattacgtcggctttgtgcctgtgattgacggcgactttatcccagccgaccctatcaatctgtacgcgaacgccgctgatatagactacatagcagggacaaataatatggatgggcacatctttgcaagtatcgacatgcccgcaattaataagggcaataagaaggttaccgaagaggatttttacaagctcgtgtctgagttcactattaccaaagggctccggggcgctaagacaacatttgacgtgtatacagaaagctgggcccaagatccttcacaggagaataagaagaaaacagtcgttgatttcgagacagatgttcttttcctggttccgaccgaaatagccctggcccaacatagggccaacgccaaatcagccaagacctacgcctacctgttctcccacccttcaagaatgcctgtataccctaaatgggtcggggctgatcacgctgacgacatccaatatgtgttcggtaaaccgttcgctactccaaccggctaccgccctcaggatcgtactgtgagtaaggcaatgattgcgtattggacgaacttcgcgaagaccggcgaccccaatatgggcgattccgcagtcccaacacactgggaaccgtacacaaccgagaattctggctacctagagatcactaagaaaatgggcagcagcagcatgaagcgatctcttaggaccaactttttaaggtactggaccttgacttatctcgccttgccaacagtcacagaccaggaagcaaccccagtgccccccacaggcgactctgaagcaaccccagtccctcctaccggggattccgagaccgccccagtgccacccaccggagattccggcgctccgccagtgccacctacaggggatagcggagccccacccgtgccacccacaggagatagcggggctcctcccgtgccgccgactggcgatagtggcgcccctccagttccgcccacaggggacagtggagccccccccgttcctccaactggagactcaggagcccctcccgtcccgccgaccggcgacagcggggcccccccagtgccaccaacgggcgatagcggtgcccctccagtgcccccaaccggggatgccggccctcctcctgtgccgcccacaggcgatagcggagcacctcccgtgcccccaacgggggactcgggcgctccaccggtaactccaacgggcgattcagaaaccgcacccgtcccacctacaggagattccggtgcccccccagtgccccccacgggcgattctgaagcagcccccgtgccccctactgatgactctaaagaagcacagatgcccgctgtgatccggttctag

SEQ ID NO: 121208 - DNA, 2169 bp, Artificial Sequence
  derived and/or modified sequence
atgctgaccatgggccgcctgcagctggtggtgctgggcctgacctgctgctgggccgtggccagcgctgccaagctgggcgctgtgtacacagaaggaggctttgtggagggcgtgaacaagaagctgggcctgctgggggacagcgtggacatcttcaagggcatcccctttgctgcccccaccaaggccctggagaacccccagccccaccctggctggcagggcaccctgaaggccaagaacttcaagaagcgctgcctgcaggccaccatcacccaggacagcacctatggagatgaggactgcctgtacctgaacatctgggtgccccagggcaggaagcaggtgtcccgggacctgcctgtgatgatctggatctacggcggggccttcctgatgggcagcggccacggggccaacttcctgaacaactacctgtatgatggagaggagatcgccaccagaggaaatgtcatcgtggtgaccttcaactacagagtgggccccctgggcttcctgagcactggagatgccaacctgcccggcaactacggcctgcgggaccagcacatggccatcgcctgggtgaagagaaatattgctgccttcggcggggaccccaacaacatcaccctgtttggagagagcgctgggggcgcctctgtgtccctgcagaccctgagcccctacaacaagggcctcatcagaagagccatcagccagagcggcgtggccctgagcccctgggtgatccagaagaaccccctcttctgggccaagaaggtggccgagaaggtgggctgccctgtgggagatgctgccaggatggcccagtgcctgaaggtgacagacccccgggccctgaccctggcctacaaggtgcccctggccggcctggagtaccccatgctgcactacgtgggctttgtgcctgtgattgatggagacttcatcccagctgaccccatcaacctgtatgccaatgctgctgacatcgactacatcgccggcaccaacaacatggatggccacatctttgccagcattgacatgcctgccatcaacaagggcaacaagaaggtgacagaggacttctacaagctggtgtctgagttcaccatcaccaagggcctgcggggggccaagaccacctttgatgtgtacacagagagctgggcccaggaccccagccaggagaacaagaagaagacagtggtggactttgaaacagatgtgctcttcctggtgcccacagaaattgccctggcccagcaccgggccaatgccaagagcgccaagacctacgcctacctgttcagccaccccagcaggatgcctgtgtaccccaagtgggtgggcgctgaccacgcagatgacatccagtatgtgtttgggaagccctttgccacccccaccggctaccggccccaggacagaacagtgtccaaggccatgattgcctactggaccaactttgccaagacaggagaccccaacatgggagacagcgctgtgcccacccactgggagccctacaccacagagaacagcggctacctggagatcaccaagaagatgggcagcagctccatgaagaggagcctgcggaccaacttcctgcgctactggaccctgacctacctggccctgcccaccgtgacagaccaggaggccacccctgtgcccccaactggagacagcgaggccacccctgtgccccccaccggggacagcgagacagcccctgtgcccccaactggagacagcggggcccctcctgtgccccccaccggggacagcggggcccctcctgtgcccccaactggagacagcggggcccctcctgtgccccccaccggggacagcggggcccctcctgtgcccccaactggagacagcggggcccctcctgtgcccccaactggagatgctggccccccacctgtgcccccaactggagacagcggggcccctcctgtgccccccaccggggacagcggggcccctcctgtgacccccactggagacagcgagacagcccctgtgccccccaccggggacagcggggcccctcctgtgcccccaactggagacagcgaggccgcccctgtgcccccaacagatgacagcaaggaggcccagatgcctgctgtgatccgcttctag

SEQ ID NO: 121209 - DNA, 2064 bp, Artificial Sequence
  derived and/or modified sequence
atgggccgcctgcagctggtggtgctgggcctgacctgctgctgggccgtggccagcgctgccaagctgggcgctgtgtacacagagggcggctttgtggagggcgtgaacaagaagctgggcctgctgggggacagcgtggacatcttcaagggcatcccctttgctgcccccaccaaggccctggagaacccccagccccaccctggctggcagggcaccctgaaggccaagaacttcaagaagcgctgcctgcaggccaccatcacccaggacagcacctatggagatgaggactgcctgtacctgaacatctgggtgccccagggcaggaagcaggtgtcccgggacctgcctgtgatgatctggatctatggaggagccttcctgatgggcagcggccatggagccaacttcctgaacaactacctgtatgatggagaggagatcgccaccagaggaaatgtgattgtggtgaccttcaactacagagtgggccccctgggcttcctgagcactggagatgccaacctgcccggcaactacggcctgcgggaccagcacatggccatcgcctgggtgaagaggaacattgctgcctttggaggagaccccaacaacatcaccctgtttggagagagcgctggaggagcctctgtgtccctgcagaccctgagcccctacaacaagggcctcatccggcgggccatcagccagagcggcgtggccctgagcccctgggtgatccagaagaaccccctcttctgggccaagaaggtggccgagaaggtgggctgccctgtgggagatgctgccaggatggcccagtgcctgaaggtgacagacccccgggccctgaccctggcctacaaggtgcccctggccggcctggagtaccccatgctgcactacgtgggctttgtgcctgtgattgatggagacttcatcccagctgaccccatcaacctgtatgccaatgctgctgacatcgactacatcgccggcaccaacaacatggatggccacatctttgccagcattgacatgcctgccatcaacaagggcaacaagaaggtgacagaggaggacttctacaagctggtgtctgagttcaccatcaccaagggcctgcggggggccaagaccacctttgatgtgtacacagagagctgggcccaggaccccagccaggagaacaagaagaagacagtggtggactttgaaacagatgtgctcttcctggtgcccacagaaattgccctggcccagcaccgggccaatgccaaggaccccaacatgggagacagcgctgtgcccacccactgggagccctacaccacagagaacagcggctacctggagatcaccaagaagatgggcagcagctccatgaagaggagcctgcggaccaacttcctgcgctactggaccctgacctacctggccctgcccaccgtgacagaccaggaggccacccctgtgcccccaactggagacagcgaggccacccctgtgccccccaccggggacagcgagacagcccctgtgcccccaactggagacagcggggcccctcctgtgccccccaccggggacagcggggcccctcctgtgcccccaactggagacagcggggcccctcctgtgccccccaccggggacagcggggcccctcctgtgcccccaactggagacagcggggcccctcctgtgccccccaccggggacagcggggcccctcctgtgcccccaactggagacagcggggcccctcctgtgccccccaccggggacagcggggcccctcctgtgcccccaactggagatgctggccccccacctgtgccccccaccggggacagcggggcccctcctgtgcccccaactggagacagcggggcccctcctgtgacccccaccggggacagcgagacagcccctgtgcccccaactggagacagcggggcccctcctgtgccccccaccggggacagcgaggccgcccctgtgcccccaacagatgacagcaaggaggcccagatgcctgctgtgatccgcttctag

SEQ ID NO: 121210 - DNA, 2271 bp, Artificial Sequence
  derived and/or modified sequence
atgctgaccatgggccgcctgcagctggtggtgctgggcctgacctgctgctgggccgtggccagcgctgccaagctgggcgctgtgtacacagaaggaggctttgtggagggcgtgaacaagaagctgggcctgctgggggacagcgtggacatcttcaagggcatcccctttgctgcccccaccaaggccctggagaacccccagccccaccctggctggcagggcaccctgaaggccaagaacttcaagaagcgctgcctgcaggccaccatcacccaggacagcacctatggagatgaggactgcctgtacctgaacatctgggtgccccagggcaggaagcaggtgtcccgggacctgcctgtgatgatctggatctacggcggggccttcctgatgggcagcggccacggggccaacttcctgaacaactacctgtatgatggagaggagatcgccaccagaggaaatgtcatcgtggtgaccttcaactacagagtgggccccctgggcttcctgagcactggagatgccaacctgcccggcaactacggcctgcgggaccagcacatggccatcgcctgggtgaagagaaatattgctgccttcggcggggaccccaacaacatcaccctgtttggagagagcgctgggggcgcctctgtgtccctgcagaccctgagcccctacaacaagggcctcatcagaagagccatcagccagagcggcgtggccctgagcccctgggtgatccagaagaaccccctcttctgggccaagaaggtggccgagaaggtgggctgccctgtgggagatgctgccaggatggcccagtgcctgaaggtgacagacccccgggccctgaccctggcctacaaggtgcccctggccggcctggagtaccccatgctgcactacgtgggctttgtgcctgtgattgatggagacttcatcccagctgaccccatcaacctgtatgccaatgctgctgacatcgactacatcgccggcaccaacaacatggatggccacatctttgccagcattgacatgcctgccatcaacaagggcaacaagaaggtgacagaggaggacttctacaagctggtgtctgagttcaccatcaccaagggcctgcggggggccaagaccacctttgatgtgtacacagagagctgggcccaggaccccagccaggagaacaagaagaagacagtggtggactttgaaacagatgtgctcttcctggtgcccacagagatcgccctggcccagcaccgggccaatgccaagagcgccaagacctacgcctacctgttcagccaccccagcaggatgcctgtgtaccccaagtgggtgggcgctgaccatgctgatgacatccagtatgtgtttgggaagccctttgccacccccaccggctaccggccccaggacagaacagtgtccaaggccatgattgcctactggaccaactttgccaagacaggagaccccaacatgggagacagcgctgtgcccacccactgggagccctacaccacagaaaattctggctacctggagatcaccaagaagatgggcagcagctccatgaagaggagcctgcggaccaacttcctgcgctactggaccctgacctacctggccctgcccaccgtgacagaccaggaggccacccctgtgccccccaccggggacagcgaggccacccctgtgcccccaactggagacagcgagacagcccctgtgccccccaccggggacagcggggcccctcctgtgcccccaactggagacagcggggcccctcctgtgccccccaccggggacagcggggcccctcctgtgcccccaactggagacagcggggcccctcctgtgccccccaccggggacagcggggcccctcctgtgcccccaactggagacagcggggcccctcctgtgccccccaccggggacagcggggcccctcctgtgcccccaactggagacagcggggcccctcctgtgcccccaactggagatgctggccccccacctgtgcccccaactggagacagcggggcccctcctgtgccccccaccggggacagcggggcccctcctgtgacccccactggagacagcgagacagcccctgtgccccccaccggggacagcggggcccctcctgtgcccccaactggagacagcgaggccgcccctgtgcccccaacagatgacagcaaggaggcccagatgcctgctgtgatccgcttctag

SEQ ID NO: 121211 - DNA, 2169 bp, Artificial Sequence
  derived and/or modified sequence
atgctgaccatgggccggctgcagctggtggtgctgggcctgacctgctgttgggctgtggcctccgccgcaaagctgggggcagtgtacacagaaggcggctttgtggagggcgtcaacaagaagctggggttgctgggcgattccgtggatatttttaaggggattccgtttgctgcgccgaccaaggcactggaaaatccacaacctcaccccggctggcagggaaccctgaaggcgaaaaattttaagaaacgctgtctgcaggccacaatcacccaagatagcacctatggcgatgaggactgcctttatctgaacatctgggtcccccagggaaggaagcaggtgagtcgagatttgccagtgatgatttggatctacggtggggcctttctgatgggaagcgggcatggtgccaattttctaaataattacctgtatgatggggaagaaattgctactagagggaacgtcattgtggtaacctttaattatagggtgggtcccctgggctttctgtctactggagacgcgaacctgccggggaattatggcctgagggaccagcacatggccatagcgtgggtaaaacggaatattgccgcattcggaggagatcccaacaatattaccctatttggcgaaagcgccggtggagcttcggtttccttacagacccttagcccctataataaggggctgattcggagagccatctctcagtcaggagtcgctcttagtccgtgggttatacagaaaaaccctctgttttgggccaagaaagtggctgagaaggtgggctgcccagtcggagacgcggcgaggatggcccaatgcttaaaagttaccgacccaagagctctgacccttgcctataaagtgcccctggcgggccttgaatatccgatgctgcactacgtcgggtttgtccccgttatcgatggcgacttcatccccgcggacccaatcaacctctacgctaatgctgctgatatcgactatattgccgggactaataatatggacggtcatatctttgcctctatcgatatgcctgctattaataaaggcaataagaaggtcacagaggacttctacaagctggtttcggagtttaccatcactaagggcctccgcggtgccaaaacaacgttcgatgtgtatacagaatcatgggcacaggacccatcccaagagaataaaaagaaaactgttgttgactttgagaccgacgtattgttcttggttcctacagagatagcactggcccagcatcgggccaacgcaaagagtgcaaaaacttatgcttacctgttctctcatccttcccggatgccagtgtatcctaagtgggtgggagccgaccatgccgacgatattcagtatgtcttcgggaagcccttcgcgacccccactgggtacagaccccaggaccgcactgtgtccaaggctatgatcgcctattggactaacttcgccaaaaccggggatcccaacatgggcgactctgccgtgccaactcactgggaaccttataccacggagaactctgggtatctggaaattactaagaagatggggtcttcttcgatgaaaagaagcctgcggactaatttccttagatactggaccctcacatatcttgccctgcccacagtcactgatcaggaggccactcccgtgccacctacgggagacagcgaggccacccccgtgcctccaacaggcgatagtgagacagctccggtgcctcccactggagatagtggcgcaccacctgtacctccaactggggactccggagccccacctgtgccgcctacgggggacagcggcgccccaccagttcctccaaccggagactctggagccccccccgtgccccccaccggggacagcggtgcgccgcctgtcccgcccaccggtgacgccggtcctccaccggtcccgccaaccggtgactccggggcaccccctgtgcctccgaccggagattccggagcccctcccgttacaccgacaggggatagcgagactgctcccgttccacccacaggggatagcggagccccaccagtgcccccgacaggagattctgaggccgctccagtaccacccacggatgattcaaaagaagctcagatgcccgcagtcataagattctag

SEQ ID NO: 121212 - DNA, 2064 bp, Artificial Sequence
  derived and/or modified sequence
atgggccggctgcagctggtggtgctgggcctgacctgctgctgggccgtcgcaagcgctgctaagctcggagctgtttacaccgaaggcggcttcgtggaaggcgtcaataaaaagttggggctgcttggagacagtgtcgacatttttaagggaatacccttcgccgctcctactaaggccctcgagaaccctcagccccacccaggctggcagggcacactgaaggctaaaaattttaagaagcggtgtctccaagcaaccataacccaggattccacgtacggggacgaggattgtctatatctgaatatctgggtgccacaaggtcgcaagcaggtgtcacgggacctgccagtcatgatttggatctatggaggtgcattcctcatggggagtggtcacggcgccaatttcctaaataattatctgtatgatggagaagaaatcgcaactagaggtaatgtaatcgttgtcacttttaactatagagtgggtcccttgggattcctcagcacaggcgacgcaaatttgcctggcaattatggtctgcgcgaccagcacatggctatcgcctgggttaagaggaacattgcagcgttcgggggggatcccaacaacattacgctattcggcgaaagcgcaggaggtgcctcggtcagtcttcagacattaagtccatacaacaagggcttgatcaggcgtgccatttcccagtctggagtagcgctgagcccttgggtgatccaaaaaaatccactgttctgggcaaagaaggtagcagaaaaagtgggttgccccgtgggggatgccgcgcgaatggcccagtgtctcaaggtgaccgacccacgtgctttaaccctcgcctataaggttccactggctgggttagagtaccccatgttgcactacgtaggattcgtgcccgttattgacggcgattttataccggccgaccctattaacttgtatgcgaatgccgcagacatcgactatatcgcaggcaccaacaacatggacggtcatatttttgctagcatcgacatgcctgccattaataaaggaaacaagaaagtgaccgaagaggacttttacaagctggttagcgagtttacaattaccaaaggcctgcgcggagccaaaaccacgttcgatgtctacactgagagctgggcccaggacccctctcaggagaacaagaagaagaccgtcgttgactttgagaccgacgtgctgttcttggtccctactgaaattgctctggcacaacacagggcaaatgccaaggatcccaatatgggcgactccgccgtgcccacccactgggaaccttacacaaccgaaaactctggatacctggagattactaaaaaaatgggtagtagtagtatgaaacgctctctgagaactaactttctcaggtattggaccctgacttatctcgcccttcctaccgtcactgatcaagaggcgacacccgtcccacctactggcgattcagaggcaacccctgtcccgcccaccggagacagcgaaaccgccccagtgccaccaaccggcgactccggagccccccccgtcccaccaacgggagacagcggagctccgcccgtaccaccaacaggagactctggagccccaccagtccctcccaccggcgacagtggcgcacctccggttcctcccactggcgatagcggagcacctcccgtccctcctactggggacagcggagcccctccggttcctccaacgggagactcaggcgcacctccagtacccccaacaggagactcaggagcacctcccgtgccccctactggcgacgcaggcccaccacccgtgccccccaccggcgacagtggtgctcccccggtgccccccaccggtgacagcggtgctccccctgtgacaccaacgggagattcagaaacagcccccgtgccaccaacgggcgacagtggggcccccccagttccacccaccggcgacagcgaggccgcccccgttcctcctaccgatgattctaaggaagcacagatgcctgcagtaatccgcttctag

SEQ ID NO: 121213 - DNA, 2271 bp, Artificial Sequence
  derived and/or modified sequence
atgctgaccatgggccggctgcagctggtggtgctgggcctgacctgctgttgggcagtcgcatccgcagctaagttaggagcagtatacacagagggaggatttgtggagggagtcaataaaaagttagggttactgggggattcggttgacatcttcaagggcataccctttgcggctcctacaaaggcattggaaaacccccagcctcatcccgggtggcaaggcacacttaaggcaaaaaacttcaaaaagcgctgtctccaggctactattacccaagattctacctacggagacgaagactgcttgtacctcaacatctgggtgccgcagggacgcaagcaagtgtcccgcgacctccctgtgatgatctggatatacggtggtgcctttttaatgggcagcggtcacggggctaacttcctaaacaattatctgtacgacggagaggaaatagcaacgcgcgggaatgtcatcgtggttacttttaattacagggtcggacccctgggttttctttctactggtgacgccaacctccccggtaactatggactccgggaccagcacatggcgattgcctgggtgaaacggaatatagcagctttcgggggcgatcctaataatatcacgctcttcggtgagtcagcaggcggggcatcagtgtctctccaaaccctatccccttacaacaaaggcctgatccgcagagctatctcccagtcaggggtagcactcagtccatgggtcattcaaaaaaacccattgttctgggctaagaaggtggctgagaaggtggggtgcccggttggagatgcggcaaggatggcacaatgcttgaaggtgacagacccgagagctctcaccctggcgtacaaggtgccactggcagggctggaatatcctatgctacattacgtcgggtttgtccctgtgatcgatggcgactttatccctgctgatcctataaacttatatgcaaacgctgcggatattgattacattgccggcactaataatatggatgggcacatctttgccagcatcgacatgccggctattaataagggaaataagaaggttacggaagaggacttctataagcttgtgtcagagttcactatcacaaaaggactgagaggggcgaagacgacatttgatgtttatacagaaagctgggcccaggacccttctcaggaaaacaaaaagaagacagtagtggatttcgagaccgacgtcctattcctggtgcccactgaaatcgccctggctcaacatcgagctaacgccaaatccgcaaaaacctacgcgtacctgtttagtcatcctagtcgaatgccagtgtaccctaagtgggtcggcgcggaccacgccgacgacattcagtacgtgtttggcaaacccttcgcgactcccacgggctatagacctcaggaccgcacagtaagcaaggcaatgattgcttactggacaaacttcgctaagaccggggatcccaacatgggcgattccgctgtgcccacccactgggagccctatactaccgaaaattccggttacttggaaatcactaagaaaatgggttcttcgtcaatgaaacggagtttgaggactaatttcctccgctactggacactgacatatctggcgcttcctacagtgacagaccaggaggccacccctgtgccccccacgggtgactccgaggccacgccagttcctcctacaggggatagcgagaccgcacccgttccccccacaggagacagcggggcgccccctgttcccccgactggggattctggagcaccaccagtaccacccacgggggattcaggcgctcccccagtgcccccaaccggagacagcggcgccccccctgtgcctccaacaggcgacagtggcgcaccgcccgtgccccccaccggagactctggcgccccgcccgttccacccacaggggatagtggagccccccctgtcccaccaacaggagatagcggggcacccccagtgcctccaaccggggatgccggcccgcctccagtccccccaacgggggacagcggcgctccacccgtcccgccgacaggtgacagtggagccccccctgtgacaccaactggtgatagtgagaccgcccccgtgcctcccacaggcgactctggtgcccccccagtgccaccaaccggcgacagcgaagccgcccccgtgccacctaccgacgactctaaggaggcacagatgcctgccgtaataagattctag

SEQ ID NO: 121214 - DNA, 2169 bp, Artificial Sequence
  derived and/or modified sequence
atgctcacaatggggaggctacagcttgtggtcctgggacttacatgctgctgggcagtggccagtgccgcaaaactcggcgctgtgtacacggagggtggtttcgtggagggcgtgaacaaaaaactgggcttactgggcgacagcgtcgatatttttaagggaataccttttgccgcacctactaaggcgcttgagaacccccagccccaccctggctggcaggggacattgaaggctaaaaatttcaaaaagcgctgcctccaggctacaatcactcaggactccacgtatggagacgaggactgcctgtatctgaatatctgggtgcctcaaggtcgaaagcaggtgagccgcgacctcccggtgatgatttggatttacggcggagcattcctgatgggttccggccacggagctaattttttgaataattacctgtacgacggcgaggagattgccacccggggaaatgtgattgtcgtgacattcaactacagagtaggaccactgggcttcctctccaccggagatgcgaacctgcctgggaattatgggttgagggatcagcacatggctatagcttgggtcaaacggaatatagccgcttttgggggtgaccccaacaatattacattattcggtgagtctgcaggcggtgcttctgtctcactacaaacgctgagcccttataacaagggactgatacgacgtgctattagccaaagcggagtcgcgttaagtccctgggtgatccagaaaaacccacttttttgggcaaagaaggtggctgagaaggttggctgcccagtaggtgacgccgcaaggatggcccagtgcctaaaagtgacagatccacgcgctcttacactggcctacaaggtgccactggccggactggaatatccaatgctacactacgtgggcttcgtaccggtgatcgatggcgatttcatccccgcagatccaatcaatctgtatgccaacgccgctgacatcgactacatagcgggtaccaacaatatggacggccatattttcgctagcatcgatatgcccgctattaataaaggcaataaaaaggtcacagaagacttctacaagttggtgagcgaatttacaataaccaagggtctgaggggagcgaagacaacattcgatgtgtacaccgaatcatgggcacaggatccaagtcaggagaacaagaaaaagacagttgtggatttcgaaaccgacgttctcttcctggtgcctactgagattgccctcgcccaacatagggctaatgctaagtcagcaaagacgtatgcctatctcttcagtcatccttctaggatgcccgtctacccaaaatgggtcggcgcagatcacgcagatgatatacagtacgtctttggaaaaccgttcgccacaccaacgggttataggccccaggaccgaacggtgtccaaagcgatgattgcctactggacgaactttgccaagaccggggatcccaacatgggggacagtgcagtccccacgcattgggaaccatacacaaccgaaaattccggctacctggagatcactaaaaagatgggtagttctagcatgaagcggtctctgagaacaaatttcctcaggtattggactctaacttacttagcactgcccacagtgaccgatcaggaggcgacccctgtccctcccaccggtgactccgaggcaactccagtgcctccaacgggggattctgagacggctccagtgccacccaccggggactctggggcacccccagtgcctcccacgggagatagcggcgctccacccgtacctccaaccggagacagtggcgctccaccggtgcccccaactggtgattcgggggctcctcccgttccccctaccggcgatagcggtgcaccaccggtcccccctactggcgatgccggaccccctcccgttcctcctaccggtgactcgggcgctcctcccgtccctccaacaggcgactccggggcacctcccgtgacacccaccggggattccgagacagcaccagtccccccaaccggcgactcaggggcaccacctgtcccaccgaccggtgacagcgaggccgctccggtccctcccacagatgacagcaaggaggcccagatgccagcagtcatccgattttag

SEQ ID NO: 121215 - DNA, 2064 bp, Artificial Sequence
  derived and/or modified sequence
atgggtcgtctgcagctcgtagtgctgggtttaacctgctgctgggcggtggcctctgctgccaaactgggagctgtatacacagagggcggatttgtggagggggtgaataaaaagctggggctcctaggggacagcgttgatatctttaaaggcattccattcgcagctcctactaaagcgctggaaaacccccagccgcaccccggatggcagggcacgctgaaagctaaaaatttcaaaaaacgttgtttgcaggccactatcactcaagattctacttatggagatgaagattgcctgtatctcaacatttgggttccccaggggagaaaacaggtgtcacgggatctgccagtcatgatctggatttatggcggtgcatttctgatgggatccggacatggcgcaaattttctcaacaactatctctacgatggtgaagaaattgccactcgcggaaatgtcatcgtggtgacatttaattacagagttggccctctcggttttttatccactggagacgcaaacttacccggaaactatggactaagagaccagcacatggccatcgcttgggttaaacgaaatattgccgctttcggcggagaccccaacaacattactctctttggcgagtcagccggaggtgccagtgtgagtttacagacgctgtccccatataacaaaggattgattcgcagggccatatcacagtccggcgtggccctctcaccttgggttattcaaaagaacccacttttctgggccaaaaaagttgcagagaaagtgggatgtcccgtgggcgatgctgcgcgaatggcccagtgcctgaaggtgaccgaccctcgggctctgactctggcctataaggttcctctggcagggctcgagtatcccatgctccactatgtggggtttgtccctgtgattgacggtgatttcattcctgccgatccaattaatctgtacgcgaacgcagctgacatcgactacatcgccggtactaacaacatggatgggcatattttcgcgagcatagatatgccggctattaataaggggaataaaaaggtaacagaggaggatttctacaaactcgtgtccgagttcacaattaccaagggcttacgtggagccaagacgaccttcgacgtgtacacagagagttgggcccaagacccaagccaggagaataagaagaaaacagttgtagacttcgagaccgatgtgctatttctcgttccaaccgaaatcgcccttgcccagcatagggctaacgccaaggatccaaatatgggcgactctgccgtgcctacccattgggagccctacactactgaaaacagcgggtacttagagatcacaaaaaaaatggggtcttcctccatgaaaagatccttgaggaccaatttcctgaggtactggaccctaacctatctggctctgccgaccgtcacggatcaggaagccacacctgtccctcccaccggggactccgaggctacacccgtgccaccaacgggtgactctgaaacggcaccagtgccccctaccggcgactccggggcacctcctgtgccacctaccggtgacagcggggctcctcctgtgccacctacaggggactccggtgccccacccgtcccccctaccggagatagcggggctccccctgtgcctccaactggggacagtggagcgcctcccgttcctcctactggcgattctggagccccaccagtaccacctaccggggatagtggcgctcccccagtgccccctactggtgacagcggagccccacccgtgccgccaactggggacgcaggcccaccacctgtgccacccactggcgactctggagcccctccagttccaccgacaggagactcaggcgcaccacctgttactccaacaggggactctgagaccgcccctgtgccgccaactggcgattctggtgcccctcctgtgcctccgacaggagacagtgaggccgctcccgtccccccaacggacgactccaaagaagcccagatgccagcagtgattaggttctag

SEQ ID NO: 121216 - DNA, 2271 bp, Artificial Sequence
  derived and/or modified sequence
atgctgacaatggggcgtttgcagttggtggtgctgggcctgacttgttgctgggcagtagcctctgccgcaaagctcggagccgtttacaccgaagggggtttcgtcgagggtgtcaacaagaagctgggactcctgggtgacagtgtagacatatttaaggggataccgttcgccgctccaaccaaagccttggaaaacccccagcctcacccagggtggcaggggaccttgaaagctaaaaatttcaagaaaagatgcctgcaggcaactatcacccaggattccacctacggagacgaggattgtttgtacctgaacatctgggtaccacagggcaggaagcaggtcagccgagatctgcccgtgatgatctggatttacggtggggcttttctcatgggctccggccacggcgcaaactttcttaacaactatttatatgatggcgaagaaatcgcaacccggggtaatgtgatcgtcgtaaccttcaattaccgagtggggcctctgggctttttgtccactggcgacgctaatcttccagggaattacgggctgcgcgatcagcacatggccatcgcatgggtgaagaggaacattgccgcatttgggggtgatcctaataacataacactgttcggagagtcagcagggggagcctctgtgagccttcagacactctccccctataataaaggattgatcagacgggctatctcgcagtcgggagtggcactgtccccatgggtgatacagaagaaccctctgttctgggcaaaaaaggttgctgaaaaggtcggctgtccagtgggtgacgcagctcggatggcccagtgcttaaaggttacagaccctcgtgcactgactctggcctataaggtaccactggcgggactggaatatccgatgttacattacgtgggtttcgttccagtgatcgacggcgactttatcccagctgaccccatcaacctatacgctaacgcagccgacattgactatatcgcaggtaccaacaacatggacggccatatcttcgccagcattgatatgcctgctattaacaagggaaacaaaaaagtaacagaagaggatttctacaaactggttagtgagttcactatcacaaagggattgaggggcgcaaaaacgacattcgatgtgtacacagaaagctgggcacaggacccctctcaggagaataaaaaaaaaacagtggtggatttcgagacagacgtgctatttctggtacctacagagatagcccttgcacagcatcgggctaatgccaagagcgccaagacctacgcttacctgttctcgcacccctcaagaatgccagtgtatccaaagtgggtgggagccgaccacgccgacgacatccagtatgtgtttggcaaaccattcgcgacacctaccggctataggcctcaagaccggaccgtctccaaggctatgattgcttattggactaatttcgcaaagacaggcgaccccaatatgggcgattccgctgtgcccacccattgggaaccatacactaccgaaaatagtggttacctcgagattaccaaaaagatgggcagctctagtatgaaaagatctctaagaaccaactttctccgctactggactctgacgtatctcgcccttcccactgtgaccgatcaggaagcgaccccagtaccaccaacaggtgactccgaagcaacccccgtgcctcctaccggggactcggagacggcccctgtgccccctactggggattccggcgctcccccagtgccacccaccggcgattcaggggctcctcctgttccccctacaggagattccggagcaccaccagtgcccccaactggtgacagcggggctcccccagtgccacccacaggcgatagcggcgcacccccagtaccacctactggcgatagcggtgctcctccagttcccccaaccggtgatagtggtgcccctcctgttccacctacgggcgacagtggcgcaccccctgtgcctcccaccggagatgccggtcccccacccgtgcctcctaccggtgattcaggagcaccccctgtgcctcctactggagattcaggggcacccccagtgactcctactggcgatagcgaaacggcccctgtccctcctaccggagattccggcgctccacccgtgccacccaccggcgattctgaggctgctcccgtgccacccaccgatgactctaaggaggctcagatgcctgcagtgatccggttctag

SEQ ID NO: 121217 - DNA, 2267 bp, Artificial Sequence
  derived and/or modified sequence
gatgctcaccatggggcgcctgcaactggttgtgttgggcctcacctgctgctgggcagtggcgagtgccgcgaagctgggcgccgtgtacacagaaggtgggttcgtggaaggcgtcaataagaagctcggcctcctgggtgactctgtggacatcttcaagggcatccccttcgcagctcccaccaaggccctggaaaatcctcagccacatcctggctggcaagggaccctgaaggccaagaacttcaagaagagatgcctgcaggccaccatcacccaggacagcacctacggggatgaagactgcctgtacctcaacatttgggtgccccagggcaggaagcaagtctcccgggacctgcccgttatgatctggatctatggaggcgccttcctcatggggtccggccatggggccaacttcctcaacaactacctgtatgacggcgaggagatcgccacacgcggaaacgtcatcgtggtcaccttcaactaccgtgtcggcccccttgggttcctcagcactggggacgccaatctgccaggtaactatggccttcgggatcagcacatggccattgcttgggtgaagaggaatatcgcggccttcgggggggaccccaacaacatcacgctcttcggggagtctgctggaggtgccagcgtctctctgcagaccctctccccctacaacaagggcctcatccggcgagccatcagccagagcggcgtggccctgagtccctgggtcatccagaaaaacccactcttctgggccaaaaaggtggctgagaaggtgggttgccctgtgggtgatgccgccaggatggcccagtgtctgaaggttactgatccccgagccctgacgctggcctataaggtgccgctggcaggcctggagtaccccatgctgcactatgtgggcttcgtccctgtcattgatggagacttcatccccgctgacccgatcaacctgtacgccaacgccgccgacatcgactatatagcaggcaccaacaacatggacggccacatcttcgccagcatcgacatgcctgccatcaacaagggcaacaagaaagtcacggaggacttctacaagctggtcagtgagttcacaatcaccaaggggctcagaggcgccaagacgacctttgatgtctacaccgagtcctgggcccaggacccatcccaggagaataagaagaagactgtggtggactttgagaccgatgtcctcttcctggtgcccaccgagattgccctagcccagcacagagccaatgccaagagtgccaagacctacgcctacctgttttcccatccctctcggatgcccgtctaccccaaatgggtgggggccgaccatgcagatgacattcagtacgttttcgggaagcccttcgccacccccacgggctaccggccccaagacaggacagtctctaaggccatgatcgcctactggaccaactttgccaaaacaggggaccccaacatgggcgactcggctgtgcccacacactgggaaccctacactacggaaaacagcggctacctggagatcaccaagaagatgggcagcagctccatgaagcggagcctgagaaccaacttcctgcgctactggaccctcacctatctggcgctgcccacagtgaccgaccaggaggccacccctgtgccccccacaggggactccgaggccactcccgtgccccccacgggtgactccgagaccgcccccgtgccgcccacgggtgactccggggccccccccgtgccgcccacgggtgactccggggccccccccgtgccgcccacgggtgactccggggccccccccgtgccgcccacgggtgactccggggccccccccgtgccgcccacgggtgactccggcgccccccccgtgccgcccacgggtgacgccgggcccccccccgtgccgcccacgggtgactccggcgccccccccgtgccgcccacgggtgactccggggccccccccgtgacccccacgggtgactccgagaccgcccccgtgccgcccacgggtgactccggggccccccctgtgccccccacgggtgactctgaggctgcccctgtgccccccacagatgactccaaggaagctcagatgcctgcagtcattaggttttagcgtcccatgagccttggtatcaagaggccacaagagtgggaccccaggggctcccctcccatcttgagctcttcctgaataaagcctcatacccctg

SEQ ID NO: 121218 - DNA, 2186 bp, Artificial Sequence
  derived and/or modified sequence
ggccacccagaggctgatgctcaccatggggcgcctgcaactggttgtgttgggcctcacctgctgctgggcagtggcgagtgccgcgaagctgggcgccgtgtacacagaaggtgggttcgtggaaggcgtcaataagaagctcggcctcctgggtgactctgtggacatcttcaagggcatccccttcgcagctcccaccaaggccctggaaaatcctcagccacatcctggctggcaagggaccctgaaggccaagaacttcaagaagagatgcctgcaggccaccatcacccaggacagcacctacggggatgaagactgcctgtacctcaacatttgggtgccccagggcaggaagcaagtctcccgggacctgcccgttatgatctggatctatggaggcgccttcctcatggggtccggccatggggccaacttcctcaacaactacctgtatgacggcgaggagatcgccacacgcggaaacgtcatcgtggtcaccttcaactaccgtgtcggcccccttgggttcctcagcactggggacgccaatctgccaggtaactatggccttcgggatcagcacatggccattgcttgggtgaagaggaatatcgcggccttcgggggggaccccaacaacatcacgctcttcggggagtctgctggaggtgccagcgtctctctgcagaccctctccccctacaacaagggcctcatccggcgagccatcagccagagcggcgtggccctgagtccctgggtcatccagaaaaacccactcttctgggccaaaaaggtggctgagaaggtgggttgccctgtgggtgatgccgccaggatggcccagtgtctgaaggttactgatccccgagccctgacgctggcctataaggtgccgctggcaggcctggagtaccccatgctgcactatgtgggcttcgtccctgtcattgatggagacttcatccccgctgacccgatcaacctgtacgccaacgccgccgacatcgactatatagcaggcaccaacaacatggacggccacatcttcgccagcatcgacatgcctgccatcaacaagggcaacaagaaagtcacggaggaggacttctacaagctggtcagtgagttcacaatcaccaaggggctcagaggcgccaagacgacctttgatgtctacaccgagtcctgggcccaggacccatcccaggagaataagaagaagactgtggtggactttgagaccgatgtcctcttcctggtgcccaccgagattgccctagcccagcacagagccaatgccaaggaccccaacatgggcgactcggctgtgcccacacactgggaaccctacactacggaaaacagcggctacctggagatcaccaagaagatgggcagcagctccatgaagcggagcctgagaaccaacttcctgcgctactggaccctcacctatctggcgctgcccacagtgaccgaccaggaggccacccctgtgccccccacaggggactccgaggccactcccgtgccccccacgggtgactccgagaccgcccccgtgccgcccacgggtgactccggggccccccccgtgccgcccacgggtgactccggggccccccccgtgccgcccacgggtgactccggggccccccccgtgccgcccacgggtgactccggggccccccccgtgccgcccacgggtgactccggggccccccccgtgccgcccacgggtgactccggggccccccccgtgccgcccacgggtgactccggggccccccccgtgccgcccacgggtgactccggcgccccccccgtgccgcccacgggtgacgccgggcccccccccgtgccgcccacgggtgactccggcgccccccccgtgccgcccacgggtgactccggggccccccccgtgacccccacgggtgactccgagaccgcccccgtgccgcccacgggtgactccggggccccccctgtgccccccacgggtgactctgaggctgcccctgtgccccccacagatgactccaaggaagctcagatgcctgcagtcattaggttttagcgtcccatgagccttggtatcaagaggccacaagagtgggaccccaggggctcccctcccatcttgagctcttcctgaataaagcctcatacccctg

SEQ ID NO: 121219 - DNA, 2384 bp, Artificial Sequence
  derived and/or modified sequence
ggccacccagaggctgatgctcaccatggggcgcctgcaactggttgtgttgggcctcacctgctgctgggcagtggcgagtgccgcgaagctgggcgccgtgtacacagaaggtgggttcgtggaaggcgtcaataagaagctcggcctcctgggtgactctgtggacatcttcaagggcatccccttcgcagctcccaccaaggccctggaaaatcctcagccacatcctggctggcaagggaccctgaaggccaagaacttcaagaagagatgcctgcaggccaccatcacccaggacagcacctacggggatgaagactgcctgtacctcaacatttgggtgccccagggcaggaagcaagtctcccgggacctgcccgttatgatctggatctatggaggcgccttcctcatggggtccggccatggggccaacttcctcaacaactacctgtatgacggcgaggagatcgccacacgcggaaacgtcatcgtggtcaccttcaactaccgtgtcggcccccttgggttcctcagcactggggacgccaatctgccaggtaactatggccttcgggatcagcacatggccattgcttgggtgaagaggaatatcgcggccttcgggggggaccccaacaacatcacgctcttcggggagtctgctggaggtgccagcgtctctctgcagaccctctccccctacaacaagggcctcatccggcgagccatcagccagagcggcgtggccctgagtccctgggtcatccagaaaaacccactcttctgggccaaaaaggtggctgagaaggtgggttgccctgtgggtgatgccgccaggatggcccagtgtctgaaggttactgatccccgagccctgacgctggcctataaggtgccgctggcaggcctggagtaccccatgctgcactatgtgggcttcgtccctgtcattgatggagacttcatccccgctgacccgatcaacctgtacgccaacgccgccgacatcgactatatagcaggcaccaacaacatggacggccacatcttcgccagcatcgacatgcctgccatcaacaagggcaacaagaaagtcacggaggaggacttctacaagctggtcagtgagttcacaatcaccaaggggctcagaggcgccaagacgacctttgatgtctacaccgagtcctgggcccaggacccatcccaggagaataagaagaagactgtggtggactttgagaccgatgtcctcttcctggtgcccaccgagattgccctagcccagcacagagccaatgccaagagtgccaagacctacgcctacctgttttcccatccctctcggatgcccgtctaccccaaatgggtgggggccgaccatgcagatgacattcagtacgttttcgggaagcccttcgccacccccacgggctaccggccccaagacaggacagtctctaaggccatgatcgcctactggaccaactttgccaaaacaggggaccccaacatgggcgactcggctgtgcccacacactgggaaccctacactacggaaaacagcggctacctggagatcaccaagaagatgggcagcagctccatgaagcggagcctgagaaccaacttcctgcgctactggaccctcacctatctggcgctgcccacagtgaccgaccaggaggccacccctgtgccccccacaggggactccgaggccactcccgtgccccccacgggtgactccgagaccgcccccgtgccgcccacgggtgactccggggccccccccgtgccgcccacgggtgactccggggccccccccgtgccgcccacgggtgactccggggccccccccgtgccgcccacgggtgactccggggccccccccgtgccgcccacgggtgactccggggccccccccgtgccgcccacgggtgactccggggccccccccgtgccgcccacgggtgactccggggccccccccgtgccgcccacgggtgactccggcgccccccccgtgccgcccacgggtgacgccgggcccccccccgtgccgcccacgggtgactccggcgccccccccgtgccgcccacgggtgactccggggccccccccgtgacccccacgggtgactccgagaccgcccccgtgccgcccacgggtgactccggggccccccctgtgccccccacgggtgactctgaggctgcccctgtgccccccacagatgactccaaggaagctcagatgcctgcagtcattaggttttagcgtcccatgagccttggtatcaagaggccacaagagtgggaccccaggggctcccctcccatcttgagctcttcctgaataaagcctcatacccctg

SEQ ID NO: 121220 - DNA, 2169 bp, Artificial Sequence
  derived and/or modified sequence
atgctgaccatgggcagactgcagctggtggtgctgggcctgacctgctgctgggccgtggccagcgccgccaagctgggcgccgtgtacaccgagggcggcttcgtggagggcgtgaacaagaagctgggcctgctgggcgacagcgtggacatcttcaagggcatccccttcgccgcccccaccaaggccctggagaacccccagccccaccccggctggcagggcaccctgaaggccaagaacttcaagaagagatgcctgcaggccaccatcacccaggacagcacctacggcgacgaggactgcctgtacctgaacatctgggtgccccagggcagaaagcaggtgagcagagacctgcccgtgatgatctggatctacggcggcgccttcctgatgggcagcggccacggcgccaacttcctgaacaactacctgtacgacggcgaggagatcgccaccagaggcaacgtgatcgtggtgaccttcaactacagagtgggccccctgggcttcctgagcaccggcgacgccaacctgcccggcaactacggcctgagagaccagcacatggccatcgcctgggtgaagagaaacatcgccgccttcggcggcgaccccaacaacatcaccctgttcggcgagagcgccggcggcgccagcgtgagcctgcagaccctgagcccctacaacaagggcctgatcagaagagccatcagccagagcggcgtggccctgagcccctgggtgatccagaagaaccccctgttctgggccaagaaggtggccgagaaggtgggctgccccgtgggcgacgccgccagaatggcccagtgcctgaaggtgaccgaccccagagccctgaccctggcctacaaggtgcccctggccggcctggagtaccccatgctgcactacgtgggcttcgtgcccgtgatcgacggcgacttcatccccgccgaccccatcaacctgtacgccaacgccgccgacatcgactacatcgccggcaccaacaacatggacggccacatcttcgccagcatcgacatgcccgccatcaacaagggcaacaagaaggtgaccgaggacttctacaagctggtgagcgagttcaccatcaccaagggcctgagaggcgccaagaccaccttcgacgtgtacaccgagagctgggcccaggaccccagccaggagaacaagaagaagaccgtggtggacttcgagaccgacgtgctgttcctggtgcccaccgagatcgccctggcccagcacagagccaacgccaagagcgccaagacctacgcctacctgttcagccaccccagcagaatgcccgtgtaccccaagtgggtgggcgccgaccacgccgacgacatccagtacgtgttcggcaagcccttcgccacccccaccggctacagaccccaggacagaaccgtgagcaaggccatgatcgcctactggaccaacttcgccaagaccggcgaccccaacatgggcgacagcgccgtgcccacccactgggagccctacaccaccgagaacagcggctacctggagatcaccaagaagatgggcagcagcagcatgaagagaagcctgagaaccaacttcctgagatactggaccctgacctacctggccctgcccaccgtgaccgaccaggaggccacccccgtgccccccaccggcgacagcgaggccacccccgtgccccccaccggcgacagcgagaccgcccccgtgccccccaccggcgacagcggcgccccccccgtgccccccaccggcgacagcggcgccccccccgtgccccccaccggcgacagcggcgccccccccgtgccccccaccggcgacagcggcgccccccccgtgccccccaccggcgacagcggcgccccccccgtgccccccaccggcgacgccggccccccccccgtgccccccaccggcgacagcggcgccccccccgtgccccccaccggcgacagcggcgccccccccgtgacccccaccggcgacagcgagaccgcccccgtgccccccaccggcgacagcggcgccccccccgtgccccccaccggcgacagcgaggccgcccccgtgccccccaccgacgacagcaaggaggcccagatgcccgccgtgatcagattctag

SEQ ID NO: 121221 - DNA, 2064 bp, Artificial Sequence
  derived and/or modified sequence
atgggcagactgcagctggtggtgctgggcctgacctgctgctgggccgtggccagcgccgccaagctgggcgccgtgtacaccgagggcggcttcgtggagggcgtgaacaagaagctgggcctgctgggcgacagcgtggacatcttcaagggcatccccttcgccgcccccaccaaggccctggagaacccccagccccaccccggctggcagggcaccctgaaggccaagaacttcaagaagagatgcctgcaggccaccatcacccaggacagcacctacggcgacgaggactgcctgtacctgaacatctgggtgccccagggcagaaagcaggtgagcagagacctgcccgtgatgatctggatctacggcggcgccttcctgatgggcagcggccacggcgccaacttcctgaacaactacctgtacgacggcgaggagatcgccaccagaggcaacgtgatcgtggtgaccttcaactacagagtgggccccctgggcttcctgagcaccggcgacgccaacctgcccggcaactacggcctgagagaccagcacatggccatcgcctgggtgaagagaaacatcgccgccttcggcggcgaccccaacaacatcaccctgttcggcgagagcgccggcggcgccagcgtgagcctgcagaccctgagcccctacaacaagggcctgatcagaagagccatcagccagagcggcgtggccctgagcccctgggtgatccagaagaaccccctgttctgggccaagaaggtggccgagaaggtgggctgccccgtgggcgacgccgccagaatggcccagtgcctgaaggtgaccgaccccagagccctgaccctggcctacaaggtgcccctggccggcctggagtaccccatgctgcactacgtgggcttcgtgcccgtgatcgacggcgacttcatccccgccgaccccatcaacctgtacgccaacgccgccgacatcgactacatcgccggcaccaacaacatggacggccacatcttcgccagcatcgacatgcccgccatcaacaagggcaacaagaaggtgaccgaggaggacttctacaagctggtgagcgagttcaccatcaccaagggcctgagaggcgccaagaccaccttcgacgtgtacaccgagagctgggcccaggaccccagccaggagaacaagaagaagaccgtggtggacttcgagaccgacgtgctgttcctggtgcccaccgagatcgccctggcccagcacagagccaacgccaaggaccccaacatgggcgacagcgccgtgcccacccactgggagccctacaccaccgagaacagcggctacctggagatcaccaagaagatgggcagcagcagcatgaagagaagcctgagaaccaacttcctgagatactggaccctgacctacctggccctgcccaccgtgaccgaccaggaggccacccccgtgccccccaccggcgacagcgaggccacccccgtgccccccaccggcgacagcgagaccgcccccgtgccccccaccggcgacagcggcgccccccccgtgccccccaccggcgacagcggcgccccccccgtgccccccaccggcgacagcggcgccccccccgtgccccccaccggcgacagcggcgccccccccgtgccccccaccggcgacagcggcgccccccccgtgccccccaccggcgacagcggcgccccccccgtgccccccaccggcgacagcggcgccccccccgtgccccccaccggcgacagcggcgccccccccgtgccccccaccggcgacgccggccccccccccgtgccccccaccggcgacagcggcgccccccccgtgccccccaccggcgacagcggcgccccccccgtgacccccaccggcgacagcgagaccgcccccgtgccccccaccggcgacagcggcgccccccccgtgccccccaccggcgacagcgaggccgcccccgtgccccccaccgacgacagcaaggaggcccagatgcccgccgtgatcagattctag

SEQ ID NO: 121222 - DNA, 2271 bp, Artificial Sequence
  derived and/or modified sequence
atgctgaccatgggcagactgcagctggtggtgctgggcctgacctgctgctgggccgtggccagcgccgccaagctgggcgccgtgtacaccgagggcggcttcgtggagggcgtgaacaagaagctgggcctgctgggcgacagcgtggacatcttcaagggcatccccttcgccgcccccaccaaggccctggagaacccccagccccaccccggctggcagggcaccctgaaggccaagaacttcaagaagagatgcctgcaggccaccatcacccaggacagcacctacggcgacgaggactgcctgtacctgaacatctgggtgccccagggcagaaagcaggtgagcagagacctgcccgtgatgatctggatctacggcggcgccttcctgatgggcagcggccacggcgccaacttcctgaacaactacctgtacgacggcgaggagatcgccaccagaggcaacgtgatcgtggtgaccttcaactacagagtgggccccctgggcttcctgagcaccggcgacgccaacctgcccggcaactacggcctgagagaccagcacatggccatcgcctgggtgaagagaaacatcgccgccttcggcggcgaccccaacaacatcaccctgttcggcgagagcgccggcggcgccagcgtgagcctgcagaccctgagcccctacaacaagggcctgatcagaagagccatcagccagagcggcgtggccctgagcccctgggtgatccagaagaaccccctgttctgggccaagaaggtggccgagaaggtgggctgccccgtgggcgacgccgccagaatggcccagtgcctgaaggtgaccgaccccagagccctgaccctggcctacaaggtgcccctggccggcctggagtaccccatgctgcactacgtgggcttcgtgcccgtgatcgacggcgacttcatccccgccgaccccatcaacctgtacgccaacgccgccgacatcgactacatcgccggcaccaacaacatggacggccacatcttcgccagcatcgacatgcccgccatcaacaagggcaacaagaaggtgaccgaggaggacttctacaagctggtgagcgagttcaccatcaccaagggcctgagaggcgccaagaccaccttcgacgtgtacaccgagagctgggcccaggaccccagccaggagaacaagaagaagaccgtggtggacttcgagaccgacgtgctgttcctggtgcccaccgagatcgccctggcccagcacagagccaacgccaagagcgccaagacctacgcctacctgttcagccaccccagcagaatgcccgtgtaccccaagtgggtgggcgccgaccacgccgacgacatccagtacgtgttcggcaagcccttcgccacccccaccggctacagaccccaggacagaaccgtgagcaaggccatgatcgcctactggaccaacttcgccaagaccggcgaccccaacatgggcgacagcgccgtgcccacccactgggagccctacaccaccgagaacagcggctacctggagatcaccaagaagatgggcagcagcagcatgaagagaagcctgagaaccaacttcctgagatactggaccctgacctacctggccctgcccaccgtgaccgaccaggaggccacccccgtgccccccaccggcgacagcgaggccacccccgtgccccccaccggcgacagcgagaccgcccccgtgccccccaccggcgacagcggcgccccccccgtgccccccaccggcgacagcggcgccccccccgtgccccccaccggcgacagcggcgccccccccgtgccccccaccggcgacagcggcgccccccccgtgccccccaccggcgacagcggcgccccccccgtgccccccaccggcgacagcggcgccccccccgtgccccccaccggcgacagcggcgccccccccgtgccccccaccggcgacagcggcgccccccccgtgccccccaccggcgacgccggccccccccccgtgccccccaccggcgacagcggcgccccccccgtgccccccaccggcgacagcggcgccccccccgtgacccccaccggcgacagcgagaccgcccccgtgccccccaccggcgacagcggcgccccccccgtgccccccaccggcgacagcgaggccgcccccgtgccccccaccgacgacagcaaggaggcccagatgcccgccgtgatcagattctag

SEQ ID NO: 121223 - protein, 140 aa, Artificial Sequence
  derived and/or modified sequence
MGPRRRSRKPEAPRRRSPSPTPTPGPSRRGPSLGASSHQHSRRRQGWLKEIRKLQKSTHLLIRKLPFSRLAREICVKFTRGVDFNWQAQALLALQEAAEAFLVHLFEDAYLLTLHAGRVTLFPKDVQLARRIRGLEEGLG

SEQ ID NO: 121224 - DNA, 423 bp, Artificial Sequence
  derived and/or modified sequence
atgggtccaagacgccgctcccgtaagcccgaagctcccaggcgtagaagcccctcccccacccccacccccggacctagccgccggggcccttcactgggggcaagctcccaccagcattcacggagaaggcagggttggctgaaggaaatccgcaaattacagaaatcgacacatcttctcatccgaaagttgccgttctcccgtttggcacgcgaaatctgcgtgaaattcacccgaggggtggactttaactggcaggcacaggcactgctggcattgcaggaagccgccgaggcgttcttagtccacttgttcgaggatgcctacctgctcactttacacgcaggcagagtcacactgtttccgaaggacgtgcagttggctcgtcggattagaggactggaagagggactcggctag

SEQ ID NO: 121225 - DNA, 423 bp, Artificial Sequence
  derived and/or modified sequence
atgggccccaggagaagaagcaggaagccagaggcccccaggagaagaagccccagccccacccccaccccaggccccagccggcggggccccagcctgggcgccagcagccaccagcacagcagaagacggcagggctggctgaaggagatcaggaagctgcagaagagcacccacctgctgatcaggaagctgcccttcagccggctggcccgggagatctgtgtgaagttcacccggggcgtggacttcaactggcaggcccaggccctgctggccctgcaggaggccgctgaggccttcctggtgcacctgtttgaagatgcctacctgctgaccctgcacgccggccgggtgaccctcttccccaaggatgtgcagctggcccggcgcatccggggcctggaggagggcctgggctag

SEQ ID NO: 121226 - DNA, 423 bp, Artificial Sequence
  derived and/or modified sequence
atgggcccccggcggcggagccggaagcccgaggccccccggcggcgcagccctagtcctacccctacccccgggcctagccggcgtgggccatctctgggcgcaagcagtcaccagcacagtcgaaggagacaggggtggctgaaggaaatccgcaagctccagaaatccacccacttactgataagaaagctccctttttcaaggctggcaagagagatctgcgtaaaattcacccgcggtgtggacttcaattggcaggcacaagcccttttagccctgcaagaagccgctgaagccttcttggttcacctgtttgaggatgcttatctcttgactttgcatgctggtcgcgtgacactgtttccaaaggacgtgcagctagccagacggattagaggcctcgaagagggcctggggtag

SEQ ID NO: 121227 - DNA, 423 bp, Artificial Sequence
  derived and/or modified sequence
atgggtcctcgcagaagatccagaaagccagaagctccccgtcggagaagtccaagcccaacccccacgcccggaccttcccgccgaggaccttctctgggtgcatccagtcatcaacactctcgccgtcgtcagggttggctcaaagagattcgtaaactgcagaaatccacccacctattaattaggaagcttccatttagtcgcttagcgcgagagatctgtgtgaaattcaccagaggggttgacttcaactggcaggctcaagccctgcttgccttgcaggaagccgcagaagccttcctggtgcacctcttcgaagacgcttacctcctgactctgcacgctggtagggtaactttgttccctaaagatgttcaactagcaaggcgtattcgaggactggaagaggggctgggatag

SEQ ID NO: 121228 - DNA, 1452 bp, Artificial Sequence
  derived and/or modified sequence
gttttaaaaaacgccggccgtgaagtgggcggagcgagcgatttgaacgcgagcggcgcggacttctgccaagcaccggctcatgtgaggctcgcggcacagcgttctctgggctccccagaagccagcctttcgctcccggacccggcagcccgagcaggagccgtgggaccgggcgccagcaccctctgcggcgtgtcatgggcccgcgccgccggagccgaaagcccgaggccccgaggaggcgcagcccgagcccgaccccgacccccggcccctcccggcggggcccctccttaggcgcttcctcccatcaacacagtcggcggagacaaggttggctaaaggagatccgaaagcttcagaagagcacacacctcttgataaggaagctgcccttcagccgcctggcaagagaaatatgtgttaaattcactcgtggtgtggacttcaattggcaagcccaggccctattggccctacaagaggcagcagaagcatttctagttcatctctttgaggacgcctatctcctcaccttacatgcaggccgagttactctcttcccaaaggatgtgcaactggcccggaggatccggggccttgaggagggactcggctgagctcctgcacccagtgtttctgtcagtctttcctgctcagccaggggggatgataccggggactctccagagccatgactagatccaatggattctgcgatgctgtctggactttgctgtctctgaacagtatgtgtgtgttgctttaaatatttttcttttttttgagaaggagaagactgcatgactttcctctgtaacagaggtaatatatgagacaatcaacaccgttccaaaggcctgaaaataattttcagataaagagactccaaggttgactttagtttgtgagttactcatgtgactatttgaggattttgaaaacatcagatttgctgtggtatgggagaaaaggctatgtacttattattttagctctttctgtaatatttacattttttaccatatgtacatttgtacttttattttacacataagggaaaaaataagaccactttgagcagttgcctggaaggctgggcatttccatcatatagacctctgcccttcagagtagcctcaccattagtggcagcatcatgtaactgagtggactgtgcttgtcaacggatgtgtagcttttcagaaacttaattggggatgaatagaaaacctgtaagctttgatgttctggttacttctagtaaattcctgtcaaaatcaattcagaaattctaacttggagaatttaacattttactcttgtaaatcatagaagatgtatcataacagttcagaattttaaagtacattttcgatgcttttatgggtatttttgtagtttctttgtagagagataataaaaatcaaaatatttaatgaaaatgga

SEQ ID NO: 121229 - DNA, 423 bp, Artificial Sequence
  derived and/or modified sequence
atgggccccagaagaagaagcagaaagcccgaggcccccagaagaagaagccccagccccacccccacccccggccccagcagaagaggccccagcctgggcgccagcagccaccagcacagcagaagaagacagggctggctgaaggagatcagaaagctgcagaagagcacccacctgctgatcagaaagctgcccttcagcagactggccagagagatctgcgtgaagttcaccagaggcgtggacttcaactggcaggcccaggccctgctggccctgcaggaggccgccgaggccttcctggtgcacctgttcgaggacgcctacctgctgaccctgcacgccggcagagtgaccctgttccccaaggacgtgcagctggccagaagaatcagaggcctggaggagggcctgggctag

SEQ ID NO: 121230 - protein, 599 aa, Artificial Sequence
  derived and/or modified sequence
MGPKRRQLTFREKSRIIQEVEENPDLRKGEIARRFNIPPSTLSTILKNKRAILASERKYGVASTCRKTNKLSPYDKLEGLLIAWFQQIRAAGLPVKGIILKEKALRIAEELGMDDFTASNGWLDRFRRRHGVVSCSGVARARARNAAPRTPAAPASPAAVPSEGSGGSTTGWRAREEQPPSVAEGYASQDVFSATETSLWYDFLPDQAAGLCGGDGRPRQATQRLSVLLCANADGSEKLPPLVAGKSAKPRAGQAGLPCDYTANSKGGVTTQALAKYLKALDTRMAAESRRVLLLAGRLAAQSLDTSGLRHVQLAFFPPGTVHPLERGVVQQVKGHYRQAMLLKAMAALEGQDPSGLQLGLTEALHFVAAAWQAVEPSDIAACFREAGFGGGPNATITTSLKSEGEEEEEEEEEEEEEEGEGEEEEEEGEEEEEEGGEGEELGEEEEVEEEGDVDSDEEEEEDEESSSEGLEAEDWAQGVVEAGGSFGAYGAQEEAQCPTLHFLEGGEDSDSDSEEEDDEEEDDEDEDDDDDEEDGDEVPVPSFGEAMAYFAMVKRYLTSFPIDDRVQSHILHLEHDLVHVTRKNHARQAGVRGLGHQS

SEQ ID NO: 121231 - protein, 138 aa, Artificial Sequence
  derived and/or modified sequence
EDEESSSEGLEAEDWAQGVVEAGGSFGAYGAQEEAQCPTLHFLEGGEDSDSDSEEEDDEEEDDEDEDDDDDEEDGDEVPVPSFGEAMAYFAMVKRYLTSFPIDDRVQSHILHLEHDLVHVTRKNHARQAGVRGLGHQS

SEQ ID NO: 121232 - DNA, 1800 bp, Artificial Sequence
  derived and/or modified sequence
atgggtccaaagcgtagacagctgacctttagagagaagtctcggattatccaggaggttgaggaaaatcctgaccttagaaagggcgagattgccaggaggttcaatatacctcccagcactctatctacaatactcaagaacaaacgcgctatattggccagtgaaagaaaatatggggtggcctctacttgcagaaaaactaataagctctccccatatgataagctggaggggctcctcattgcatggttccagcagatcagggccgcgggtctccccgtgaagggtatcatactgaaggaaaaggccctgcggattgcggaagaactcggtatggatgattttactgcttcgaatgggtggcttgatagattcaggcgacgacatggagtggtgtcctgctcgggcgtcgcgcgggcccgggcacgaaacgcggccccgcggaccccagccgctcccgcatctccggcagccgttcctagcgagggatccggaggcagcacgaccggatggcgggcgagggaagagcagccacccagtgttgctgaggggtacgcttcccaagatgtttttagtgccaccgagacttcactgtggtacgactttctgccagaccaagccgctggtctctgcggcggagatgggaggccaagacaggctacgcagcgtctaagcgtgctcctgtgcgcaaacgcagacgggtcagagaaactaccccccctggtggccggaaagtccgcaaagccccgcgccggccaagccggcctgccatgcgactacaccgcaaattcaaaggggggagtaacaacccaagccctggccaagtacttgaaggcattagacacccggatggccgccgagagcaggagggtgctcctcctcgccgggaggctagctgcacaatcattggacacaagtgggctacgacacgttcaactggcttttttccccccagggacagtccatcccctggagcgaggagtggtccagcaggtcaagggacactaccgacaggccatgctgcttaaggcgatggctgcattagaagggcaggacccctctgggctgcagctgggacttacagaagcccttcactttgtggccgcagcatggcaggccgtggagccttccgacatagccgcatgtttcagagaagccgggtttggcgggggcccgaacgctactattaccacatctctgaaatcagagggagaggaggaagaagaggaagaggaggaggaggaggaggaagagggtgaaggagaagaggaagaggaggaaggcgaagaagaggaggaggaggggggggaaggtgaagagctcggcgaggaggaagaagttgaggaagaaggtgacgttgactctgacgaagaggaagaagaagacgaggagtcgtcgtcggagggacttgaagccgaagattgggcacagggagtagtggaggccggagggtcttttggggcctatggagcacaggaggaagcccagtgtccaacactgcacttcttagaagggggtgaagattcagatagtgattctgaagaagaagatgacgaggaggaggacgatgaagatgaagatgacgacgacgatgaagaggatggcgacgaagtgccagtgccttcttttggcgaggcgatggcgtactttgcaatggtgaaacgataccttacgtccttcccgattgacgaccgagtccagagtcatatactacacctcgagcacgaccttgtgcatgttacacgcaaaaaccacgcccgccaggctggagtcagaggcctggggcatcagagctag

SEQ ID NO: 121233 - DNA, 417 bp, Artificial Sequence
  derived and/or modified sequence
gaggatgaagagtctagtagtgaagggcttgaggctgaagattgggcccaaggagtagtcgaggctggcggctctttcggagcatatggtgcgcaagaagaggcccaatgccctacattacacttcctagagggtggtgaagattcagattctgactctgaggaggaggacgatgaagaggaggacgatgaggatgaagacgacgacgacgatgaagaagacggcgacgaggtgcctgttccgtcctttggagaggccatggcttactttgccatggtgaagcgatacctcacaagctttccaatcgacgacagagttcagagccacatcttgcacctcgagcatgatctggttcacgttactcggaagaatcatgcacggcaagcgggagttaggggactcggacaccaatcctag

SEQ ID NO: 121234 - DNA, 1800 bp, Artificial Sequence
  derived and/or modified sequence
atgggccccaagaggcggcagctgaccttccgggagaagagccgcatcatccaggaggtggaggagaacccagacctgaggaagggggagatcgcccggcgcttcaacatcccccccagcaccctgagcaccatcctgaagaacaagagggccatcctggccagcgagaggaaatatggagtggccagcacctgcaggaagaccaacaagctgagcccctatgacaagctggagggcctgctgattgcctggttccagcagatccgggctgctggcctgcctgtgaagggcatcatcctgaaggagaaggccctgagaattgctgaggagctgggcatggatgacttcaccgccagcaatggctggctggaccgcttcagaagaagacatggagtggtgtcctgcagcggcgtggcccgggcccgggccagaaatgctgcccccaggaccccagctgccccagccagccctgctgctgtgcccagcgagggcagcggcggcagcaccaccggctggagggcccgggaggagcagcccccatctgtggccgagggctacgccagccaggatgtgttttctgccacagagaccagcctgtggtatgacttcctgcctgaccaggccgccggcctgtgtggaggagatggccggccccggcaggccacccagaggctgtctgtgctgctgtgtgccaatgctgatggcagcgagaagctgccccccctggtggccggcaagagcgccaagccccgggccggccaggccggcctgccctgtgactacacagccaacagcaagggcggcgtgaccacccaggccctggccaagtacctgaaggccctggacaccaggatggctgctgagagccggcgggtgctgctgctggccggccgcctggccgcccagagcctggacaccagcggcctgcggcacgtgcagctggccttcttccccccaggcaccgtgcaccccctggagcggggcgtggtgcagcaggtgaagggccactaccggcaggccatgctgctgaaggccatggccgccctggagggccaggaccccagcggcctgcagctgggcctgacagaggccctgcactttgtggccgccgcctggcaggccgtggagcccagcgacattgctgcctgcttccgggaggccggctttggaggcggccccaatgccaccatcaccaccagcctgaagtctgagggggaggaggaggaggaggaggaggaggaggaggaggaggaggagggggagggggaggaggaggaggaggagggggaggaggaggaggaggagggcggggagggggaggagctgggggaggaggaggaggtggaggaggagggagatgtggacagtgatgaggaggaggaggaggatgaggagagcagcagcgagggcctggaggccgaggactgggcccagggcgtggtggaggccggcggcagctttggagcctacggggcccaggaggaggcccagtgccccaccctgcacttcctggagggcggggaggacagcgacagcgacagcgaggaggaggatgatgaggaggaggatgatgaagatgaagatgatgatgatgatgaggaggatggagatgaggtgcctgtgcccagctttggagaggccatggcctactttgccatggtgaagcgctacctgaccagcttccccattgatgacagagtgcagagccacatcctgcacctggagcatgacctggtgcacgtgaccaggaagaaccacgcccggcaggccggcgtgcggggcctgggccaccagagctag

SEQ ID NO: 121235 - DNA, 417 bp, Artificial Sequence
  derived and/or modified sequence
gaagatgaggagagcagcagcgagggcctggaggccgaggactgggcccagggcgtggtggaggccggcggcagctttggagcctatggagcccaggaggaggcccagtgccccaccctgcacttcctggagggcggagaagattctgacagcgacagcgaggaggaggatgatgaggaggaggatgatgaagatgaagatgatgatgatgatgaagaagatggagatgaggtgcctgtgcccagctttggagaggccatggcctactttgccatggtgaagcgctacctgaccagcttccccattgatgacagagtgcagagccacatcctgcacctggagcatgacctggtgcacgtgaccaggaagaaccacgcccggcaggccggcgtgcggggcctgggccaccagagctag

SEQ ID NO: 121236 - DNA, 1800 bp, Artificial Sequence
  derived and/or modified sequence
atgggccccaagcggcggcagctgaccttccgggagaagagccggattattcaggaagtggaagaaaacccagatcttcggaaaggtgaaattgccaggcggttcaacatccctccgagtactctgagtaccattctgaaaaataagcgcgctattcttgccagtgaacgaaagtacggggtggcctctacatgtaggaaaacaaataaactgtccccgtacgacaaacttgaaggcctgctgattgcctggtttcagcagataagggctgccggtttaccagttaaagggatcattctgaaagagaaggctctgcggatcgctgaggagttggggatggacgattttaccgcctcaaatgggtggctagaccgctttcgaaggagacacggcgtagtgtcatgttctggcgtagcgcgtgctcgggcacgaaatgcggcgcctagaactccagctgcaccggctagtccagctgccgtgccaagtgaggggtcagggggctcaacaacggggtggagggcacgagaggagcagcctcctagtgttgcagagggatatgcatcccaggacgtcttctccgcgacggaaaccagtttatggtatgatttcttaccagatcaggccgccggtttgtgtggcggggatggaaggccgagacaggccactcagcgtctctctgtactactatgtgccaatgcggacggaagcgagaagctgccccctctggttgcagggaaaagtgcgaaaccaagagccggacaggcaggactcccctgcgactatactgcgaactccaaaggaggggtcacgacgcaagccctcgctaagtacctgaaagcactcgacactaggatggctgcagaatctagaagggtgcttctactagctggacgactggccgctcagtcactggacacaagtggcttgcgacatgtgcaattggcgttcttcccgcctgggaccgttcaccctctggagaggggcgtggtccagcaggtgaaaggccactaccggcaggcaatgctgctgaaagcaatggccgccctagaaggacaggatccctcaggactccagcttggcctgacagaggcattacattttgtggccgccgcatggcaggccgttgagccaagcgacatagccgcctgtttcagagaagcaggctttggcggtggccctaacgccactataaccaccagcctgaaatccgaaggggaagaagaagaggaggaggaggaggaagaggaggaggaggagggcgaaggagaggaagaggaagaggaaggggaagaagaggaggaagagggcggcgagggggaggagcttggagaagaggaggaggtggaggaagaaggcgatgtcgacagcgatgaagaggaggaggaggacgaagagagctcttccgaaggcctggaggctgaagattgggctcagggagttgtagaagcaggagggagctttggagcgtatggcgcgcaagaggaagcccaatgtcccacactccacttcctggaaggcggggaggactctgactctgatagtgaggaagaggatgatgaagaagaagatgatgaagacgaagatgatgatgatgacgaagaggacggagatgaggtgcccgttcctagcttcggcgaggccatggcttatttcgccatggtgaaaagatacctgacctcattccccatagacgatcgcgtacagtctcacattctccaccttgaacacgacctggtgcacgtaacgcgaaaaaaccatgcacggcaagccggagttcgtgggctaggccaccagtcctag

SEQ ID NO: 121237 - DNA, 417 bp, Artificial Sequence
  derived and/or modified sequence
gaggacgaggagagcagcagcgagggcctggaggccgaggactgggcccagggggtggtggaggctggcggaagtttcggagcatatggagcccaggaggaggctcaatgtcccactttacacttcctggagggtggtgaagacagcgattccgactctgaggaggaggatgacgaagaggaagatgacgaagatgaagacgacgacgatgacgaggaagacggcgacgaagtgccagtgccgtcttttggagaagccatggcttactttgcaatggtcaagcgctatctgacgagttttcctatagacgaccgcgtgcaaagccatatcctgcatctcgagcacgacttagttcacgttacaaggaagaatcacgcccggcaagccggggtcagaggcttgggccatcagtcctag

SEQ ID NO: 121238 - DNA, 1800 bp, Artificial Sequence
  derived and/or modified sequence
atgggccctaaacggcgacagcttacttttcgcgaaaagagccggataatccaagaggtggaggagaaccccgatctgaggaagggagagatcgctcggagatttaatatccccccaagtaccctgagtaccatcctgaagaataagcgggcaattttagcatccgagcggaaatacggggtcgcgtctacatgcaggaaaactaacaagctcagcccttatgataaacttgaaggcctgcttatcgcctggtttcagcagatcagagccgcaggtctgcccgtaaaaggcatcatcctgaaagagaaagcactgcgaatagctgaagaactcggtatggatgatttcacagcctcaaatggctggctggaccgctttagaaggcgacatggcgtggtgtcttgttccggggttgctcgggcacgtgctagaaacgctgcccctcgcactccagctgcacctgccagccctgctgccgtcccttccgagggatcaggcggaagtactactggatggcgagccagagaggagcagccgccaagcgtggccgaaggatatgcatctcaggacgttttttccgccaccgagacctccttatggtacgactttttgcctgaccaggccgcaggcttgtgcggaggagacggcagaccgagacaagccacacagcgcctctcggtactgctgtgtgccaatgcagacggatccgagaagttgccgccactggtagcaggcaagtccgcgaagcctcgggcaggacaagcgggtctgccctgtgactatacagcaaacagcaaagggggtgtcaccacacaggctctagcgaagtatttgaaagccctggatacaaggatggccgctgagagcaggcgggtcctacttcttgcagggaggctggcagctcaaagcttggatacgtcggggttacgacacgtgcagctggctttctttccccctggaacagtgcacccactcgagagaggcgtggtgcagcaggtgaaggggcactaccgacaggccatgctgctgaaagctatggccgctttagaggggcaggaccccagcgggcttcagcttggcttaactgaggcactgcatttcgtggccgcagcatggcaggctgtcgaaccaagcgacattgccgcttgtttccgggaggctggatttggcggaggtccaaacgcaactatcactacaagcctcaagtctgaaggtgaagaagaggaggaggaagaagaggaggaggaggaagaagagggcgagggcgaagaagaggaggaggaaggcgaggaagaagaagaggagggaggggaaggagaggagctgggcgaagaagaagaagtagaagaggaaggggacgttgatagcgatgaggaggaggaggaagacgaagagtcaagttctgaaggtctcgaggcggaggactgggcacagggcgtggtggaggccggaggctccttcggcgcttacggggctcaggaggaagctcagtgtccaacccttcatttcctggaaggcggagaagactcggattctgacagtgaagaagaggatgatgaagaggaggatgacgaagatgaagatgacgacgatgacgaggaagatggggacgaagtgcccgttccatctttcggcgaggcaatggcctactttgctatggtgaagcgctatctaacaagctttccgattgacgaccgcgtccagagtcacattttacatctggaacatgatctcgtacatgttacgcgcaaaaaccatgcaaggcaagcaggagtgagagggctgggccaccagtcgtag

SEQ ID NO: 121239 - DNA, 417 bp, Artificial Sequence
  derived and/or modified sequence
gaggatgaagaaagctcttccgaaggcctcgaagcagaagactgggcccagggcgtcgtagaagcagggggatcttttggcgcatacggcgcacaagaagaggcccagtgtccaacactgcatttcctggagggcggagaggattcagatagtgacagtgaggaggaggatgacgaggaggaggatgacgaggatgaagatgacgacgacgacgaagaggacggagacgaagttcccgtgcctagctttggcgaggcgatggcatactttgccatggttaaaaggtacttaactagctttcctattgacgacagggtgcaatctcacatcttgcatctggagcacgatctggtacacgtaacacggaagaatcacgccagacaggccggagtgcgcggactgggccatcagtcctag

SEQ ID NO: 121240 - DNA, 2840 bp, Artificial Sequence
  derived and/or modified sequence
gcccgccgcccggcgacgcgcccgccggcgtccccggaggtgcccccggcccggccgggtcgtcgccccgccgccgcgcccgcgagccgctttgtctcgggcggggcgcgcgggagaggccgccaggtgccccccgccacgggcccgggccccccgccccggggcggcggcggcggcgccgggccccggggcggggggcgcgccgggatgggccccaagaggcgacagctgacgttccgggagaagtcacggatcatccaggaggtggaggagaatccggacctgcgcaagggcgagatcgcgcggcgcttcaacatcccgccgtccacgctgagcacgatcctgaagaacaagcgcgccatcctggcgtcggagcgcaagtacggggtggcctccacctgccgcaagaccaacaagctgtctccctacgacaagctcgagggcttgctcatcgcctggttccagcagatccgcgccgccggcctgccggtcaagggcatcatcctcaaggagaaggcgctgcgcatagccgaggagctgggcatggacgacttcaccgcctccaacggctggctggaccgcttccgccggcgccacggcgtggtgtcctgcagcggcgtggcccgcgcccgcgcgcgaaacgctgccccccgcaccccggcggcgcctgccagtccggccgcggtgccctcggagggcagtggcgggagcactactggttggcgcgctcgggaggagcagccgccgtcggtggccgagggctacgcctcgcaggacgtgttcagcgccaccgagaccagtctatggtacgacttcctgcccgaccaggccgcggggctgtgcggaggcgacggacggccgcgtcaagccacccagcgcctgagcgtcctgctatgcgccaatgccgacggcagcgagaagctgcccccgctggtggccggcaagtcggccaagccccgcgcaggccaagccggcctgccctgcgactacaccgccaactccaagggtggtgtcaccacccaggccctggccaagtacttgaaggccttggacacccgaatggctgcagagtctcgccgggtcctgctgttggccggccgcttggctgcccagtccttggacacctcgggcctgcggcatgtgcagctggccttcttccctcccggcaccgtgcatccgctggagaggggagtggtccagcaggtgaagggccactaccgccaggccatgctgctcaaggccatggccgcgctagagggccaggatccctcaggcctgcagctgggtctcacggaggccctgcactttgtggctgccgcctggcaggcagtggagccttcggacatagccgcctgctttcgtgaggctggctttgggggtggccctaatgccaccatcaccacttccctcaagagtgagggagaggaagaggaggaggaggaggaagaagaggaggaggaagagggtgaaggagaggaagaggaggaggaaggggaggaggaggaggaggaagggggggaaggagaggaattgggggaggaagaggaggtggaggaggagggtgatgttgatagtgatgaagaagaggaggaagatgaggagagctcctcggagggcttggaggctgaggactgggcccagggagtagtggaggccggtggcagcttcggggcttatggtgcccaggaggaagcccagtgccctactctgcatttcctggaaggtggggaggactctgattcagacagtgaggaagaggacgatgaggaagaggatgatgaagatgaagacgacgatgatgatgaggaggatggtgatgaggtgcctgtacccagctttggggaggccatggcttactttgccatggtcaagaggtacctgacctccttccccattgatgaccgcgtgcagagccacatcctccacttggaacacgatctggttcatgtgaccaggaagaaccacgccaggcaggcgggagttcgaggtcttggacatcaaagctgagtcactggacctagctgtgcccccaacctagattggcagcaccaccccagggcagaggactctctgggcacccgctgtgcatggagccagagtgcagagccccagatcctttagtaatgcttcccctggtcctgcaacaggcccggtcacctcggccgggcccggggctgaggtcagcctcactgcctgcttattgcctctttctcagaatcctctttcctccccatttggccctgggctcaggggaccaggtggggcgggtggggagctgtccggtgctaccacaccgtgccctcagtggactaaccacagcagcagccagggatgggccctggaggttcccggccggagagtgcctctcccctctgccatccacgtcaggtctttggtggggggaccccaaagccattctgggaagggctccagaagaaggtccagcctaggccccctgcaaggctggcagcccccacccccaccccccaggccgccttgagaagcacagtttaactcactgcgggctcctgagcctgcttctgcctgctttccacctccccagtccctttctctggccctgtccatgtgactttggcccttggttttctttccagattggaggtttccaagaggccccccaccgtggaagtaaccaagggcgcttccttgtgggcagctgcaggccccatgcctctcctccctctctggcagggccccatcctgggcagaggggcctggggctgggcccagagtccagccgtccagctgctcctttcccagtttgatttcaataaatctgtccactccccttttgtgggggtgaacgttttaacagccaa

SEQ ID NO: 121241 - DNA, 709 bp, Artificial Sequence
  derived and/or modified sequence
gaggaagatgaggagagctcctcggagggcttggaggctgaggactgggcccagggagtagtggaggccggtggcagcttcggggcttatggtgcccaggaggaagcccagtgccctactctgcatttcctggaaggtggggaggactctgattcagacagtgaggaagaggacgatgaggaagaggatgatgaagatgaagacgacgatgatgatgaggaggatggtgatgaggtgcctgtacccagctttggggaggccatggcttactttgccatggtcaagaggtacctgacctccttccccattgatgaccgcgtgcagagccacatcctccacttggaacacgatctggttcatgtgaccaggaagaaccacgccaggcaggcgggagttcgaggtcttggacatcaaagctgagtcactggacctagctgtgcccccaacctagattggcagcaccaccccagggcagaggactctctgggcacccgctgtgcatggagccagagtgcagagccccagatcctttagtaatgcttcccctggtcctgcaacaggcccggtcacctcggccgggcccggggctgagattggaggtttccaagaggccccccaccgtggaagtaaccaagggcgcttccttgtgggcagctgcaggccccatgcctctcctccctctctggcagggccccatcctgggcagagg

SEQ ID NO: 121242 - DNA, 1800 bp, Artificial Sequence
  derived and/or modified sequence
atgggccccaagagaagacagctgaccttcagagagaagagcagaatcatccaggaggtggaggagaaccccgacctgagaaagggcgagatcgccagaagattcaacatcccccccagcaccctgagcaccatcctgaagaacaagagagccatcctggccagcgagagaaagtacggcgtggccagcacctgcagaaagaccaacaagctgagcccctacgacaagctggagggcctgctgatcgcctggttccagcagatcagagccgccggcctgcccgtgaagggcatcatcctgaaggagaaggccctgagaatcgccgaggagctgggcatggacgacttcaccgccagcaacggctggctggacagattcagaagaagacacggcgtggtgagctgcagcggcgtggccagagccagagccagaaacgccgcccccagaacccccgccgcccccgccagccccgccgccgtgcccagcgagggcagcggcggcagcaccaccggctggagagccagagaggagcagccccccagcgtggccgagggctacgccagccaggacgtgttcagcgccaccgagaccagcctgtggtacgacttcctgcccgaccaggccgccggcctgtgcggcggcgacggcagacccagacaggccacccagagactgagcgtgctgctgtgcgccaacgccgacggcagcgagaagctgccccccctggtggccggcaagagcgccaagcccagagccggccaggccggcctgccctgcgactacaccgccaacagcaagggcggcgtgaccacccaggccctggccaagtacctgaaggccctggacaccagaatggccgccgagagcagaagagtgctgctgctggccggcagactggccgcccagagcctggacaccagcggcctgagacacgtgcagctggccttcttcccccccggcaccgtgcaccccctggagagaggcgtggtgcagcaggtgaagggccactacagacaggccatgctgctgaaggccatggccgccctggagggccaggaccccagcggcctgcagctgggcctgaccgaggccctgcacttcgtggccgccgcctggcaggccgtggagcccagcgacatcgccgcctgcttcagagaggccggcttcggcggcggccccaacgccaccatcaccaccagcctgaagagcgagggcgaggaggaggaggaggaggaggaggaggaggaggaggaggagggcgagggcgaggaggaggaggaggagggcgaggaggaggaggaggagggcggcgagggcgaggagctgggcgaggaggaggaggtggaggaggagggcgacgtggacagcgacgaggaggaggaggaggacgaggagagcagcagcgagggcctggaggccgaggactgggcccagggcgtggtggaggccggcggcagcttcggcgcctacggcgcccaggaggaggcccagtgccccaccctgcacttcctggagggcggcgaggacagcgacagcgacagcgaggaggaggacgacgaggaggaggacgacgaggacgaggacgacgacgacgacgaggaggacggcgacgaggtgcccgtgcccagcttcggcgaggccatggcctacttcgccatggtgaagagatacctgaccagcttccccatcgacgacagagtgcagagccacatcctgcacctggagcacgacctggtgcacgtgaccagaaagaaccacgccagacaggccggcgtgagaggcctgggccaccagagctag

SEQ ID NO: 121243 - DNA, 417 bp, Artificial Sequence
  derived and/or modified sequence
gaggacgaggagagcagcagcgagggcctggaggccgaggactgggcccagggcgtggtggaggccggcggcagcttcggcgcctacggcgcccaggaggaggcccagtgccccaccctgcacttcctggagggcggcgaggacagcgacagcgacagcgaggaggaggacgacgaggaggaggacgacgaggacgaggacgacgacgacgacgaggaggacggcgacgaggtgcccgtgcccagcttcggcgaggccatggcctacttcgccatggtgaagagatacctgaccagcttccccatcgacgacagagtgcagagccacatcctgcacctggagcacgacctggtgcacgtgaccagaaagaaccacgccagacaggccggcgtgagaggcctgggccaccagagctag

SEQ ID NO: 121244 - protein, 943 aa, Artificial Sequence
  derived and/or modified sequence
MAASGLDHLKNGYRRRFCRPSRARDINTEQGQNVLEILQDCFEEKSLANDFSTNSTKSVPNSTRKIKDTCIQSPSKECQKSHPKSVPVSSKKKEASLQFVVEPSEATNRSVQAHEVHQKILATDVSSKNTPDSKKISSRNINDHHSEADEEFYLSVGSPSVLLDAKTSVSQNVIPSSAQKRETYTFENSVNMLPSSTEVSVKTKKRLNFDDKVMLKKIEIDNKVSDEEDKTSEGQERKPSGSSQNRIRDSEYEIQRQAKKSFSTLFLETVKRKSESSPIVRHAATAPPHSCPPDDTKLIEDEFIIDESDQSFASRSWITIPRKAGSLKQRTISPAESTALLQGRKSREKHHNILPKTLANDKHSHKPHPVETSQPSDKTVLDTSYALIGETVNNYRSTKYEMYSKNAEKPSRSKRTIKQKQRRKFMAKPAEEQLDVGQSKDENIHTSHITQDEFQRNSDRNMEEHEEMGNDCVSKKQMPPVGSKKSSTRKDKEESKKKRFSSESKNKLVPEEVTSTVTKSRRISRRPSDWWVVKSEESPVYSNSSVRNELPMHHNSSRKSTKKTNQSSKNIRKKTIPLKRQKTATKGNQRVQKFLNAEGSGGIVGHDEISRCSLSEPLESDEADLAKKKNLDCSRSTRSSKNEDNIMTAQNVPLKPQTSGYTCNIPTESNLDSGEHKTSVLEESGPSRLNNNYLMSGKNDVDDEEVHGSSDDSKQSKVIPKNRIHHKLVLPSNTPNVRRTKRTRLKPLEYWRGERIDYQGRPSGGFVISGVLSPDTISSKRKAKENIGKVNKKSNKKRICLDNDERKTNLMVNLGIPLGDPLQPTRVKDPETREIILMDLVRPQDTYQFFVKHGELKVYKTLDTPFFSTGKLILGPQEEKGKQHVGQDILVFYVNFGDLLCTLHETPYILSTGDSFYVPSGNYYNIKNLRNEESVLLFTQIKR

SEQ ID NO: 121245 - DNA, 2832 bp, Artificial Sequence
  derived and/or modified sequence
atggccgccagtggccttgaccacctcaaaaacggttataggagaaggttctgtcggccctcccgagccagggatattaacacggaacaagggcagaacgtgcttgagatccttcaggattgttttgaggaaaaaagtctggccaatgatttttcaaccaactctaccaaaagcgtaccaaactccactaggaagatcaaagacacatgcatacaatccccttctaaagaatgccagaagtctcaccctaagtctgtgcctgtatcttctaagaagaaggaagccagtctccagttcgtggtggaaccttcggaagccacaaacagaagcgtgcaggcccacgaagtgcaccagaaaattttggccacagacgtgagttccaagaacaccccagactctaaaaagatttctagcaggaatataaacgatcaccactccgaagcggatgaagaattctatttgagcgtgggcagcccttctgtgctcctggacgctaagactagcgtaagccagaatgtcatcccatcatcagcacaaaaaagagagacatacacattcgagaactcggtcaatatgctcccatcctcgaccgaagtatcggtgaagaccaagaagcgcttgaattttgatgataaagtgatgctgaaaaagatcgagattgacaacaaagtgtctgacgaggaagacaagacctcagaaggccaggagcgtaagccgtctggatctagtcagaaccggatacgcgactcggagtatgagattcagcgccaggcgaagaaaagcttctctacgctgttcctggagacggtgaagaggaaatccgagtccagccccattgttcggcacgccgccactgctcctccgcactcatgcccccccgacgataccaagctgatcgaagacgagtttataatcgacgaaagcgatcagtcattcgcaagtaggtcatggattaccattccccgcaaggcgggctcgctcaagcagagaacaatctcacccgcagagtctacagccctgctgcagggaagaaagagcagggagaaacatcataacatcctcccaaagaccctggccaacgataagcattcccacaaaccccatccggtggagactagccaaccttcagacaaaacagtattggatacttcttacgcactcatcggagagaccgttaacaactacaggtcaactaagtatgaaatgtactccaaaaacgcagagaagccctcgagaagcaagagaacaatcaaacagaaacagcgcaggaagttcatggccaaaccagctgaggagcagttagacgtaggacagagcaaggacgagaacattcatacatcccatataacccaagatgaatttcagaggaattctgacagaaatatggaggagcacgaagagatgggcaatgattgcgtatctaaaaagcagatgcctcctgtggggtccaagaaatctagcacgagaaaagacaaagaggaatctaagaagaagcggttctccagtgagtcaaagaacaagcttgtcccagaggaggttaccagcactgtgactaaaagccgcagaatttctcgccggccaagcgactggtgggtcgttaaaagcgaagaaagccccgtctatagtaatagttcggtccggaacgagctacctatgcatcacaattcgtccaggaagtccactaagaaaaccaatcagtcttctaagaatataaggaagaaaaccatcccactaaaacgtcagaagacagcaacgaagggaaaccaaagagtgcagaagttccttaacgctgaaggtagtgggggtatagtgggccacgacgagatctcccgatgttcactgtccgagcccctcgaaagcgacgaagctgatcttgcaaaaaaaaagaacctcgattgttctcgaagcacgagaagttccaagaatgaagataacatcatgaccgcacagaacgtcccactgaaaccccaaaccagcggctatacatgtaacatacccacagagagcaatctcgattccggcgaacacaagacctctgtgctggaagagtctggcccctcgcgactcaataataactacttgatgtccggaaaaaacgacgttgatgacgaggaggtgcacgggtcttcggacgactcaaaacagagcaaggtgatccccaagaatcgtatccaccataagctggtccttccatcgaacacacccaatgtgaggcggacaaaacgcacacggttgaagcccctcgagtattggcgaggggagcgtatcgattaccagggtcgaccctccggaggatttgtgatcagtggcgtgctgagcccagataccatctcaagcaaaaggaaggccaaggaaaacattgggaaagtgaacaaaaaatccaataagaagagaatttgtttggataacgacgaaaggaagaccaatcttatggttaatttaggtatccctctgggcgatcccttgcagcctaccagggtaaaggacccagaaaccagagagatcatcctgatggatctggtgcggccacaagatacctatcagtttttcgtgaagcacggcgaactcaaggtatacaagacactggacacaccttttttctctacagggaaattgattctcggcccccaggaggagaagggtaaacagcacgtcggccaagacattctggtgttctatgtcaactttggcgacctgctctgcaccctgcatgagaccccatatatcctaagtacaggagactcattttatgtcccatctgggaattactataacattaaaaacctaaggaatgaagaatctgtgctattattcacacagatcaaacgctag

SEQ ID NO: 121246 - DNA, 2832 bp, Artificial Sequence
  derived and/or modified sequence
atggccgccagcggcctggaccacctgaagaatggctacagaagacgcttctgccggcccagccgggcccgggacatcaacacagagcagggccagaatgtgctggagatcctgcaggactgctttgaggagaagagcctggccaatgacttcagcaccaacagcaccaagtctgtgcccaacagcaccaggaagatcaaggacacctgcatccagagccccagcaaagaatgccagaagagccaccccaagtctgtgcctgtgagcagcaagaagaaggaggccagcctgcagtttgtggtggagcccagcgaggccaccaacagatctgtgcaggcccacgaggtgcaccagaagatcctggccacagatgtgagcagcaagaacaccccagacagcaagaagatcagcagcaggaacatcaatgaccaccacagcgaggctgatgaggagttctacctgtctgtgggcagccccagcgtgctgctggatgccaagacctctgtgtcccagaatgtcatccccagcagcgcccagaagcgggagacctacacctttgaaaattctgtgaacatgctgcccagcagcacagaggtgtctgtgaagaccaagaagaggctgaactttgatgacaaggtgatgctgaagaagattgaaattgacaacaaggtgtctgatgaggaggacaagaccagcgagggccaggagaggaagcccagcggcagcagccagaaccgcatccgggacagtgaatatgagatccagaggcaggccaagaagagcttcagcaccctcttcctggagaccgtgaagaggaagtctgagagcagccccatcgtgagacatgctgccacagccccaccccacagctgccccccagatgacaccaagctgattgaagatgagttcatcattgatgaaagtgaccagagctttgccagccgctcctggatcaccatccccaggaaggccggcagcctgaagcagaggaccatcagccctgctgagagcacagccctgctgcagggcaggaagagccgggagaagcaccacaacatcctgcccaagaccctggccaatgacaagcacagccacaagccccaccctgtggagaccagccagcccagcgacaagacagtgctggacaccagctatgccctgattggagaaacagtgaacaactaccgcagcaccaagtatgagatgtacagcaagaatgctgagaagcccagccgcagcaagaggaccatcaagcagaagcagaggaggaagttcatggccaagccagctgaggagcagctggatgtgggccagagcaaggatgagaacatccacaccagccacatcacccaggatgagttccagaggaacagcgacaggaacatggaggagcacgaggagatgggaaatgactgtgtgtccaagaagcagatgcctcctgtgggcagcaagaagagcagcaccaggaaggacaaggaggagagcaagaagaagcgcttcagcagcgagagcaagaacaagctggtgcctgaggaggtgaccagcacagtgaccaagagccgccgcatcagcagaagacccagcgactggtgggtggtgaagtctgaggagagccctgtgtacagcaacagctctgtgagaaatgagctgcccatgcaccacaacagcagcaggaagagcaccaagaagaccaaccagagcagcaagaacatcaggaagaagaccatccccctgaagaggcagaagacagccaccaagggcaaccagagggtgcagaagttcctgaatgctgagggcagcggcggcatcgtgggccatgatgagatcagccgctgcagcctgtctgagcccctggagagtgatgaagctgacctggccaagaagaagaacctggactgcagccgcagcaccaggagcagcaagaatgaagacaacatcatgacagcccagaatgtgcccctgaagccccagaccagcggctacacctgcaacatccccacagagagcaacctggacagcggggagcacaagacctctgtgctggaggagagcggccccagccggctgaacaacaactacctgatgtctgggaagaatgatgtggatgatgaggaggtgcacggcagcagtgatgacagcaagcagagcaaggtgatccccaagaaccgcatccaccacaagctggtgctgcccagcaacacccccaacgtgcggaggaccaagaggacccggctgaagcccctggagtactggagaggagagagaattgactaccagggccggcccagcggcggcttcgtcatctctggagtgctgagcccagacaccatcagcagcaagaggaaggccaaggaaaatattggcaaggtgaacaagaagagcaacaagaagaggatctgcctggacaatgatgagaggaagaccaacctgatggtgaacctgggcatccccctgggggaccccctgcagcccaccagggtgaaggaccctgagacccgggagatcatcctgatggacctggtgcggccccaggacacctaccagttctttgtgaagcatggagagctgaaggtgtacaagaccctggacacccccttcttcagcacaggcaagctgatcctgggcccccaggaggagaagggcaagcagcacgtgggccaggacatcctggtgttctacgtgaactttggagacctgctgtgcaccctgcacgagaccccctacatcctgagcactggagacagcttctacgtgcccagcggcaactactacaacatcaagaacctgagaaatgaggagagcgtgctgctcttcacccagatcaagaggtag

SEQ ID NO: 121247 - DNA, 2832 bp, Artificial Sequence
  derived and/or modified sequence
atggccgccagcggcctggaccacctgaagaacggctaccggcggcggttctgtaggccatcgagggcacgtgatatcaacaccgagcagggtcagaatgttctcgagattctccaagactgctttgaggaaaaatccctcgccaacgatttcagtacgaattcaactaaatccgtgccgaattccaccagaaagataaaggacacatgcatccagagcccgtcaaaggaatgtcagaaatcccaccccaagtctgtgccagtctcaagtaagaagaaggaagcgagccttcaattcgtagtcgagccaagcgaggctaccaatcggagcgttcaggcgcatgaagtgcaccagaagatcctcgccacagatgtctcctctaaaaatacaccagacagtaaaaagatttcaagtcgaaatatcaacgaccatcacagcgaggctgatgaggaattttacctgagcgtgggctctccttcagttttgctagatgctaaaacatccgtttctcagaacgtcatcccatcctctgcccagaagcgcgagacttacactttcgagaacagcgtgaatatgttgccttcctctaccgaggtgtcagtgaaaacaaagaaacgactgaactttgacgacaaggtgatgctgaaaaaaatcgagattgataacaaggtgtcagatgaggaggataaaacctccgaggggcaggagcgcaagccaagcggatcatcccagaatcggattagagactctgaatacgagattcaaaggcaagccaagaagtcatttagcacgctctttctggaaacagtaaaaaggaagtcggagtcttctcccatcgtgagacacgccgcaacggcccccccacacagttgcccgcccgacgacaccaagcttatagaggatgagtttattatagacgaatcagatcaatctttcgcatctcgttcgtggattaccatccctagaaaggccggcagccttaagcagaggacgattagtcctgccgagagcactgcactgctgcagggacgtaagtcacgcgagaaacatcataatatcctgcccaaaactctagctaacgataagcatagccataagcctcaccctgttgagacctcccagccctcggataagacggtgctagatacctcctacgcactaataggagagacagtaaataactatcgatccaccaaatatgagatgtacagtaagaacgccgagaaaccttcccgctctaagcgcactatcaaacagaagcaacgacgtaagttcatggctaaaccagctgaggaacaactggacgtggggcagtctaaagacgagaacattcacacctcccatatcacccaggatgagtttcagcggaactcagaccgcaatatggaggaacacgaagaaatggggaatgactgtgtgtcgaagaagcagatgcctcctgtgggctctaagaagagctctactcggaaagacaaagaagagtcaaaaaagaaaaggttttcaagtgaaagcaagaataagctggttcccgaggaggtgacctctactgtcacaaagtctcgcagaatttctaggagaccatctgactggtgggtggtcaagagtgaagagtctcctgtctactctaactcctcagtgcggaacgagcttcccatgcaccacaattcttcccggaaaagtactaaaaaaaccaaccaatcatccaaaaatatacgaaagaagaccatacccctgaaacgccaaaagaccgctacaaaggggaaccagagggttcagaaattcttgaacgccgagggcagcggggggatcgtcggccatgatgaaattagtcgttgttccctaagcgagccattagaatccgacgaggccgatctcgccaaaaaaaaaaacttagactgttctagatctacccgctcgagcaaaaatgaggataatatcatgaccgcgcagaatgtgcctctcaagccccagaccagcggatacacgtgcaatatcccaaccgagtccaatttagattctggagagcacaaaacgtctgtcctcgaggagagcggcccaagtagacttaacaataactatttgatgtccggtaaaaatgatgtagacgatgaggaagtccatggctcatcggacgacagcaagcagagtaaagtcatcccaaaaaatcgtatccatcacaagttggtgctgccttcaaatactccgaatgtacgccgcaccaagcgtacccgcttgaagccacttgaatactggaggggtgagcggatcgattaccaggggaggccatctggaggatttgtcattagcggtgtcctgtccccggacacaatcagttctaagagaaaggctaaagaaaacataggcaaggtgaacaagaagagcaataaaaagcgtatatgtctggacaacgacgaacgaaagaccaacctgatggtaaatctgggtattcctcttggagacccactgcagccaacaagagtcaaggacccggaaacaagggagatcattttgatggatctggtcagaccccaggatacttatcagtttttcgtgaagcatggcgagctgaaagtatataaaactctggacacaccctttttttcaacgggtaaattgattttaggacctcaggaagaaaaaggcaagcagcacgtaggacaggacatcttggtcttttacgtcaatttcggcgatctgctttgcacactccatgagaccccatatatcttgtccaccggagatagcttttatgtgccaagtgggaactactacaatatcaagaacctcaggaatgaggaatccgtactcctcttcactcagataaagcgctag

SEQ ID NO: 121248 - DNA, 2832 bp, Artificial Sequence
  derived and/or modified sequence
atggctgctagtggactcgatcatctgaagaatggctaccggagacgcttctgtcggccttcccgagccagggatatcaacactgaacagggccagaacgtcctcgaaattctccaggactgttttgaggaaaaatctttagctaacgacttctccaccaacagcactaagtccgtgcccaattccactcgcaaaattaaggatacatgcatccagtccccctcaaaggagtgccagaaaagccacccaaagagtgtccccgtgtcttcgaagaagaaggaggcatccctccagttcgtagtcgagccctctgaggccactaaccgctctgtgcaagcccacgaagtgcaccaaaagatcctagccacagacgttagctccaaaaatacccccgatagcaaaaaaattagctctcgaaacattaatgaccatcactcagaagctgacgaggagttttacctatctgtcggctcacctagcgtcctcctcgatgctaagaccagcgtgtctcagaatgtcattccaagctcagcccagaagcgggagacctatacctttgagaattctgtcaacatgctgccctcttccaccgaagtgagtgtgaaaactaagaaacgcctgaatttcgacgacaaagttatgctgaagaagatcgagatagacaataaagtgtctgatgaggaggacaagaccagcgagggacaggaaagaaaacctagtggaagctctcagaatagaattagggacagtgaatatgagattcaacgccaggccaaaaaatctttcagcacacttttcctggagacagtgaaaaggaagtctgagtcgtcacccattgtgaggcatgccgcaacagcaccccctcatagttgcccacccgatgacaccaagttaatcgaggacgagttcattattgatgaaagcgaccaatcttttgcgtctcgaagttggatcaccatacccagaaaagccggaagtttaaaacagcgtaccatatcgcccgctgagagtactgcactcctccagggcaggaagagtcgggagaagcatcataatattctccctaaaacactggccaatgataaacactcccataagccacatcccgtggagacttcacagcccagcgacaagacagttctggatacttcttacgctttaattggagaaacagttaacaattatagatcaaccaaatatgagatgtacagtaagaatgccgaaaagcccagtcgttccaagagaacaatcaaacagaagcaacgcaggaagttcatggcgaagccagcagaggagcaattggacgtgggtcagagcaaagacgaaaatatccacacatcgcacattactcaggatgagtttcagcgtaattccgatcgcaatatggaagaacacgaggagatgggtaacgactgtgtgtccaagaagcagatgccacccgtcggcagcaagaaatctagcacacggaaagacaaagaagaatccaagaagaaaaggttcagctctgaaagtaaaaataagttggtccctgaggaagtgacttctactgtgacgaaatccaggcgtatttcccggagacctagcgattggtgggtggtcaaaagtgaagagtctcctgtatattcaaatagcagcgtccgaaacgagctgcctatgcatcataattcatcaaggaaaagcacaaaaaaaactaatcagtccagcaaaaacatcaggaagaagacaatcccactgaaaaggcaaaagacagctacaaaaggcaatcagcgggttcagaagtttctgaatgccgaaggcagcggagggatagttgggcacgacgagatctcccgatgctccctaagtgagcctctggaatctgatgaggccgacttggccaagaaaaaaaaccttgactgctccagaagcactcgttcctcaaagaatgaggataacatcatgactgcccagaacgtacccctgaagcctcaaacctccggatatacctgtaacatccccacggagagcaatctcgactccggagagcacaaaacaagcgtcctggaagagtcggggcctagccggttgaataataattatctcatgagcggtaaaaacgatgtggatgacgaagaagtgcacggaagctccgatgattctaagcagtcaaaagtgattcctaagaacaggatccatcacaagctggtgttgcctagcaacacgcccaacgtacgccgtaccaaaaggacaagactgaaacctcttgagtactggagaggcgagcgaatcgattatcagggtcgaccaagcggcggttttgttataagtggcgtgctcagcccggacacaattagcagtaaacgcaaagccaaagaaaacatcggaaaggtgaacaaaaaatctaacaaaaagaggatctgtctggataacgatgagagaaagaccaatttgatggttaatctggggattccactaggtgaccctctgcaacctacacgcgtaaaagacccagagacaagagaaattatccttatggacctggtgagacctcaggatacctatcaatttttcgtaaagcacggcgaactcaaggtatataagacactggacaccccctttttctccactgggaaacttattctgggcccacaagaagaaaaaggtaaacagcacgtgggccaggatattctggtcttttatgtcaattttggtgatttgctctgtaccctgcacgaaactccgtatatactgtctacaggcgatagtttctacgtcccttctggtaactattacaacatcaagaacctccgaaacgaggagagcgtgcttctgtttacccagatcaaacgctag

SEQ ID NO: 121249 - DNA, 3885 bp, Artificial Sequence
  derived and/or modified sequence
atgtgtctccgggttcaaacccaggcacaggccaagcgttcttgtttgttgagggcggagccaatggcgggggagtgttgttagcgcgcgccttccggatcgcagctctcgcggcagtcgcctgagacttaaggttattgcttggccgcggcctggtattccggcgattcgtttcttgctcggcttcctggagctgtggtccgtgtgggcttccacctcagacagttgcgctggctcagcggggccggaacatggctgcgtccggtctggatcatctcaaaaatggctacagaagaagattttgtcgaccttccagggcacgtgacattaacacagagcaaggccagaatgttctggaaatcttacaagactgttttgaagaaaaaagtcttgccaatgattttagtacaaattctacaaaatcagtgcctaattcaacacgcaaaataaaagacacttgtattcagtcaccaagcaaagagtgccagaaatcacatccaaagtcagttccagtttcttcaaagaagaaagaagcctctctacagtttgttgtagaaccaagtgaagccacaaacagatcagttcaggcccatgaagttcatcagaaaattctggcaactgatgttagttccaaaaatacacctgactcgaaaaaaatatcaagtagaaacataaatgatcatcacagtgaagctgatgaagaattttacttatccgttggctcaccttctgttcttttggatgcaaaaacatctgtatcacaaaatgttattccatctagtgcccaaaagagagagacttacacttttgaaaattcagtaaatatgctgccttcaagtacagaggtttcagttaaaaccaaaaaaaggttaaactttgatgataaagttatgttaaagaaaatagaaatagataataaagtatcagatgaagaggataaaacatcggaaggacaagaaagaaaaccatcaggatcatctcagaatagaatacgagattcagaatatgaaattcaacgacaagctaaaaaaagtttttcaacattgtttttagaaacagtaaaacgaaaaagtgaatccagtcccattgttaggcatgcggcaactgctccacctcattcgtgtcctcccgatgatacgaagttgatagaggatgaatttataattgatgagtcggatcaaagttttgccagtagatcttggattacaataccaagaaaggcagggtctctgaaacaacgcacaatatccccggctgagagcactgcactccttcaaggtagaaagtcaagagaaaagcatcataatatattacctaagactttggcaaatgacaaacattcccataaacctcacccagtagagacatctcagccctctgataaaacagtactggatacaagttatgctttgataggtgaaacagtaaataattatagatctacaaaatatgaaatgtattccaagaatgcagaaaaaccatctagaagcaaaaggactataaaacaaaaacagagaagaaaattcatggctaaaccagctgaagaacagcttgatgtgggacagtctaaagatgaaaacatacatacatcacatattacccaagacgaatttcaaagaaattcagacagaaatatggaagagcatgaagagatgggaaatgattgtgtttccaaaaaacagatgccacctgtgggaagcaagaaaagtagcactagaaaagataaggaagaatctaaaaagaagcgcttttccagtgagtccaagaacaaacttgtacctgaagaagtgacttcaactgtcacgaaaagtcgaagaatttccaggcgtccatctgattggtgggtggtaaaatcagaggagagtcctgtttatagcaattcttcagtaagaaatgaattaccaatgcatcacaatagtagccgaaaatctactaagaaaacaaatcagtcatctaagaatattaggaaaaaaactattccacttaaaaggcagaagacagcaactaaaggcaaccaaagagtacagaagtttttaaatgctgaaggttctggaggtatcgttggtcatgatgaaatttccagatgttcgctgagtgagccattggaaagtgatgaggcagacttggctaagaagaaaaatcttgattgttctagatctacaagaagctcaaagaatgaagataacattatgactgcacagaatgttcccctaaagcctcagaccagtggatatacatgtaatataccaacagagtcaaacttggattctggagagcataagacttcagttttagaggaaagtggaccttccaggctcaataataattatttaatgtctggaaagaatgatgtggatgatgaggaagttcatggaagttcagatgactcaaaacaatctaaagtgataccaaagaacagaatccatcacaaactagtattgccctccaacacaccaaatgttcgcaggaccaagagaacacgtttgaaacctttggagtactggcgaggagagcgaatagattatcaaggaaggccatcaggaggattcgtgattagtggagtactatctccagacacaatatcgtctaaaaggaaggcaaaagaaaatattggaaaagtcaacaaaaaatctaataagaaaaggatctgtcttgataacgatgaaagaaagactaacttaatggtaaatctaggtatacctcttggagatcctttgcagccaacgagggtaaaggacccagaaacaagagagattattctcatggatcttgtaaggccacaagatacatatcaattttttgttaagcatggtgagttgaaggtatacaagacattggatacaccctttttttctactgggaaattgatattaggaccacaagaagaaaagggaaagcagcatgttggccaggatatattggttttttatgttaactttggtgaccttttgtgtactttacatgaaacaccttatatattaagtactggggattcgttctatgttccttcaggtaactattataacatcaaaaatctccggaatgaggaaagtgttcttctttttactcagataaaaagatgaaagatcaaccaaccttaaatatatgtatgtatatatgtatatgtgaaaaacagtttgtatagttggaatatttgtctttgtaattacttgtgatgttttaaaataaaaattttattcagttttctgtagacttgtatttgataaacatttctaactcacatgttttttctgatttttcagtgactgtacataatagcttgtagcgatgtccatatttatgatattatttttataatttgacaagaatatgaaaatgaaatatagaacatttctgtgtcaaaagagacctgattaatatgtctactcattaaaaaacatcttttccaaatactaattttaaatcatttattattaaataatccaatgggagagaactgtggtaaaaggcatgtttgtattaatttcctagaactgctgtaacaaaataccacaaaatgagtgacttaaagcaacagaaatttattatctcagttctagaggctagaagtctgaaatcaaggtgttgtcaaggccgtgatgtctttgaaaacctgtaagggagagaatccttccttattcctaacttctggtggtttactggcaatttctggcattccttggcttgcaccggtagcatttcaatctacttgcattatcacatggtattctcaccttgtgtgtctgtgttggcatgacatctatttagtatattacatgtaaatgtttttccattatgctttttggttcatattttctgttggaggcagtgtccttcgccattgctttctgtatgtggcctcaactttccctttttaatatcaat

SEQ ID NO: 121250 - DNA, 2832 bp, Artificial Sequence
  derived and/or modified sequence
atggccgccagcggcctggaccacctgaagaacggctacagaagaagattctgcagacccagcagagccagagacatcaacaccgagcagggccagaacgtgctggagatcctgcaggactgcttcgaggagaagagcctggccaacgacttcagcaccaacagcaccaagagcgtgcccaacagcaccagaaagatcaaggacacctgcatccagagccccagcaaggagtgccagaagagccaccccaagagcgtgcccgtgagcagcaagaagaaggaggccagcctgcagttcgtggtggagcccagcgaggccaccaacagaagcgtgcaggcccacgaggtgcaccagaagatcctggccaccgacgtgagcagcaagaacacccccgacagcaagaagatcagcagcagaaacatcaacgaccaccacagcgaggccgacgaggagttctacctgagcgtgggcagccccagcgtgctgctggacgccaagaccagcgtgagccagaacgtgatccccagcagcgcccagaagagagagacctacaccttcgagaacagcgtgaacatgctgcccagcagcaccgaggtgagcgtgaagaccaagaagagactgaacttcgacgacaaggtgatgctgaagaagatcgagatcgacaacaaggtgagcgacgaggaggacaagaccagcgagggccaggagagaaagcccagcggcagcagccagaacagaatcagagacagcgagtacgagatccagagacaggccaagaagagcttcagcaccctgttcctggagaccgtgaagagaaagagcgagagcagccccatcgtgagacacgccgccaccgcccccccccacagctgcccccccgacgacaccaagctgatcgaggacgagttcatcatcgacgagagcgaccagagcttcgccagcagaagctggatcaccatccccagaaaggccggcagcctgaagcagagaaccatcagccccgccgagagcaccgccctgctgcagggcagaaagagcagagagaagcaccacaacatcctgcccaagaccctggccaacgacaagcacagccacaagccccaccccgtggagaccagccagcccagcgacaagaccgtgctggacaccagctacgccctgatcggcgagaccgtgaacaactacagaagcaccaagtacgagatgtacagcaagaacgccgagaagcccagcagaagcaagagaaccatcaagcagaagcagagaagaaagttcatggccaagcccgccgaggagcagctggacgtgggccagagcaaggacgagaacatccacaccagccacatcacccaggacgagttccagagaaacagcgacagaaacatggaggagcacgaggagatgggcaacgactgcgtgagcaagaagcagatgccccccgtgggcagcaagaagagcagcaccagaaaggacaaggaggagagcaagaagaagagattcagcagcgagagcaagaacaagctggtgcccgaggaggtgaccagcaccgtgaccaagagcagaagaatcagcagaagacccagcgactggtgggtggtgaagagcgaggagagccccgtgtacagcaacagcagcgtgagaaacgagctgcccatgcaccacaacagcagcagaaagagcaccaagaagaccaaccagagcagcaagaacatcagaaagaagaccatccccctgaagagacagaagaccgccaccaagggcaaccagagagtgcagaagttcctgaacgccgagggcagcggcggcatcgtgggccacgacgagatcagcagatgcagcctgagcgagcccctggagagcgacgaggccgacctggccaagaagaagaacctggactgcagcagaagcaccagaagcagcaagaacgaggacaacatcatgaccgcccagaacgtgcccctgaagccccagaccagcggctacacctgcaacatccccaccgagagcaacctggacagcggcgagcacaagaccagcgtgctggaggagagcggccccagcagactgaacaacaactacctgatgagcggcaagaacgacgtggacgacgaggaggtgcacggcagcagcgacgacagcaagcagagcaaggtgatccccaagaacagaatccaccacaagctggtgctgcccagcaacacccccaacgtgagaagaaccaagagaaccagactgaagcccctggagtactggagaggcgagagaatcgactaccagggcagacccagcggcggcttcgtgatcagcggcgtgctgagccccgacaccatcagcagcaagagaaaggccaaggagaacatcggcaaggtgaacaagaagagcaacaagaagagaatctgcctggacaacgacgagagaaagaccaacctgatggtgaacctgggcatccccctgggcgaccccctgcagcccaccagagtgaaggaccccgagaccagagagatcatcctgatggacctggtgagaccccaggacacctaccagttcttcgtgaagcacggcgagctgaaggtgtacaagaccctggacacccccttcttcagcaccggcaagctgatcctgggcccccaggaggagaagggcaagcagcacgtgggccaggacatcctggtgttctacgtgaacttcggcgacctgctgtgcaccctgcacgagaccccctacatcctgagcaccggcgacagcttctacgtgcccagcggcaactactacaacatcaagaacctgagaaacgaggagagcgtgctgctgttcacccagatcaagagatag

SEQ ID NO: 121251 - protein, 2701 aa, Artificial Sequence
  derived and/or modified sequence
MAEEGAVAVCVRVRPLNSREESLGETAQVYWKTDNNVIYQVDGSKSFNFDRVFHGNETTKNVYEEIAAPIIDSAIQGYNGTIFAYGQTASGKTYTMMGSEDHLGVIPRAIHDIFQKIKKFPDREFLLRVSYMEIYNETITDLLCGTQKMKPLIIREDVNRNVYVADLTEEVVYTSEMALKWITKGEKSRHYGETKMNQRSSRSHTIFRMILESREKGEPSNCEGSVKVSHLNLVDLAGSERAAQTGAAGVRLKEGCNINRSLFILGQVIKKLSDGQVGGFINYRDSKLTRILQNSLGGNAKTRIICTITPVSFDETLTALQFASTAKYMKNTPYVNEVSTDEALLKRYRKEIMDLKKQLEEVSLETRAQAMEKDQLAQLLEEKDLLQKVQNEKIENLTRMLVTSSSLTLQQELKAKRKRRVTWCLGKINKMKNSNYADQFNIPTNITTKTHKLSINLLREIDESVCSESDVFSNTLDTLSEIEWNPATKLLNQENIESELNSLRADYDNLVLDYEQLRTEKEEMELKLKEKNDLDEFEALERKTKKDQEMQLIHEISNLKNLVKHAEVYNQDLENELSSKVELLREKEDQIKKLQEYIDSQKLENIKMDLSYSLESIEDPKQMKQTLFDAETVALDAKRESAFLRSENLELKEKMKELATTYKQMENDIQLYQSQLEAKKKMQVDLEKELQSAFNEITKLTSLIDGKVPKDLLCNLELEGKITDLQKELNKEVEENEALREEVILLSELKSLPSEVERLRKEIQDKSEELHIITSEKDKLFSEVVHKESRVQGLLEEIGKTKDDLATTQSNYKSTDQEFQNFKTLHMDFEQKYKMVLEENERMNQEIVNLSKEAQKFDSSLGALKTELSYKTQELQEKTREVQERLNEMEQLKEQLENRDSTLQTVEREKTLITEKLQQTLEEVKTLTQEKDDLKQLQESLQIERDQLKSDIHDTVNMNIDTQEQLRNALESLKQHQETINTLKSKISEEVSRNLHMEENTGETKDEFQQKMVGIDKKQDLEAKNTQTLTADVKDNEIIEQQRKIFSLIQEKNELQQMLESVIAEKEQLKTDLKENIEMTIENQEELRLLGDELKKQQEIVAQEKNHAIKKEGELSRTCDRLAEVEEKLKEKSQQLQEKQQQLLNVQEEMSEMQKKINEIENLKNELKNKELTLEHMETERLELAQKLNENYEEVKSITKERKVLKELQKSFETERDHLRGYIREIEATGLQTKEELKIAHIHLKEHQETIDELRRSVSEKTAQIINTQDLEKSHTKLQEEIPVLHEEQELLPNVKEVSETQETMNELELLTEQSTTKDSTTLARIEMERLRLNEKFQESQEEIKSLTKERDNLKTIKEALEVKHDQLKEHIRETLAKIQESQSKQEQSLNMKEKDNETTKIVSEMEQFKPKDSALLRIEIEMLGLSKRLQESHDEMKSVAKEKDDLQRLQEVLQSESDQLKENIKEIVAKHLETEEELKVAHCCLKEQEETINELRVNLSEKETEISTIQKQLEAINDKLQNKIQEIYEKEEQFNIKQISEVQEKVNELKQFKEHRKAKDSALQSIESKMLELTNRLQESQEEIQIMIKEKEEMKRVQEALQIERDQLKENTKEIVAKMKESQEKEYQFLKMTAVNETQEKMCEIEHLKEQFETQKLNLENIETENIRLTQILHENLEEMRSVTKERDDLRSVEETLKVERDQLKENLRETITRDLEKQEELKIVHMHLKEHQETIDKLRGIVSEKTNEISNMQKDLEHSNDALKAQDLKIQEELRIAHMHLKEQQETIDKLRGIVSEKTDKLSNMQKDLENSNAKLQEKIQELKANEHQLITLKKDVNETQKKVSEMEQLKKQIKDQSLTLSKLEIENLNLAQKLHENLEEMKSVMKERDNLRRVEETLKLERDQLKESLQETKARDLEIQQELKTARMLSKEHKETVDKLREKISEKTIQISDIQKDLDKSKDELQKKIQELQKKELQLLRVKEDVNMSHKKINEMEQLKKQFEAQNLSMQSVRMDNFQLTKKLHESLEEIRIVAKERDELRRIKESLKMERDQFIATLREMIARDRQNHQVKPEKRLLSDGQQHLTESLREKCSRIKELLKRYSEMDDHYECLNRLSLDLEKEIEFQKELSMRVKANLSLPYLQTKHIEKLFTANQRCSMEFHRIMKKLKYVLSYVTKIKEEQHESINKFEMDFIDEVEKQKELLIKIQHLQQDCDVPSRELRDLKLNQNMDLHIEEILKDFSESEFPSIKTEFQQVLSNRKEMTQFLEEWLNTRFDIEKLKNGIQKENDRICQVNNFFNNRIIAIMNESTEFEERSATISKEWEQDLKSLKEKNEKLFKNYQTLKTSLASGAQVNPTTQDNKNPHVTSRATQLTTEKIRELENSLHEAKESAMHKESKIIKMQKELEVTNDIIAKLQAKVHESNKCLEKTKETIQVLQDKVALGAKPYKEEIEDLKMKLVKIDLEKMKNAKEFEKEISATKATVEYQKEVIRLLRENLRRSQQAQDTSVISEHTDPQPSNKPLTCGGGSGIVQNTKALILKSEHIRLEKEISKLKQQNEQLIKQKNELLSNNQHLSNEVKTWKERTLKREAHKQVTCENSPKSPKVTGTASKKKQITPSQCKERNLQDPVPKESPKSCFFDSRSKSLPSPHPVRYFDNSSLGLCPEVQNAGAESVDSQPGPWHASSGKDVPECKTQ

SEQ ID NO: 121252 - protein, 2345 aa, Artificial Sequence
  derived and/or modified sequence
MAEEGAVAVCVRVRPLNSREESLGETAQVYWKTDNNVIYQVDGSKSFNFDRVFHGNETTKNVYEEIAAPIIDSAIQGYNGTIFAYGQTASGKTYTMMGSEDHLGVIPRAIHDIFQKIKKFPDREFLLRVSYMEIYNETITDLLCGTQKMKPLIIREDVNRNVYVADLTEEVVYTSEMALKWITKGEKSRHYGETKMNQRSSRSHTIFRMILESREKGEPSNCEGSVKVSHLNLVDLAGSERAAQTGAAGVRLKEGCNINRSLFILGQVIKKLSDGQVGGFINYRDSKLTRILQNSLGGNAKTRIICTITPVSFDETLTALQFASTAKYMKNTPYVNEVSTDEALLKRYRKEIMDLKKQLEEVSLETRAQAMEKDQLAQLLEEKDLLQKVQNEKIENLTRMLVTSSSLTLQQELKAKRKRRVTWCLGKINKMKNSNYADQFNIPTNITTKTHKLSINLLREIDESVCSESDVFSNTLDTLSEIEWNPATKLLNQENIESELNSLRADYDNLVLDYEQLRTEKEEMELKLKEKNDLDEFEALERKTKKDQEMQLIHEISNLKNLVKHAEVYNQDLENELSSKVELLREKEDQIKKLQEYIDSQKLENIKMDLSYSLESIEDPKQMKQTLFDAETVALDAKRESAFLRSENLELKEKMKELATTYKQMENDIQLYQSQLEAKKKMQVDLEKELQSAFNEITKLTSLIDGKVPKDLLCNLELEGKITDLQKELNKEVEENEALREEVILLSELKSLPSEVERLRKEIQDKSEELHIITSEKDKLFSEVVHKESRVQGLLEEIGKTKDDLATTQSNYKSTDQEFQNFKTLHMDFEQKYKMVLEENERMNQEIVNLSKEAQKFDSSLGALKTELSYKTQELQEKTREVQERLNEMEQLKEQLENRDSTLQTVEREKTLITEKLQQTLEEVKTLTQEKDDLKQLQESLQIERDQLKSDIHDTVNMNIDTQEQLRNALESLKQHQETINTLKSKISEEVSRNLHMEENTGETKDEFQQKMVGIDKKQDLEAKNTQTLTADVKDNEIIEQQRKIFSLIQEKNELQQMLESVIAEKEQLKTDLKENIEMTIENQEELRLLGDELKKQQEIVAQEKNHAIKKEGELSRTCDRLAEVEEKLKEKSQQLQEKQQQLLNVQEEMSEMQKKINEIENLKNELKNKELTLEHMETERLELAQKLNENYEEVKSITKERKVLKELQKSFETERDHLRGYIREIEATGLQTKEELKIAHIHLKEHQETIDELRRSVSEKTAQIINTQDLEKSHTKLQEEIPVLHEEQELLPNVKEVSETQETMNELELLTEQSTTKDSTTLARIEMERLRLNEKFQESQEEIKSLTKERDNLKTIKEALEVKHDQLKEHIRETLAKIQESQSKQEQSLNMKEKDNETTKIVSEMEQFKPKDSALLRIEIEMLGLSKRLQESHDEMKSVAKEKDDLQRLQEVLQSESDQLKENIKEIVAKHLETEEELKVAHCCLKEQEETINELRVNLSEKETEISTIQKQLEAINDKLQNKIQEIYEKEEQFNIKQISEVQEKVNELKQFKEHRKAKDSALQSIESKMLELTNRLQESQEEIQIMIKEKEEMKRVQEALQIERDQLKENTKEIVAKMKESQEKEYQFLKMTAVNETQEKMCEIEHLKEQFETQKLNLENIETENIRLTQILHENLEEMRSVTKERDDLRSVEETLKVERDQLKENLRETITRDLEKQEELKIVHMHLKEHQETIDKLRGIVSEKTNEISNMQKDLEHSNDALKAQDLKIQEELRIAHMHLKEQQETIDKLRGIVSEKTDKLSNMQKDLENSNAKLQEKIQELKANEHQLITLKKDVNETQKKVSEMEQLKKQIKDQSLTLSKLEIENLNLAQKLHENLEEMKSVMKERDNLRRVEETLKLERDQLKESLQETKARDLEIQQELKTARMLSKEHKETVDKLREKISEKTIQISDIQKDLDKSKDELQKKIQELQKKELQLLRVKEDVNMSHKKINEMEQLKKQFEAQNLSMQSVRMDNFQLTKKLHESLEEIRIVAKERDELRRIKESLKMERDQFIATLREMIARDRQNHQVKPEKRLLSDGQQHLTESLREKCSRIKELLKRYSEMDDHYECLNRLSLDLEKEIEFHRIMKKLKYVLSYVTKIKEEQHESINKFEMDFIDEVEKQKELLIKIQHLQQDCDVPSRELRDLKLNQNMDLHIEEILKDFSESEFPSIKTEFQQVLSNRKEMTQFLEEWLNTRFDIEKLKNGIQKENDRICQVNNFFNNRIIAIMNESTEFEERSATISKEWEQDLKSLKEKNEKLFKNYQTLKTSLASGAQVNPTTQDNKNPHVTSRATQLTTE

SEQ ID NO: 121253 - DNA, 8106 bp, Artificial Sequence
  derived and/or modified sequence
atggctgaagagggggccgtcgctgtgtgtgttcgggtccgtccgttaaactcgagagaagaaagcctgggtgagactgcacaggtttattggaagaccgataacaatgttatatatcaggtagacggatcaaaaagctttaactttgacagagtgttccacggcaatgaaaccacaaaaaatgtgtacgaggagatcgcggctcccatcattgattccgcgatacaaggttacaacggaacaattttcgcctacggacagaccgcctccggaaaaacctataccatgatggggagtgaagaccatctaggcgtgatccctcgcgcaattcatgatatcttccagaagatcaagaagtttcctgacagggaattcttgcttcgcgtgtcctatatggaaatctataatgagacaattaccgacctcctgtgcgggacccagaagatgaaaccacttattattcgcgaggacgtgaatagaaatgtctatgtggccgatctgactgaggaagttgtgtacactagcgagatggcattaaagtggattactaagggcgagaaaagcaggcattacggggagacaaagatgaatcagcggtcgtcaaggagccatactatttttaggatgatactggagagcagggaaaaaggggaacctagtaactgtgaaggttcagtgaaggtgagccacctgaatctggtggacctagccggatccgagagagccgcccagacaggtgctgccggtgtgcgactgaaggagggctgcaatatcaaccgaagcctcttcatcctaggccaggtgatcaagaagctctctgatggccaggtggggggctttataaattacagggactccaaactgacgcggattttgcagaatagccttggtggtaatgctaaaacacgaatcatttgcacaatcactcccgtgagctttgatgagaccttaactgcccttcaattcgccagcaccgccaagtacatgaaaaacacaccctacgtgaacgaagttagtactgacgaagccctgctgaagcgctataggaaggagataatggatctaaaaaagcagctggaggaagtttcgttggagacccgcgcccaagctatggagaaggatcagctggcccagctgctggaagagaaagatttgcttcagaaggtgcagaatgagaagattgaaaatctcacccggatgctggtcacttcatcctccctaacactgcaacaggaacttaaagccaaacgtaagcgccgcgttacttggtgcttggggaagatcaacaaaatgaaaaattcgaactatgctgaccagtttaatatacctacaaatataaccacaaagacccataaacttagcattaatttactgagggagatcgacgagagcgtgtgctctgaatctgatgtgttcagcaacacattggacactttgtcagaaatcgaatggaacccagccaccaagctgctgaatcaggagaatatagaaagtgaattgaactcccttcgggctgattacgacaacctcgtcttggactacgaacagttgcgcactgaaaaagaagagatggagttaaagctcaaagagaaaaatgatcttgacgaattcgaagccctggaacgaaagacaaagaaagatcaggaaatgcagttgattcatgagatcagcaacctgaaaaacttagttaaacatgcggaagtctacaatcaggatctggaaaatgagctatccagtaaagtagagcttctcagggaaaaagaagaccagattaagaagctgcaagaatacatcgacagccaaaaactggagaacataaagatggaccttagttactctctagagtcgatcgaggaccccaagcagatgaaacagactctcttcgatgctgaaaccgttgcacttgacgctaagcgggagtccgcatttttgagatcagaaaatttggaacttaaggaaaagatgaaggaactcgcaacaacgtacaagcagatggaaaatgacatccaactttatcagtcccagttggaggccaagaaaaagatgcaagtggatttagaaaaagaactgcaatcagcctttaatgagataaccaaactcacaagtcttatcgatggaaaagtgcctaaagatctgctatgcaacttagagcttgaaggtaagattaccgacctccagaaggaactaaataaagaagtggaggaaaatgaggcactaagggaagaagtgatacttttgtctgagttgaagtctctgccttccgaggtcgaaagactgagaaaggaaatccaggacaagagcgaagagcttcatatcatcaccagcgagaaagataaactgttcagcgaggtcgtgcacaaggaatcaagggtacagggtctactggaggagattgggaagaccaaggatgatctggccaccactcagagcaattataaatcgactgaccaggaattccaaaatttcaaaaccctccacatggatttcgaacagaaatacaagatggtgttagaggaaaacgaacgaatgaaccaggaaatcgttaatctgtctaaggaggctcaaaagttcgacagctccctaggagctttgaaaacagagttgagctacaaaactcaggagctccaagagaaaacgcgcgaagttcaggaacggcttaatgaaatggaacaactgaaagaacagctagaaaatcgggattccaccctgcaaactgtggaaagggaaaagacccttattaccgagaagctccagcaaaccttggaagaggttaagacactgacgcaggagaaagatgacctgaagcagttacaggagtccctgcagatagaacgtgatcagctgaagagtgacatccacgatactgtgaatatgaacatcgatactcaggagcagcttagaaacgcactggagagtttgaaacagcatcaggagaccattaacacattaaaatctaaaatatcggaagaggtgtcccgtaacctgcacatggaagaaaacacaggcgaaaccaaagacgagtttcaacaaaagatggttggcattgataagaagcaggacctggaagctaaaaatactcagaccctaaccgccgacgtcaaggacaacgaaatcattgagcagcagaggaagatcttctcactcatccaagagaagaatgagttacagcagatgttggaatcagtaatcgcggagaaagagcaactgaaaacagatctgaaggaaaacattgaaatgacaatcgaaaaccaggaggagcttagattgctgggggatgagcttaaaaaacaacaagagatcgtggcacaggagaaaaatcacgctatcaagaaagagggtgaactgagccggacctgcgatcgcttggccgaagttgaggagaagctgaaggaaaagtcccagcaactacaggaaaagcaacaacagctgctgaacgttcaggaggagatgagcgaaatgcaaaaaaagatcaatgagattgaaaacctgaaaaacgagttgaagaataaagaactgactttagagcatatggaaaccgaacggcttgagctcgcacaaaaactgaatgaaaattatgaagaggtaaagagcattacaaaggaaagaaaggttctgaaagagttacaaaagtcattcgagacggaacgagatcatcttcggggatacatcagagaaatcgaggcaacgggcctgcagacaaaggaagagcttaaaattgcccacattcacctgaaagagcatcaggaaacaatcgatgagcttaggagatcagtaagtgagaagactgcgcagatcataaacacgcaggaccttgaaaaatcccacacgaagcttcaggaggagatccctgtactgcatgaagagcaggagctgttgcctaacgtaaaggaggtgtcagaaacacaggagactatgaacgaattggaactgcttactgagcagtccacgacaaaggactctactacactggcccgcatcgagatggaacggctgcgcctgaacgagaagtttcaagagtcgcaggaagagattaaatccctgaccaaagagagggacaatctcaaaacaataaaggaagctctggaggtgaagcacgaccagctgaaagaacacatccgtgaaacgctggctaaaattcaggagagccagtcaaaacaggaacagtcactaaatatgaaagagaaggataacgagaccacaaaaatcgtgtccgagatggagcagttcaagcccaaggacagcgccttattgcggatcgaaatcgagatgctgggtctctcgaaaagattacaggagagtcatgacgagatgaagtcagtcgccaaggagaaggatgacctgcagaggctccaggaggttctccagagcgagagcgatcagcttaaggaaaacattaaagagattgtggccaagcatcttgagacggaggaggagctcaaagtcgcccattgctgcctgaaagagcaggaggagactatcaacgaactccgagttaacctttctgaaaaagagaccgaaatctcaactatccaaaagcagttagaggctattaacgataaactgcagaataagatccaggagatatacgaaaaggaggaacaattcaacattaagcagattagcgaagtgcaggagaaggttaatgaattgaaacaattcaaagagcacaggaaagccaaagatagtgcactccaatccattgagtccaagatgctcgagcttacgaaccggttgcaggagtcccaggaggagattcaaatcatgatcaaggagaaggaggagatgaagcgcgtgcaagaggcccttcagatcgaaagggatcagctaaaagagaacacaaaggagattgtcgccaagatgaaagaatctcaggaaaaagagtaccagtttcttaaaatgacagctgtcaacgagactcaggagaagatgtgcgaaattgagcatcttaaggaacaatttgagacccagaaacttaatcttgagaacatcgagaccgaaaatattaggctgactcaaatcctacacgagaacctggaagagatgaggagcgtgacaaaggaacgagacgatctcagatctgtggaggagaccctgaaagtggagagggaccagctgaaagaaaacctgcgggagactatcacccgtgaccttgagaaacaggaagagctgaaaatcgtgcacatgcaccttaaggaacaccaagaaactattgacaaactccgcggcattgtatctgaaaagacgaacgagatctccaacatgcagaaagacctggagcactccaacgacgccttgaaagcccaagatctgaagattcaagaagaactccgaatcgcccatatgcatctcaaggagcaacaagagacgattgacaaactgaggggcattgttagcgagaaaactgataagctgagtaatatgcagaaagaccttgagaatagtaacgctaaactacaagaaaagatccaggaactgaaagctaacgagcatcagttgattacgctcaagaaggacgtaaatgaaacgcaaaaaaaagtgtcagaaatggagcaactgaagaagcagatcaaagaccaaagcctgaccctgtctaagctggagatcgagaacctcaaccttgcccagaagctgcacgaaaatctggaagagatgaagagtgtgatgaaggagcgcgacaatctccggcgggtcgaggagactctgaagctggagcgcgaccagctcaaggaatcgttacaagagaccaaggcacgggaccttgagatccagcaggagctgaagactgcccgcatgctgagcaaggaacacaaggagacagtggacaagctgcgagagaaaatcagcgagaaaaccatccagatctccgacatacagaaggatctggataaatccaaagacgagctccagaaaaagattcaggagctccagaaaaaggagctgcagctgctgcgagtgaaagaagacgttaacatgtcacataaaaaaatcaacgaaatggaacagctcaagaagcaattcgaggcgcagaacttatccatgcagagcgtacgaatggataactttcagctgaccaaaaagttacatgagtcactcgaggaaataaggatcgtggctaaggagcgagacgagctccgcaggatcaaggagtctctcaaaatggagcgagaccagttcatcgctactctgcgggagatgattgcacgtgacaggcaaaaccaccaggtgaaacccgagaagagattgctgagtgatggtcaacagcacctgacagagagcctacgtgaaaagtgcagccggatcaaggaacttctaaaacggtacagcgagatggatgaccattacgagtgcctgaaccgactcagccttgatctagagaaggagatcgagttccaaaaagagctaagtatgcgtgtcaaggccaacctttccctgccatacttgcaaacgaaacacatagagaagctgttcaccgcaaaccagcgatgcagtatggagttccacagaataatgaaaaaactgaaatacgttctgagttatgttacaaagatcaaagaggaacagcacgagtctataaataagttcgaaatggatttcatagacgaggttgaaaagcaaaaagagcttcttattaaaattcagcatcttcaacaggattgcgatgtcccttcgagggaactgagagatttgaagttgaatcagaacatggatcttcatattgaagaaattctgaaggatttttccgaatcagagttcccctcgattaagaccgagtttcaacaagtgctgagcaatcgtaaggagatgacacaatttctggaagaatggctgaacactcgatttgacatcgaaaaactgaaaaatggaattcaaaaggagaatgatcggatctgtcaggttaataacttctttaacaaccgcatcattgccattatgaacgaatccaccgaatttgaggagagaagcgccactatctccaaggagtgggaacaggatctaaaatcccttaaggaaaaaaacgaaaaattattcaagaattatcagacactcaaaacctctctggccagtggtgcccaagtcaacccaacaactcaggacaataagaatccacacgtgacttccagagcgacacagctcaccaccgagaagatccgagagctcgagaattcactccacgaggccaaagagtccgctatgcacaaggaaagcaaaattattaagatgcagaaagagctcgaagtcacaaacgacatcatcgcaaagctgcaagccaaggtacatgagtccaataagtgtctggaaaaaactaaggagactatccaggttctgcaagacaaggtcgcgctcggcgcgaaaccatacaaggaggagatagaagacctgaagatgaaactcgttaagatagacctggagaagatgaaaaacgctaaagaatttgagaaagaaatcagtgcgaccaaggctacggtggaatatcagaaggaggtcatccggctcctgcgagaaaacctccggcggagtcaacaagcacaggacacatctgtaataagcgaacacaccgatcctcaaccaagtaacaagccactcacctgcggcggagggtccggtatcgtgcagaacactaaggccttgatcttaaagagtgaacacatccgactcgagaaggaaattagtaagttaaaacagcagaatgagcagctgataaagcagaagaatgagctcttgtccaacaatcaacacctgagcaacgaagtcaagacttggaaagagcgcactctaaagcgggaagcgcacaaacaggttacctgcgaaaatagtccgaagtccccaaaggttaccggtacagctagtaaaaagaagcagatcacaccttcacagtgcaaagaaagaaacttgcaagatcccgtccctaaggagagtcctaagtcctgcttctttgatagtcggagtaaatccctgccctccccccaccccgtgcggtattttgataattcttcactcgggctttgccctgaggtccagaacgcgggcgctgaatcagtggacagccagcccggaccttggcatgctagctctggcaaggacgttccagagtgcaagactcagtag

SEQ ID NO: 121254 - DNA, 7038 bp, Artificial Sequence
  derived and/or modified sequence
atggctgaggaaggagccgtggcagtttgcgtcagagtgaggcccctgaatagccgcgaggagagtctgggcgagaccgcacaggtgtactggaaaactgataataatgtgatctatcaagtggacgggagcaaaagctttaatttcgatcgggtctttcatgggaatgagaccactaaaaacgtttacgaagaaatagctgcgcccattatcgactcagccatccagggttacaacggtaccattttcgcttacggccaaaccgcatctggcaagacctataccatgatgggtagcgaggatcacctgggcgtaatcccacgcgccatccacgacatatttcagaaaatcaagaagtttcctgacagggaattcctactgagagtttcctacatggagatatacaacgaaactattaccgacctgctatgcggcacacagaaaatgaaaccactaatcatccgggaggatgtcaatagaaacgtttacgtggccgaccttaccgaggaggttgtgtacacttctgagatggccctcaaatggataacgaagggcgagaagagccgccattacggcgaaaccaaaatgaatcaaagatcctcgagaagccacacaattttcagaatgattctcgaaagccgggaaaaaggtgagcccagcaactgtgagggcagcgtgaaagtctctcatctcaacctggtagacctggctggcagcgagcgcgccgcacaaacaggggctgccggagttagacttaaagagggctgcaatatcaaccggagcttattcattctcggccaggtcataaagaagctcagcgatgggcaagtgggcggattcatcaattaccgggatagcaagctgacgcgcatcctgcaaaactccttgggtggaaatgcaaaaacacgaatcatatgcacaatcacgccagtctcattcgatgaaacgctgaccgcgctccaatttgccagcaccgcaaagtacatgaagaatacgccctacgtgaatgaagtgtcaacagacgaggccctacttaaacgttacagaaaagaaatcatggatttaaaaaagcagttagaagaggtttctctggagacccgagcccaggctatggaaaaggatcagcttgcacagctgttagaagaaaaagacctgttgcagaaggtgcagaatgagaagattgaaaatctgactagaatgctcgttaccagcagttccctgaccctgcagcaggagctaaaagcaaaacgaaaacgacgggtgacgtggtgcctgggcaaaataaacaaaatgaagaactcaaactacgctgatcagtttaatattcccaccaacataacaaccaagacccacaagctgtccatcaatctcctgagagagatcgatgagtccgtgtgctccgagtccgatgtgtttagtaacactctcgacacactctctgaaatagagtggaaccctgccacgaaactgctgaaccaggaaaacatcgagagtgagttaaactctctgagggctgattacgacaatctagttcttgattacgagcaactgcggacggagaaggaagagatggagctcaagcttaaagagaaaaatgacttggacgagtttgaagctctggaacggaagacaaaaaaggaccaagagatgcagctgatacatgagatcagtaaccttaagaatctggtcaagcacgccgaggtttataatcaggatcttgagaacgaattgtcatcaaaagtggaactgctgagggaaaaagaagatcagattaaaaagctgcaggaatacattgattcccagaaactggaaaacattaaaatggatctgagttattctcttgagagtatcgaagacccaaagcagatgaagcagacactctttgacgccgaaacagttgctctggacgctaagagagagagcgccttcctgcggagtgagaatcttgagctgaaagagaagatgaaagagctggctaccacttacaagcagatggagaatgatatacagctgtaccaatcccagttggaggccaagaaaaaaatgcaggtggacctcgaaaaagagctccagtccgccttcaatgagattaccaaactcacttccctcatagatggcaaagtgcccaaggatctcctgtgtaatctggaactggagggcaagatcaccgatctgcagaaagaactgaacaaagaagtcgaggagaacgaagcacttcgggaggaagtgatcctcttatcagagcttaagtccctcccctccgaggtggagcggctcagaaaggagattcaggataagtctgaagaactgcatatcattacatctgaaaaagacaagcttttctcagaggtggtacacaaggagtctcgggttcagggactgctggaagaaattggaaagaccaaggatgatctggcgaccacacagtccaattataaatctactgaccaagaattccagaattttaagaccctccacatggacttcgagcagaaatataagatggttctggaagagaacgagcggatgaaccaggagatcgttaacctgtccaaagaagcacaaaagttcgattcctccctgggcgcccttaaaactgaactaagctacaaaactcaggaactgcaggagaagactcgagaggtccaagaacggctgaacgaaatggaacagctgaaagaacagctcgaaaatagagactccaccctgcagaccgttgagagagaaaaaactctcattactgaaaaattacagcagacattggaggaagttaaaacattgactcaggaaaaggacgatctgaaacaattacaggagagtctgcagattgagcgggaccaactcaagtctgatatacacgacactgtgaacatgaatattgacacccaggaacagctgaggaacgctctagagtccttgaagcagcatcaggagaccatcaacacattgaagagtaagatcagcgaggaggttagccggaacttgcacatggaggaaaacacaggcgaaacaaaagacgagttccagcagaaaatggtcggtattgacaagaagcaggatttagaggccaagaatacacaaactttaactgcagatgtcaaggacaatgagatcattgaacaacaaagaaaaatatttagcctgatacaggagaaaaacgaactacagcagatgctcgagtctgtgattgccgaaaaagaacaattgaagacagatttaaaggagaacatagaaatgaccatcgagaatcaggaggagctgcggctcctgggggacgagttgaagaaacaacaggagatagtcgctcaggaaaaaaaccatgccatcaaaaaagagggggaactgagtagaacgtgcgaccggctggccgaagtggaagagaaactaaaagaaaagtcacagcaattgcaggagaagcagcagcagcttttaaacgttcaggaggaaatgtctgagatgcagaagaagataaatgagatagagaaccttaagaatgaattaaaaaataaagagcttacactggagcacatggaaaccgaaaggcttgagcttgcccaaaaactgaatgaaaactatgaggaagtgaagagcattaccaaagagcggaaggtgctgaaagaactgcaaaagagcttcgaaacggaacgtgaccatctcaggggatacattcgggagatagaagccacaggacttcaaaccaaagaggaattgaaaattgcacatatacacctcaaggaacaccaggagactatagatgagctaaggcgaagcgtatctgagaaaacggcccagatcatcaatacacaggatctggagaaatcccataccaagctgcaggaggaaattcccgtgttgcatgaggagcaggaactgcttcctaatgtcaaagaggtttcagagacccaagagacaatgaacgaattggagctcctgacagagcaatccacgaccaaggattctacaactctagctcgcattgagatggagcggctgaggttaaacgaaaagttccaagagagccaggaggaaatcaaatctttaacaaaagagcgcgacaacctaaaaactattaaagaggccctcgaggtaaaacacgatcagctgaaagaacatatcagagaaaccttagcaaagatacaggagtcgcagagtaagcaggaacaatctctcaacatgaaagaaaaagataatgagactaccaagatagttagcgaaatggagcaatttaaacccaaagatagtgcgttactcaggattgagatagagatgctaggtctcagcaaacggttgcaggagtctcacgacgagatgaaatcggtggccaaggaaaaagacgatctgcaacgcttacaggaggtccttcaaagcgaatccgaccagttaaaagagaacatcaaggaaattgtcgctaagcacctggagaccgaggaggagctcaaggtggctcactgctgtctcaaagaacaggaggaaactattaatgaattgagggtcaatcttagtgaaaaggagacagaaattagtacaattcagaaacagttggaagcgatcaatgataagctccagaacaagattcaggagatctacgaaaaggaagagcaatttaacatcaagcagattagcgaagtgcaggaaaaggtgaatgaactgaaacagttcaaagagcatcgaaaggcaaaggatagcgccttgcagtcgatcgagagcaagatgctggaactaacgaaccgcttgcaggagtctcaagaggaaattcagattatgattaaagagaaagaggagatgaagcgcgttcaggaggctttacaaattgagagggatcagctaaaggaaaacacaaaagagatcgtcgccaagatgaaggaatctcaagaaaaagagtatcaatttttaaagatgacggccgtgaacgaaacccaggagaaaatgtgcgagattgaacatctgaaagagcagttcgaaacacagaagctgaacctcgagaacatagagactgagaacattaggctcacacagattctgcacgagaatctcgaggagatgcgatccgtaacgaaggaacgagacgaccttagatccgtcgaggagaccctcaaagtagaaagggaccagttaaaagagaatctacgagagacaataactcgggacttagagaaacaggaagagctgaaaatcgtccacatgcacctaaaggagcatcaggagacaatcgataagttaaggggtatcgtttcagaaaagacaaatgagattagcaacatgcagaaggatctagaacactctaatgatgccctgaaagcgcaggatctgaaaatacaagaggaactgaggatcgcccacatgcatctcaaggagcagcaggagaccatagacaaactccggggaatcgtctccgagaaaaccgataaactgtctaacatgcagaaagacttggagaatagtaatgccaagttgcaggaaaaaatacaggaattgaaggcaaacgagcatcagttgatcactctgaagaaagacgtgaacgaaactcagaagaaagtgtccgagatggagcagttgaaaaagcaaataaaggatcagagcctgaccctgagcaaacttgaaattgaaaacctcaatctagcgcagaagctccacgaaaatctggaagagatgaagagcgtaatgaaagagagggataatttacgcagagtggaggaaacactgaagcttgaacgcgatcaactcaaagaatccctacaggagacaaaggccagggatttagaaatacagcaagaactcaagaccgctagaatgctcagtaaagagcacaaggagaccgtggacaaattgagagagaagatcagtgagaagacaattcagatcagcgatatccagaaggacctggataagagcaaagatgagctgcaaaagaaaatccaagagctccaaaaaaaagagttgcaattgttaagggtcaaggaagacgtgaacatgtcccacaagaaaattaacgaaatggagcagctgaagaagcagttcgaagcacaaaatcttagcatgcagagcgtgcgaatggataattttcagcttactaaaaagctccacgagtcactcgaggaaatcagaatcgtggcaaaggagagagacgaattgcgccggatcaaagaaagcctgaagatggagagggaccagtttattgcgactctccgagagatgatcgcacgggatagacagaatcaccaggtcaaaccggagaaacgcttgcttagcgacggtcaacagcatctgacagagtccctgcgggagaaatgtagtcgcattaaggaattattgaaacggtactccgaaatggatgatcactacgaatgcctgaaccggctgagcctggatctagagaaggaaatagagtttcacaggatcatgaaaaaactgaagtatgtgctttcctacgtaacaaagatcaaggaggaacagcacgagagcattaacaaatttgagatggacttcatagacgaggtcgagaaacaaaaggagctcttgatcaaaattcagcacctgcagcaggactgtgacgtgccttcaagagagcttcgggacctgaagctgaatcagaacatggatttacatatagaagaaatactgaaggacttcagtgagagcgaattccctagcatcaagacagagttccagcaagtgctgtctaaccgcaaggagatgacccagttcctggaagaatggctcaatacgagatttgatatagaaaaattaaaaaacgggattcagaaagagaacgatcgaatctgccaagttaacaacttttttaacaaccgtatcattgccattatgaatgagtctacagaatttgaggagcgctccgcaacgatcagcaaggagtgggagcaggaccttaagtccctgaaggaaaagaacgaaaaactgtttaagaactatcagacattgaagacctccctcgccagtggggctcaggtgaaccctaccacacaggataacaagaaccctcacgtgacatcgagagctacccaattaactacagagtag

SEQ ID NO: 121255 - DNA, 8106 bp, Artificial Sequence
  derived and/or modified sequence
atggccgaggagggcgctgtggccgtgtgtgtgcgggtgcggcccctgaacagccgggaggagagcctgggggagacagcccaggtgtactggaagacagacaacaacgtcatctaccaggtggatggcagcaagagcttcaactttgacagagtcttccacggcaatgagaccaccaagaatgtgtatgaggagattgctgcccccatcattgattctgccatccagggctacaacggcaccatctttgcctacggccagacagccagcggcaagacctacaccatgatgggcagcgaggaccacctgggcgtcatcccccgggccatccatgacatcttccagaagatcaagaagttcccagaccgggagttcctgctgcgggtgtcctacatggagatctacaatgagaccatcacagacctgctgtgtggcacccagaagatgaagcccctcatcatccgggaggatgtgaacagaaatgtgtatgtggccgacctgacagaggaggtggtgtacaccagcgagatggccctgaagtggatcaccaagggggagaagagccgccactatggagagaccaagatgaaccagaggagcagccgcagccacaccatcttcaggatgatcctggagagccgggagaagggggagcccagcaactgtgagggctctgtgaaggtgagccacctgaacctggtggacctggccggcagcgagcgggccgcccagacaggagctgctggggtgcggctgaaggagggctgcaacatcaacagaagcctcttcatcctgggccaggtgatcaagaagctgagtgatggccaggtgggcggcttcatcaactacagagacagcaagctgacccgcatcctgcagaacagcctgggcggcaatgccaagacccgcatcatctgcaccatcacccctgtgtcctttgatgagaccctgacagccctgcagtttgccagcacagccaagtacatgaagaacaccccctacgtgaatgaggtgtccacagatgaggccctgctgaagcgctacaggaaggagatcatggacctgaagaagcagctggaggaggtgtccctggagacccgggcccaggccatggagaaggaccagctggcccagctgctggaggagaaggacctgctgcagaaggtgcagaatgagaagattgagaacctgaccaggatgctggtgaccagcagcagcctgaccctgcagcaggagctgaaggccaagaggaagagaagagtgacctggtgcctgggcaagatcaacaagatgaagaacagcaactatgctgaccagttcaacatccccaccaacatcaccaccaagacccacaagctgagcatcaacctgctgcgggagattgatgagagcgtgtgcagcgagagtgatgtgttcagcaacaccctggacaccctgtctgaaattgagtggaacccagccaccaagctgctgaaccaggagaacatcgagagcgagctgaacagcctgcgggctgactatgacaacctggtgctggactatgagcagctgaggacagagaaggaggagatggagctgaagctgaaggagaagaatgacctggatgaatttgaggccctggagaggaagaccaagaaggaccaggagatgcagctgatccacgagatcagcaacctgaagaacctggtgaagcacgccgaggtgtacaaccaggacctggagaatgagctgagcagcaaggtggagctgctgcgggagaaggaggaccagatcaagaagctgcaggagtacatcgacagccagaagctggagaacatcaagatggacctgagctacagcctggagagcattgaggaccccaagcagatgaagcagaccctgtttgatgctgagaccgtggccctggatgccaagcgggagagcgccttcctgcggtctgagaacctggagctgaaggagaagatgaaggagctggccaccacctacaagcagatggagaatgacatccagctgtaccagagccagctggaggccaagaagaagatgcaggtggacctggagaaggagctgcagagcgccttcaatgagatcaccaagctgaccagcctgattgatggcaaggtgcccaaggacctgctgtgcaacctggagctggagggcaagatcacagacctgcagaaggagctgaacaaggaggtggaggagaatgaggccctgcgggaggaggtgatcctgctgtctgagctgaagagcctgcccagcgaggtggagcggctgaggaaggagatccaggacaagtctgaggagctgcacatcatcaccagcgagaaggacaagctgttcagcgaggtggtgcacaaggagagccgggtgcagggcctgctggaggagatcggcaagaccaaggatgacctggccaccacccagagcaactacaagagcacagaccaggagttccagaacttcaagaccctgcacatggactttgagcagaagtacaagatggtgctggaggagaatgaaagaatgaaccaggagatcgtgaacctgagcaaggaggcccagaagtttgacagcagcctgggcgccctgaagacagagctgagctacaagacccaggagctgcaggagaagacccgggaggtgcaggagcggctgaatgagatggagcagctgaaggagcagctggagaacagagacagcaccctgcagacagtggagcgggagaagaccctcatcacagagaagctgcagcagaccctggaggaggtgaagaccctgacccaggagaaggatgacctgaagcagctgcaggagagcctgcagatcgagcgggaccagctgaagagtgacatccatgacacagtgaacatgaacatcgacacccaggagcagctgagaaatgccctggagagcctgaagcagcaccaggagaccatcaacaccctgaagagcaagatcagcgaggaggtgtccaggaacctgcacatggaggagaacacaggagagaccaaggatgagttccagcagaagatggtgggcatcgacaagaagcaggacctggaggccaagaacacccagaccctgacagcagatgtgaaggacaatgagatcatcgagcagcagaggaagatcttcagcctcatccaggagaagaatgagctgcagcagatgctggagagcgtgattgctgagaaggagcagctgaagacagacctgaaggaaaatattgagatgaccatcgagaaccaggaggagctgcggctgctgggagatgagctgaagaagcagcaggagatcgtggcccaggagaagaaccacgccatcaagaaggagggggagctgagcaggacctgtgaccggctggccgaggtggaggagaagctgaaggagaagagccagcagctgcaggagaagcagcagcagctgctgaatgtgcaggaggagatgtctgagatgcagaagaagatcaatgaaattgagaacctgaagaatgagctgaagaacaaggagctgaccctggagcacatggagacagagcggctggagctggcccagaagctgaatgaaaattatgaggaggtgaagagcatcaccaaggagaggaaggtgctgaaggagctgcagaagagctttgaaacagagcgggaccacctgcggggctacatccgggagattgaggccaccggcctgcagaccaaggaggagctgaagatcgcccacatccacctgaaggagcaccaggagaccattgatgagctgcggcgctctgtgtctgagaagacagcccagatcatcaacacccaggacctggagaagagccacaccaagctgcaggaggagatccctgtgctgcacgaggagcaggagctgctgcccaacgtgaaggaggtgtctgagacccaggagaccatgaatgagctggagctgctgacagagcagagcaccaccaaggacagcaccaccctggcccgcatcgagatggagcggctgcggctgaatgagaagttccaggagagccaggaggagatcaagagcctgaccaaggagcgggacaacctgaagaccatcaaggaggccctggaggtgaagcatgaccagctgaaggagcacatccgggagaccctggccaagatccaggagagccagagcaagcaggagcagagcctgaacatgaaggagaaggacaatgagaccaccaagatcgtgtctgagatggagcagttcaagcccaaggacagcgccctgctgagaattgaaattgagatgctgggcctgagcaagaggctgcaggagagccatgatgagatgaagtctgtggccaaggagaaggatgacctgcagaggctgcaggaggtgctgcagagcgagagtgaccagctgaaggagaacatcaaggagatcgtggccaagcacctggagacagaggaggagctgaaggtggcccactgctgcctgaaggagcaggaggagaccatcaatgagctgcgggtgaacctgtctgagaaggagacagagatcagcaccatccagaagcagctggaggccatcaatgacaagctgcagaacaagatccaggagatctatgagaaggaggagcagttcaacatcaagcagatcagcgaggtgcaggagaaggtgaatgagctgaagcagttcaaggagcacaggaaggccaaggacagcgccctgcagagcattgagagcaagatgctggagctgaccaaccggctgcaggagagccaggaggagatccagatcatgatcaaggagaaggaggagatgaagagggtgcaggaggccctgcagatcgagcgggaccagctgaaggagaacaccaaggagatcgtggccaagatgaaggagagccaggagaaggagtaccagttcctgaagatgacagctgtgaatgagacccaggagaagatgtgtgaaattgagcacctgaaggagcagtttgagacccagaagctgaacctggagaacattgaaacagagaacatccggctgacccagatcctgcacgagaacctggaggagatgaggtctgtgaccaaggagagagatgacctgcggtctgtggaggagaccctgaaggtggagcgggaccagctgaaggagaacctgcgggagaccatcacccgggacctggagaagcaggaggagctgaagatcgtgcacatgcacctgaaggagcaccaggagaccatcgacaagctgcggggcatcgtgtctgagaagaccaatgagatcagcaacatgcagaaggacctggagcacagcaatgatgccctgaaggcccaggacctgaagatccaggaggagctgcgcatcgcccacatgcacctgaaggagcagcaggagaccatcgacaagctgcggggcatcgtgtctgagaagacagacaagctgagcaacatgcagaaggacctggagaacagcaatgccaagctgcaggagaagatccaggagctgaaggccaatgagcaccagctgatcaccctgaagaaggatgtgaatgagacccagaagaaggtgtctgagatggagcagctgaagaagcagatcaaggaccagagcctgaccctgagcaagctggagattgagaacctgaacctggcccagaagctgcacgagaacctggaggagatgaagtctgtgatgaaggagcgggacaacctgcggcgggtggaggagaccctgaagctggagcgggaccagctgaaggagagcctgcaggagaccaaggcccgggacctggagatccagcaggagctgaagacagccaggatgctgagcaaggagcacaaggagaccgtggacaagctgcgggagaagatcagcgagaagaccatccagatcagtgacatccagaaggacctggacaagagcaaggatgagctgcagaagaagatccaggagctgcagaagaaggagctgcagctgctgcgggtgaaggaggatgtgaacatgagccacaagaagatcaatgagatggagcagctgaagaagcagtttgaggcccagaacctgtccatgcagagcgtgaggatggacaacttccagctgaccaagaagctgcacgagagcctggaggagatccgcatcgtggccaaggagagagatgagctgcggcgcatcaaggagagcctgaagatggagcgggaccagttcatcgccaccctgcgggagatgattgcccgggaccggcagaaccaccaggtgaagccagagaagaggctgctgagtgatggccagcagcacctgacagagagcctgcgggagaagtgcagccgcatcaaggagctgctgaagcgctacagcgagatggatgaccactatgaatgtctgaaccggctgagcctggacctggagaaggagattgagttccagaaggagctgtccatgagggtgaaggccaacctgagcctgccctacctgcagaccaagcacatcgagaagctgttcaccgccaaccagcgctgcagcatggagttccaccgcatcatgaagaagctgaagtatgtgctgtcctatgtgaccaagatcaaggaggagcagcacgagagcatcaacaagtttgagatggacttcattgatgaggtggagaagcagaaggagctgctgatcaagatccagcacctgcagcaggactgtgatgtgcccagccgggagctgcgggacctgaagctgaaccagaacatggacctgcacatcgaggagatcctgaaggacttcagcgagagcgagttccccagcatcaagacagagttccagcaggtgctgagcaacaggaaggagatgacccagttcctggaggagtggctgaacaccaggtttgacatcgagaagctgaagaatggcatccagaaggaaaatgaccgcatctgccaggtgaacaacttcttcaacaaccgcatcatcgccatcatgaatgaaagcacagaatttgaggagaggtctgccaccatcagcaaggagtgggagcaggacctgaagagcctgaaggagaagaatgagaagctgttcaagaactaccagaccctgaagaccagcctggccagcggggcccaggtgaaccccaccacccaggacaacaagaacccccacgtgaccagccgggccacccagctgaccacagagaagatccgggagctggagaacagcctgcacgaggccaaggagagcgccatgcacaaggagagcaagatcatcaagatgcagaaggagctggaggtgaccaatgacatcatcgccaagctgcaggccaaggtgcatgagagcaacaagtgcctggagaagaccaaggagaccatccaggtgctgcaggacaaggtggccctgggcgccaagccctacaaggaggagattgaggacctgaagatgaagctggtgaagattgacctggagaagatgaagaatgccaaggagtttgagaaggagatcagcgccaccaaggccaccgtggagtaccagaaggaggtgatccggctgctgcgggagaacctgcggcgcagccagcaggcccaggacaccagcgtcatcagcgagcacacagacccccagcccagcaacaagcccctgacctgtggcggcggcagcggcatcgtgcagaacaccaaggccctgatcctgaagtctgagcacatccggctggagaaggagatcagcaagctgaagcagcagaatgagcagctgatcaagcagaagaatgagctgctgagcaacaaccagcacctgagcaatgaggtgaagacctggaaggagaggaccctgaagcgggaggcccacaagcaggtgacctgtgagaacagccccaagagccccaaggtgactggaacagccagcaagaagaagcagatcacccccagccagtgcaaggagaggaacctgcaggaccctgtgcccaaggagagccccaagagctgcttctttgacagccgcagcaagagcctgcccagcccccaccctgtgcgctactttgacaacagcagcctgggcctgtgcccagaggtgcagaatgctggagctgagagcgtggacagccagcccggcccctggcacgccagcagcggcaaggatgtgcctgagtgcaagacccagtag

SEQ ID NO: 121256 - DNA, 7038 bp, Artificial Sequence
  derived and/or modified sequence
atggccgaggagggcgctgtggccgtgtgtgtgcgggtgcggcccctgaacagccgggaggagagcctgggggagacagcccaggtgtactggaagacagacaacaacgtcatctaccaggtggatggcagcaagagcttcaactttgacagagtcttccacggcaatgagaccaccaagaatgtgtatgaggagattgctgcccccatcattgattctgccatccagggctacaacggcaccatctttgcctacggccagacagccagcggcaagacctacaccatgatgggcagcgaggaccacctgggcgtcatcccccgggccatccatgacatcttccagaagatcaagaagttcccagaccgggagttcctgctgcgggtgtcctacatggagatctacaatgagaccatcacagacctgctgtgtggcacccagaagatgaagcccctcatcatccgggaggatgtgaacagaaatgtgtatgtggccgacctgacagaggaggtggtgtacaccagcgagatggccctgaagtggatcaccaagggggagaagagccgccactatggagagaccaagatgaaccagaggagcagccgcagccacaccatcttcaggatgatcctggagagccgggagaagggggagcccagcaactgtgagggctctgtgaaggtgagccacctgaacctggtggacctggccggcagcgagcgggccgcccagacaggagctgctggggtgcggctgaaggagggctgcaacatcaacagaagcctcttcatcctgggccaggtgatcaagaagctgagtgatggccaggtgggcggcttcatcaactacagagacagcaagctgacccgcatcctgcagaacagcctgggcggcaatgccaagacccgcatcatctgcaccatcacccctgtgtcctttgatgagaccctgacagccctgcagtttgccagcacagccaagtacatgaagaacaccccctacgtgaatgaggtgtccacagatgaggccctgctgaagcgctacaggaaggagatcatggacctgaagaagcagctggaggaggtgtccctggagacccgggcccaggccatggagaaggaccagctggcccagctgctggaggagaaggacctgctgcagaaggtgcagaatgagaagattgagaacctgaccaggatgctggtgaccagcagcagcctgaccctgcagcaggagctgaaggccaagaggaagagaagagtgacctggtgcctgggcaagatcaacaagatgaagaacagcaactatgctgaccagttcaacatccccaccaacatcaccaccaagacccacaagctgagcatcaacctgctgcgggagattgatgagagcgtgtgcagcgagagtgatgtgttcagcaacaccctggacaccctgtctgaaattgagtggaacccagccaccaagctgctgaaccaggagaacatcgagagcgagctgaacagcctgcgggctgactatgacaacctggtgctggactatgagcagctgaggacagagaaggaggagatggagctgaagctgaaggagaagaatgacctggatgaatttgaggccctggagaggaagaccaagaaggaccaggagatgcagctgatccacgagatcagcaacctgaagaacctggtgaagcacgccgaggtgtacaaccaggacctggagaatgagctgagcagcaaggtggagctgctgcgggagaaggaggaccagatcaagaagctgcaggagtacatcgacagccagaagctggagaacatcaagatggacctgagctacagcctggagagcattgaggaccccaagcagatgaagcagaccctgtttgatgctgagaccgtggccctggatgccaagcgggagagcgccttcctgcggtctgagaacctggagctgaaggagaagatgaaggagctggccaccacctacaagcagatggagaatgacatccagctgtaccagagccagctggaggccaagaagaagatgcaggtggacctggagaaggagctgcagagcgccttcaatgagatcaccaagctgaccagcctgattgatggcaaggtgcccaaggacctgctgtgcaacctggagctggagggcaagatcacagacctgcagaaggagctgaacaaggaggtggaggagaatgaggccctgcgggaggaggtgatcctgctgtctgagctgaagagcctgcccagcgaggtggagcggctgaggaaggagatccaggacaagtctgaggagctgcacatcatcaccagcgagaaggacaagctgttcagcgaggtggtgcacaaggagagccgggtgcagggcctgctggaggagatcggcaagaccaaggatgacctggccaccacccagagcaactacaagagcacagaccaggagttccagaacttcaagaccctgcacatggactttgagcagaagtacaagatggtgctggaggagaatgaaagaatgaaccaggagatcgtgaacctgagcaaggaggcccagaagtttgacagcagcctgggcgccctgaagacagagctgagctacaagacccaggagctgcaggagaagacccgggaggtgcaggagcggctgaatgagatggagcagctgaaggagcagctggagaacagagacagcaccctgcagacagtggagcgggagaagaccctcatcacagagaagctgcagcagaccctggaggaggtgaagaccctgacccaggagaaggatgacctgaagcagctgcaggagagcctgcagatcgagcgggaccagctgaagagtgacatccatgacacagtgaacatgaacatcgacacccaggagcagctgagaaatgccctggagagcctgaagcagcaccaggagaccatcaacaccctgaagagcaagatcagcgaggaggtgtccaggaacctgcacatggaggagaacacaggagagaccaaggatgagttccagcagaagatggtgggcatcgacaagaagcaggacctggaggccaagaacacccagaccctgacagcagatgtgaaggacaatgagatcatcgagcagcagaggaagatcttcagcctcatccaggagaagaatgagctgcagcagatgctggagagcgtgattgctgagaaggagcagctgaagacagacctgaaggaaaatattgagatgaccatcgagaaccaggaggagctgcggctgctgggagatgagctgaagaagcagcaggagatcgtggcccaggagaagaaccacgccatcaagaaggagggggagctgagcaggacctgtgaccggctggccgaggtggaggagaagctgaaggagaagagccagcagctgcaggagaagcagcagcagctgctgaatgtgcaggaggagatgtctgagatgcagaagaagatcaatgaaattgagaacctgaagaatgagctgaagaacaaggagctgaccctggagcacatggagacagagcggctggagctggcccagaagctgaatgaaaattatgaggaggtgaagagcatcaccaaggagaggaaggtgctgaaggagctgcagaagagctttgaaacagagcgggaccacctgcggggctacatccgggagattgaggccaccggcctgcagaccaaggaggagctgaagatcgcccacatccacctgaaggagcaccaggagaccattgatgagctgcggcgctctgtgtctgagaagacagcccagatcatcaacacccaggacctggagaagagccacaccaagctgcaggaggagatccctgtgctgcacgaggagcaggagctgctgcccaacgtgaaggaggtgtctgagacccaggagaccatgaatgagctggagctgctgacagagcagagcaccaccaaggacagcaccaccctggcccgcatcgagatggagcggctgcggctgaatgagaagttccaggagagccaggaggagatcaagagcctgaccaaggagcgggacaacctgaagaccatcaaggaggccctggaggtgaagcatgaccagctgaaggagcacatccgggagaccctggccaagatccaggagagccagagcaagcaggagcagagcctgaacatgaaggagaaggacaatgagaccaccaagatcgtgtctgagatggagcagttcaagcccaaggacagcgccctgctgagaattgaaattgagatgctgggcctgagcaagaggctgcaggagagccatgatgagatgaagtctgtggccaaggagaaggatgacctgcagaggctgcaggaggtgctgcagagcgagagtgaccagctgaaggagaacatcaaggagatcgtggccaagcacctggagacagaggaggagctgaaggtggcccactgctgcctgaaggagcaggaggagaccatcaatgagctgcgggtgaacctgtctgagaaggagacagagatcagcaccatccagaagcagctggaggccatcaatgacaagctgcagaacaagatccaggagatctatgagaaggaggagcagttcaacatcaagcagatcagcgaggtgcaggagaaggtgaatgagctgaagcagttcaaggagcacaggaaggccaaggacagcgccctgcagagcattgagagcaagatgctggagctgaccaaccggctgcaggagagccaggaggagatccagatcatgatcaaggagaaggaggagatgaagagggtgcaggaggccctgcagatcgagcgggaccagctgaaggagaacaccaaggagatcgtggccaagatgaaggagagccaggagaaggagtaccagttcctgaagatgacagctgtgaatgagacccaggagaagatgtgtgaaattgagcacctgaaggagcagtttgagacccagaagctgaacctggagaacattgaaacagagaacatccggctgacccagatcctgcacgagaacctggaggagatgaggtctgtgaccaaggagagagatgacctgcggtctgtggaggagaccctgaaggtggagcgggaccagctgaaggagaacctgcgggagaccatcacccgggacctggagaagcaggaggagctgaagatcgtgcacatgcacctgaaggagcaccaggagaccatcgacaagctgcggggcatcgtgtctgagaagaccaatgagatcagcaacatgcagaaggacctggagcacagcaatgatgccctgaaggcccaggacctgaagatccaggaggagctgcgcatcgcccacatgcacctgaaggagcagcaggagaccatcgacaagctgcggggcatcgtgtctgagaagacagacaagctgagcaacatgcagaaggacctggagaacagcaatgccaagctgcaggagaagatccaggagctgaaggccaatgagcaccagctgatcaccctgaagaaggatgtgaatgagacccagaagaaggtgtctgagatggagcagctgaagaagcagatcaaggaccagagcctgaccctgagcaagctggagattgagaacctgaacctggcccagaagctgcacgagaacctggaggagatgaagtctgtgatgaaggagcgggacaacctgcggcgggtggaggagaccctgaagctggagcgggaccagctgaaggagagcctgcaggagaccaaggcccgggacctggagatccagcaggagctgaagacagccaggatgctgagcaaggagcacaaggagaccgtggacaagctgcgggagaagatcagcgagaagaccatccagatcagtgacatccagaaggacctggacaagagcaaggatgagctgcagaagaagatccaggagctgcagaagaaggagctgcagctgctgcgggtgaaggaggatgtgaacatgagccacaagaagatcaatgagatggagcagctgaagaagcagtttgaggcccagaacctgtccatgcagagcgtgaggatggacaacttccagctgaccaagaagctgcacgagagcctggaggagatccgcatcgtggccaaggagagagatgagctgcggcgcatcaaggagagcctgaagatggagcgggaccagttcatcgccaccctgcgggagatgattgcccgggaccggcagaaccaccaggtgaagccagagaagaggctgctgagtgatggccagcagcacctgacagagagcctgcgggagaagtgcagccgcatcaaggagctgctgaagcgctacagcgagatggatgaccactatgaatgtctgaaccggctgagcctggacctggagaaggagattgagttccaccgcatcatgaagaagctgaagtatgtgctgtcctatgtgaccaagatcaaggaggagcagcacgagagcatcaacaagtttgagatggacttcattgatgaggtggagaagcagaaggagctgctgatcaagatccagcacctgcagcaggactgtgatgtgcccagccgggagctgcgggacctgaagctgaaccagaacatggacctgcacatcgaggagatcctgaaggacttcagcgagagcgagttccccagcatcaagacagagttccagcaggtgctgagcaacaggaaggagatgacccagttcctggaggagtggctgaacaccaggtttgacatcgagaagctgaagaatggcatccagaaggaaaatgaccgcatctgccaggtgaacaacttcttcaacaaccgcatcatcgccatcatgaatgaaagcacagaatttgaggagaggtctgccaccatcagcaaggagtgggagcaggacctgaagagcctgaaggagaagaatgagaagctgttcaagaactaccagaccctgaagaccagcctggccagcggggcccaggtgaaccccaccacccaggacaacaagaacccccacgtgaccagccgggccacccagctgaccacagaatag

SEQ ID NO: 121257 - DNA, 8106 bp, Artificial Sequence
  derived and/or modified sequence
atggccgaggagggcgccgtggccgtgtgcgtgcgggtgcggcccttaaatagccgagaggagtccctgggagagacggctcaagtgtattggaagacggataacaatgtgatctatcaggtagatggtagcaaaagttttaatttcgatagggtcttccacgggaatgagacaacgaaaaacgtttacgaagagattgccgctccaatcatcgatagcgcaattcagggatataatggcacaatatttgcctatggccagaccgcttctggtaaaacttatacgatgatgggatctgaagatcatctgggcgtcatccctcgcgccatccatgatatcttccagaaaattaagaagtttccggacagggagttcctcctacgagtctcttatatggagatttacaacgagaccattaccgacttactctgtggaactcaaaaaatgaaaccgctgattatcagagaggacgtgaaccgcaacgtgtacgtggccgacctgactgaagaagtggtgtatacaagtgaaatggctctaaagtggatcacaaagggggaaaaaagccggcactacggcgagacaaagatgaaccagcgctcttctaggtcccatactattttccgaatgattctcgagtctagagagaagggtgaaccctctaattgcgaggggtcagtgaaagtgagccatcttaatttggtggatctggccggcagcgagagagcggcacagaccggagctgctggggtacggctaaaagaaggctgcaatatcaaccgttccctgttcatcctgggccaggtgataaaaaagcttagcgatggacaggtgggaggtttcattaactatcgtgatagcaagctgactcgcattctacagaatagcttgggagggaacgccaagactcgcatcatttgtacaataacacccgtaagcttcgacgaaacactgacggccttgcaatttgcttccaccgctaagtatatgaaaaatacgccctacgtgaatgaggtctccacagacgaggcactgttgaaaaggtatcgaaaggagatcatggacctgaagaagcagctcgaggaagtctcgctggaaacacgcgcgcaggcgatggagaaggaccagttggctcagctgctggaggagaaagatctgcttcaaaaagtccagaacgaaaagatagagaatttgacccggatgctcgttacatcaagcagcctaaccttgcagcaggaactcaaggctaagaggaaaagaagagtcacttggtgtcttgggaaaatcaataaaatgaagaatagtaactatgctgatcaatttaacatccccacaaatatcaccacaaaaacacacaaactttccattaatctgttgcgggaaatcgacgaaagcgtgtgtagcgagagcgacgtcttcagcaacaccctggacacgctctccgaaatcgagtggaacccagccaccaagttgctaaaccaggaaaacattgaaagcgaactaaactctcttagggcagactatgacaacctcgtgttagattatgaacagctccgtactgagaaagaagagatggagctgaagctcaaggaaaagaatgacctcgatgaatttgaggcattagagcgcaagactaagaaagaccaggagatgcagctcattcacgagatctccaacttaaagaatctggtgaagcacgccgaggtgtacaatcaggacttagaaaacgaactctcatccaaggtcgaattgctgcgagaaaaggaggatcagataaagaaactgcaggagtacattgactcccagaagctggaaaatatcaagatggacttatcttactcattagaaagcatcgaggacccgaagcagatgaaacagactctctttgatgctgagaccgtagcgctcgatgcaaagcgcgaatccgccttcctgagaagtgagaacctggaactgaaagagaagatgaaagagctggccacaacttacaaacagatggagaatgacatacaattgtaccaatctcagcttgaagctaaaaagaaaatgcaggtggaccttgaaaaggaactgcagagcgctttcaatgaaatcaccaagctgactagcctcatcgacggtaaagttcctaaggatctcctttgcaatctggagcttgagggaaagatcacagatttgcagaaggaactaaacaaggaggtggaggagaacgaagctctgagagaggaggtcatattactcagcgaactcaagtcactcccctcagaagtcgagcgcctgcgcaaagaaatccaggacaagtctgaggaactgcacattatcacttccgagaaagataagttattctccgaggttgtccacaaggaaagcagggtgcaaggactgctcgaggagattggcaagactaaagacgacctggctacgactcaaagtaactataagagtacagatcaggaatttcagaattttaagacattgcatatggatttcgagcagaagtataaaatggtgttggaggaaaacgaacgaatgaaccaagagatcgttaatctgtcgaaggaagcccagaagtttgacagtagcctgggagccctgaagaccgagctgagttacaaaacacaggagctgcaagaaaagacacgggaagtgcaggagagactgaacgagatggagcagctcaaagagcaactcgaaaaccgcgattctacactgcagactgttgagcgcgagaagacgctcatcaccgaaaaactccagcagacgcttgaagaagttaaaaccctcacccaagagaaggatgacctgaagcagctccaggagtctcttcagattgagcgcgatcagctcaagtcagacattcacgatactgtcaacatgaacatagatacacaagagcagctacgcaacgcactagaatcactcaaacagcatcaagagacaattaacacgctgaaatccaagatctccgaagaggttagccgcaatcttcacatggaagaaaatactggtgagacaaaggatgagttccagcagaagatggtgggcatcgacaagaaacaagacctcgaagctaagaacactcagacattaactgcagatgttaaggacaatgagatcattgagcagcagaggaagattttttccctcatccaggaaaaaaatgaactgcagcagatgctagaaagcgttatagcagaaaaagagcagttaaagactgatctgaaggagaatatagagatgaccattgagaaccaggaggagttacggctcctgggagatgaactgaagaagcagcaggagattgtggctcaggaaaaaaaccatgcaattaaaaaagagggcgagttgtcaaggacctgtgacagactggcagaagtcgaggagaaactgaaagagaagtctcagcagctgcaggagaaacagcaacaactactcaacgtacaggaggaaatgagcgagatgcaaaaaaaaataaacgaaatcgaaaaccttaaaaatgaacttaagaataaagagctgacgttggagcatatggagacagaacggctggagttggcccagaagctaaacgagaattacgaggaagtcaagtcgatcacgaaggagcggaaagtgctcaaggagctacagaaatccttcgagactgagagagatcacctgaggggatacatccgcgagattgaagcaaccggcctgcagaccaaggaggagctcaagatcgcccacattcatctcaaggagcatcaagagacgattgacgaacttcgcaggtctgtgtctgaaaagaccgcgcagatcatcaacacacaggatctggagaaatcgcacacaaaattgcaagaagaaatcccagttctgcatgaggagcaggagctgctgccaaatgtaaaggaagtcagcgaaacccaggaaaccatgaatgagcttgaactactcaccgaacaaagtactaccaaggacagcacaactctagcaaggatcgagatggagcgcctgcggctcaacgaaaagtttcaggagtcccaggaagagattaagagtctaacaaaagaacgggacaatttgaagacaataaaagaagccctcgaggtgaaacacgatcagctgaaggaacacattcgcgagaccttagcaaagatccaggaaagtcagtcaaagcaggagcagtctcttaatatgaaggagaaagacaatgaaacaacaaagattgtgtcggaaatggagcagtttaaacccaaggattccgctctgttgcggatcgagattgagatgctgggcttatccaagcgcctccaggagtctcacgatgagatgaagtccgtggccaaagagaaagacgacctccaaagactgcaagaggtcctgcagtctgaatctgaccaactgaaggagaatataaaagaaatcgtggctaagcatctcgaaacagaggaagaactcaaggttgcccactgctgcctaaaggagcaggaagagaccattaatgagctaagggtgaatttatcagagaaagagaccgaaatttccactatccagaaacagctggaggccatcaatgataagctgcagaataaaatccaagagatatatgagaaggaggagcagttcaacattaagcaaatcagcgaagtgcaggagaaagtgaacgaactgaagcaattcaaggaacacagaaaggccaaggacagcgcattgcagtctatagaaagcaagatgctagaactgactaaccggctgcaagaaagccaggaggagattcagatcatgatcaaagagaaagaagaaatgaagcgagtgcaggaggccctgcagattgagcgtgaccagctgaaggaaaatacgaaggaaattgtcgcaaaaatgaaggagtcacaggagaaagagtaccagttcctgaaaatgactgctgttaacgagacccaggaaaagatgtgtgagattgagcacttgaaagagcagttcgaaacccagaaactaaacctggagaacatcgaaacagagaatattcggctgacccagatattgcatgagaacctcgaggaaatgcgctccgttactaaagagagagacgatttgcgctcagtagaggaaaccctgaaagtggaaagggatcagttgaaggagaatcttagggagacaatcacccgcgatctcgaaaagcaggaggagctgaaaatcgtgcatatgcacttgaaagaacatcaggaaacaattgataagttacggggcatcgtaagcgagaagacaaatgaaatttctaacatgcagaaagacctggagcatagcaatgatgctctgaaagctcaggatctgaaaatccaagaagaactcaggatcgctcacatgcacttaaaagaacagcaagaaaccattgacaagctgcgtggcattgtgtccgaaaagacagacaaactaagtaatatgcagaaggacttggaaaactccaacgccaagctccaagagaaaatccaagagctgaaggccaatgaacaccaactgataactctgaagaaggatgtcaatgaaacccagaaaaaagtatctgaaatggagcagctcaagaagcagattaaagaccaaagtttaaccctgtccaagttggaaatcgagaacttgaacctcgcccagaaacttcatgagaatctcgaggaaatgaaaagcgtgatgaaagagcgggataaccttcgcagggttgaggagacattgaagcttgaacgcgatcagctcaaagagtctctgcaagaaaccaaggctagggatctggaaatccaacaagaattgaagaccgctcggatgctgagtaaggagcataaagaaaccgttgacaagctgcgagaaaaaatttcggaaaaaacaatccaaatctccgatattcaaaaggacttggataaatcaaaagatgagttgcagaagaagattcaggaactgcagaaaaaggagctgcagttgctcagagtgaaggaggacgttaacatgtcccacaaaaagatcaacgaaatggaacagctcaagaaacagtttgaggcacagaatctcagcatgcaatctgtgcgcatggacaactttcagctcactaagaagctgcacgaatcactggaggagatccgaatcgttgcaaaagagagagatgaactgcgcagaataaaagagagtctgaaaatggagagggaccaattcatcgcaaccctgcgcgagatgatcgctcgcgatcgccaaaaccaccaagtgaagcctgagaagagactgctctccgacggacagcagcacctgactgagtcattacgagagaagtgcagtcgcataaaagagctgctgaaacgatactctgaaatggacgatcactacgagtgcctaaataggttgagcctagaccttgaaaaagaaattgaattccagaaagagctgagcatgagggtgaaggctaacctgagcttaccataccttcagactaaacacatagaaaagttgtttacagccaatcagcgctgtagtatggaattccacagaatcatgaaaaaactcaagtacgtgctgtcctacgtaaccaaaatcaaggaagagcagcatgagagcattaataaatttgaaatggattttatcgatgaggtggagaaacagaaggaactattaatcaagatccagcatctccagcaggactgcgacgtcccttcacgggaacttcgggacctcaaattgaatcagaatatggacctgcacatcgaagagatattaaaggacttctccgagtctgaatttccaagcattaaaacagagtttcagcaggtactgtccaatagaaaagagatgacccagtttttagaggaatggctgaacacccgatttgatatagaaaagttaaagaatggcatccaaaaagaaaatgaccgcatctgtcaggtgaacaacttcttcaataacaggataatcgctatcatgaacgagtctaccgagttcgaggagcgttctgcgaccatcagcaaggaatgggagcaagatttgaagtcactgaaggaaaagaatgagaagctgtttaaaaactatcagacactcaaaacctctttggcctccggagcccaggtcaatcctaccactcaggataacaagaaccctcacgtgacgagccgagcaacccaattaaccactgaaaagataagggagttggaaaatagcctccatgaagcgaaggaaagtgctatgcataaggaatctaagattattaaaatgcagaaggaactggaagtgactaatgacatcatagccaagttacaggcaaaagtgcacgagagtaacaagtgtctcgagaagaccaaggaaaccatacaagtgttacaggacaaggtcgcactcggggctaaaccgtataaggaggagatcgaggacctgaaaatgaagctagtgaagatagacctcgagaagatgaagaatgcaaaggagtttgagaaggagatatcggccaccaaggccacagtggagtaccagaaagaggtgattaggctgctgcgcgagaacctacggaggtcacaacaggcgcaggacacaagcgtcattagcgaacacacagacccacagccatctaacaaacccctgacttgcggtggcgggagcgggatcgtccaaaacaccaaagcactcattctcaagagcgaacatatccgtctggaaaaagaaatttcaaaattgaaacagcagaacgagcagctaattaagcagaagaatgagctcctgagcaataaccagcacctctctaacgaggttaaaacttggaaggagcggactctgaaaagggaagcgcataaacaggttacttgcgagaacagccctaaatctcctaaggtcactggcaccgcttcgaagaagaagcagataactccaagccagtgcaaagaaagaaatctgcaggatcccgttcctaaggagagcccgaaatcttgctttttcgacagcaggagcaagagcttaccctctccacaccccgtccggtattttgacaattccagcctcggcctgtgtccagaggtacagaatgcgggggctgaaagcgtggattctcagccaggaccctggcacgcttcttctgggaaggacgtgcccgagtgtaagacccagtag

SEQ ID NO: 121258 - DNA, 7038 bp, Artificial Sequence
  derived and/or modified sequence
atggccgaggagggcgccgtggccgtgtgcgtgcgggtgcggcccttgaattcgagagaagaaagtctaggtgagacagcccaggtttattggaaaaccgataacaacgtgatctaccaggtggatggcagcaaatcttttaatttcgaccgggtatttcacggtaatgagacaaccaagaacgtttatgaagaaatcgctgcccctatcatcgattcagctatccagggctacaatggaaccatcttcgcctacggacagactgccagcggaaagacatatactatgatgggatccgaggatcatttaggcgtaatccctagagccattcatgatatcttccaaaaaattaaaaagttcccggaccgagagtttctcttgcgggtctcgtacatggaaatctacaacgagactattaccgacctgctttgtggaactcagaagatgaaacccctcataatcagggaagatgttaatcggaacgtgtacgttgctgatcttaccgaagaggtagtgtacacgtccgagatggccttaaagtggattactaagggggaaaaatcccggcactatggtgaaacaaaaatgaaccagcgcagtagtcgatctcacaccatctttcgaatgatcctagagagcagagagaaaggcgaacctagtaattgtgaaggaagcgtcaaggtaagtcacctcaatcttgtcgacctcgccgggagcgaaagagcggcccagactggggcagccggggtgcgcctgaaagagggctgtaatatcaaccgatcattgttcattctaggacaggtcatcaaaaagctctcggacggtcaggtgggggggttcatcaactatcgtgattctaagttaaccagaattctgcagaacagcctcggcggcaatgccaagacacgtatcatatgcacgatcaccccagtctctttcgatgagacactgactgctttacaattcgcttccaccgcaaagtatatgaagaacacaccttatgtgaacgaggtgtcaacagatgaggccctactaaagagataccgcaaggagatcatggaccttaaaaagcaactggaagaggtgtccttagaaacccgggctcaggcaatggagaaggatcagttggcccagttgctggaagagaaggaccttctccagaaagtgcagaatgagaagatcgagaatctcacaaggatgcttgtcacctcctccagtctgactctccaacaggagctgaaggctaaacgtaagcgaagggtgacctggtgcttgggtaagatcaacaagatgaagaattcaaactatgcagatcagttcaacattccaacaaatatcacaaccaagacgcacaagttatccattaacctcctgcgggagattgatgagagcgtctgctcagagagtgatgtattttctaacaccctcgacacgctgtccgaaattgagtggaacccggcaacgaagctgctcaatcaagaaaatatagagagcgagctgaatagtctccgcgctgactatgacaatttggtgctggactatgagcagctcaggacagagaaggaggagatggagctgaagctgaaggagaaaaatgacctggacgagtttgaagctctggaaaggaaaacaaagaaggaccaggagatgcagttgatccacgagataagtaacttgaagaatctagtcaaacacgctgaagtgtataatcaggacctcgaaaatgaactaagctctaaagtggagttgcttcgggagaaggaagatcagatcaagaagcttcaggagtacatcgactcccagaaacttgagaacataaagatggacctgtcctactctctggaatccatcgaagaccctaagcagatgaagcaaactctgtttgacgccgagaccgtggctctagacgctaagcgggaatcagcgtttctcagaagcgaaaacttagaacttaaggagaagatgaaggagctggccaccacttataagcaaatggagaatgacattcagctgtatcagtctcaactggaggctaaaaagaagatgcaggtggacttagagaaagagctgcaaagtgcctttaacgaaattactaaactcacaagccttattgatggaaaagttcccaaagacctgctctgtaatctagagttggaaggaaagatcacagacctacagaaagagctgaacaaggaggttgaagaaaacgaagcattgcgagaggaggtgatactgctgtctgaactcaaaagcttgccaagtgaagtggaacggctcaggaaagaaatccaggataaatccgaagagctccacataatcacttctgagaaggacaaactctttagcgaggtcgtacacaaggagtctagagttcaggggctgctggaagaaataggcaagactaaagacgatctagctacgacacaaagtaattacaaatccactgatcaagagttccaaaactttaaaactttgcatatggactttgagcagaaatacaagatggtcttggaagagaacgagcgcatgaaccaggagatcgtcaacctttcaaaggaggcccagaagttcgattcttccctgggggcgttaaagactgagctctcttataagacacaagagctgcaagaaaaaacgcgtgaggtgcaggaaagacttaacgaaatggagcaactcaaggagcagctcgaaaatagggattccaccttgcagactgtggaaagagaaaagaccctcatcacagagaagctccagcagaccctggaagaggtcaaaactctgacccaggaaaaagatgacctgaagcagctacaggagagtctccagatagagagagatcagctgaagtcagacatacacgacacggtgaatatgaacattgacacacaggagcagctgcgcaatgccctagaaagtttgaagcagcaccaggagaccatcaacaccctgaaaagcaagatctctgaggaagtgtcccggaatttgcatatggaagagaatacaggcgaaactaaggatgagttccaacagaagatggtcggtatagacaagaagcaggacctagaggcgaaaaatactcagacactaacagcagacgtgaaagacaacgaaatcattgagcagcagcggaagatctttagtcttatccaggaaaaaaacgagctgcagcagatgctggagagcgtgattgctgagaaggaacagcttaaaacagacctgaaggagaatatcgagatgactattgaaaaccaagaggagctcaggctgttgggtgacgaactaaaaaagcagcaggaaatcgtcgcacaggagaagaaccatgccataaaaaaagaaggagagctaagccgtacatgcgacagactggcggaggtggaagaaaaactcaaagaaaagtctcagcagcttcaggaaaaacagcagcagctactcaacgtacaggaagagatgagtgaaatgcagaagaaaattaacgagatagagaacctgaagaatgagctcaagaacaaggagctgacacttgagcacatggagactgagcgcctcgagcttgcccagaaactcaacgaaaattacgaagaggtaaagagtatcacgaaggaacgtaaagtgctgaaagagcttcagaaatcttttgagactgagcgggaccacttgcggggatacattagggagatcgaagctactggcctgcagacgaaagaggagcttaaaattgcccacatccatcttaaggaacaccaggagacgattgacgaactcagacgctctgttagtgaaaaaacagcacaaattatcaatacacaggatcttgagaagtcccataccaagttgcaggaggaaataccagtcttgcatgaggaacaggagctgctgcctaatgtgaaagaagtatctgagactcaggagaccatgaatgagctagaactcttgacagaacagagcaccaccaaggattccactactctggcacgaattgagatggagcggctgagactcaatgagaagttccaggagtctcaagaggaaattaagtctctgacaaaagaaagagacaatctgaaaacgattaaagaagccttagaagtgaagcacgatcaactgaaagagcacatcagagagacactggcaaagatccaagaatctcagtctaagcaggaacaaagcctgaatatgaaagaaaaggataacgaaactaccaaaatcgtgtcggaaatggaacagttcaagcccaaagacagcgccctactaagaattgagatcgaaatgctgggtctctccaaaagattgcaggaatctcacgacgagatgaaaagtgtggcaaaggagaaggacgaccttcaacggcttcaggaagtgctgcaaagtgaaagcgatcaacttaaggaaaacattaaggagattgtggccaagcacttggagacagaggaagaacttaaggtggcccactgctgcctcaaagagcaggaggagacgataaacgaactgcgcgtcaacctgtcagagaaagaaaccgagatttctacgattcagaagcagctggaggccattaatgataaactccaaaacaagattcaggaaatttatgagaaggaagagcaattcaatattaagcagatctcggaggtgcaagaaaaagtcaacgaactgaagcagtttaaagagcacaggaaggctaaagactccgcactccaatcgattgaatcaaagatgctggagttaacaaacagactgcaggagagtcaagaagaaattcagatcatgatcaaggaaaaggaggaaatgaagcgtgttcaggaggccctgcagattgaacgcgatcagctgaaggaaaacactaaagagattgttgccaagatgaaagagagccaggaaaaggaataccagttcctcaagatgacggccgtgaatgaaacgcaagagaagatgtgcgaaatcgagcacttaaaagaacaatttgagactcagaaacttaacttagagaacattgaaacagagaacatccgcctcacccagattctgcacgagaatctcgaagagatgagatcagtaactaaggaacgagacgacttgcggtctgtagaggaaaccctcaaggtcgagcgagaccagctgaaagaaaatctgagagagacaattacccgtgacctcgagaaacaggaggagctgaaaatcgttcacatgcatctgaaggaacatcaggagaccattgataagctgcgcggcatcgtgagtgaaaagactaatgagatctcgaacatgcagaaggacttggaacattcaaacgacgccttaaaagctcaggatctgaaaatccaggaagagctccggatagctcatatgcacctgaaagagcagcaagaaacaattgacaaattacggggcatcgtgagcgaaaagaccgacaaactgtctaacatgcaaaaagatctggagaacagcaacgcaaagttacaagaaaagattcaggaactcaaagccaatgagcaccaactcatcactctgaagaaagatgtgaacgaaacacagaagaaagtcagcgaaatggaacaattgaaaaagcaaatcaaggatcaaagtctgactctgtcaaagttagagattgagaacctaaacctcgcacagaagctgcatgaaaacctggaggagatgaagagcgtgatgaaggagcgggataacttgcgcagggtcgaagaaacgttgaagctggagagagatcagctgaaggaatccctccaggagactaaggccagagatcttgagatccagcaagaactgaaaaccgccaggatgctctcaaaggaacacaaagagaccgttgacaagctgagggaaaaaatctcagagaagaccattcagatctccgatattcagaaggatctggacaaatccaaggatgaactacagaaaaagatacaggagctgcagaagaaggaactccagctactcagggtgaaagaagacgtgaacatgtctcataagaaaattaatgaaatggagcagctcaaaaagcagttcgaggcgcaaaatctcagcatgcaatcagtgcggatggacaactttcaactgactaaaaagttacacgagtcactagaggagatccgaatcgtggcaaaggagcgcgatgaactgcggaggatcaaagagtctctcaagatggaaagggaccagtttattgctacactgcgcgagatgatagcccgggaccgtcaaaatcaccaggtgaaaccagagaagcgcctgctttctgatgggcaacagcacctcacagaatcccttcgtgaaaaatgttctcggatcaaagagttgttaaaacgttatagcgagatggacgaccactacgaatgccttaatcgcctgagtctggatctcgagaaggaaattgaatttcaccgcattatgaaaaaactgaagtatgtgctgtcctacgtgacaaagatcaaagaggaacagcatgaaagcataaataaatttgaaatggacttcattgacgaagtggagaagcaaaaagagctcctcattaagattcaacacctgcagcaggactgtgacgtcccaagtagagaactgagagacctgaagcttaatcagaatatggatctccacattgaggagatcctgaaagatttctccgagagcgaatttccatctattaaaacagagtttcaacaggtactcagcaatcggaaagagatgacccagtttctggaggagtggctaaacactaggttcgacattgagaagctgaagaacgggatccagaaggaaaatgataggatttgccaggtgaataatttcttcaacaaccggatcatcgctatcatgaacgagtcgacagagttcgaagaaaggagtgctacgatttcaaaagaatgggagcaggacctgaagagtctgaaggaaaagaacgagaagttgttcaaaaactaccagacactgaagacctccttagcaagcggcgcacaagtgaacccaaccacccaggacaacaagaacccccatgttacaagccgtgccacacaattgacaacagaatag

SEQ ID NO: 121259 - DNA, 8106 bp, Artificial Sequence
  derived and/or modified sequence
atggcagaggagggcgcagtggctgtgtgcgtgcgcgtaagaccactgaacagtcgtgaggagagtctgggtgagacagcacaggtgtattggaagaccgacaataacgttatctaccaagtggacgggtcaaagagttttaattttgatagggtcttccacgggaacgagactaccaagaacgtgtacgaagaaatagctgctccgatcatcgacagcgccatacagggttacaacggcaccattttcgcctacgggcagactgcctcaggaaagacatatacaatgatgggcagtgaggaccacctgggggtgattccgagagcaattcatgatattttccagaagataaagaaattccccgaccgtgagttcctgctccgggtttcatacatggagatatataacgagacaattacagatttgttatgtggtacacaaaagatgaagccactgataattagggaagacgtgaacaggaacgtgtacgttgctgatctgactgaagaagtcgtctacacatcagagatggcgctgaagtggatcaccaaaggagagaagagtaggcactacggggagacaaaaatgaatcagaggagttctcggtctcacaccatcttcagaatgatactcgagagccgcgagaaaggagagccatcgaattgtgagggatcggtgaaggtcagccaccttaacctggtggacctggccggttcagagcgcgctgcccaaactggggctgcaggggtgaggctcaaagagggatgtaacatcaacagatccctgttcatactggggcaggtgattaaaaagctgtctgatggccaagtgggaggctttattaattatcgggattcaaaactcactaggatcctccagaactccctcgggggtaatgcgaaaacacgcatcatctgcactataactcccgtgagctttgacgagacactgactgccttgcagtttgctagtaccgctaagtacatgaagaacacaccatatgtaaacgaggtttcaaccgatgaagcccttctcaaaaggtatcgcaaagagattatggatttgaaaaagcagctagaagaggtgtcccttgaaacacgggcacaggccatggaaaaggatcagctggcccaattgctggaggaaaaggatctgctacagaaagtacagaacgagaagattgagaacctgacccggatgcttgtcacaagtagctctctgactctgcagcaagagttgaaagcaaagcgcaaacgcagagtgacatggtgtctgggaaagatcaataagatgaaaaattcaaactatgcggaccaattcaatatcccgactaacattactaccaagacacataagctgagtattaatctgctgagggagattgatgaatcagtttgttcggaaagcgatgtgttttcgaacaccttggacactctcagtgaaatcgaatggaaccctgccactaaactgctgaaccaagagaacattgagtccgagttaaattctctacgcgcagattacgacaacctagtgctcgattacgagcagttgagaaccgaaaaggaagagatggagctgaagcttaaggagaagaatgacctagacgagttcgaagccctcgaacgaaaaacgaagaaagaccaagaaatgcagctgatccatgagatcagtaacctgaaaaatctggtgaaacatgctgaggtatacaaccaagatctagaaaatgagctctcaagtaaagtggagctactgagagagaaggaagatcagattaagaaacttcaggagtacatcgacagtcaaaagctggagaatatcaagatggatctgtcttactctttggaatccattgaggatcctaagcagatgaagcagactttatttgatgccgagacggtcgcacttgatgcaaagagagagagtgccttcttgagaagcgagaacctagagctgaaagaaaagatgaaagagctcgccacaacatacaaacagatggaaaatgatattcagctgtaccagagccagcttgaagcaaaaaagaaaatgcaagttgaccttgagaaagaattgcaatccgcatttaatgaaattactaagctgacatcactcattgacggcaaggtgccgaaagacctcctgtgtaacctggaacttgagggcaagattactgacctgcaaaaggaattgaataaagaagtggaggagaacgaagccctccgggaagaagtcatcctgctcagcgagctgaaatccctcccttctgaggtggaaagactccgcaaagaaatccaggacaaaagtgaggagttgcatatcataacaagcgaaaaggataaactcttctctgaggtggtgcataaagagtcacgagttcagggactgctcgaggagattgggaaaacgaaagatgatctcgcaacgacccagtccaactacaaaagcacagaccaggagttccagaatttcaagacactccacatggatttcgaacaaaagtacaagatggtcttggaggagaacgaacgtatgaatcaggagatcgtgaatttatctaaagaggcccagaagtttgactctagtcttggggctcttaagacagaactctcgtacaagacacaagaacttcaagaaaaaaccagggaggtgcaggagcggttgaacgaaatggaacagttgaaagagcaacttgagaacagggattctaccctccagactgttgaacgggagaagacactgattactgagaaattgcaacagaccttggaggaagtcaagactctgacgcaggagaaggacgatctgaagcaactacaagagtccctgcagatcgaacgcgaccagctgaagagcgatatccatgataccgtgaatatgaatatcgatactcaggagcaactgcgaaatgctctggagtcgctcaagcagcaccaggagaccatcaatacccttaagtccaaaatatccgaagaggtgagtcgtaatctccatatggaggaaaacaccggcgagactaaagacgaattccagcagaaaatggtgggaattgacaagaagcaagatctcgaggcaaagaacacacagactctgacagccgatgtgaaggacaatgaaatcattgaacagcagcggaaaatattttctctcatacaggagaagaacgaacttcagcagatgctggaaagcgtcattgctgaaaaggaacagctcaaaactgacttgaaagaaaatattgaaatgacaattgagaatcaggaagagctgcggctgttaggcgatgagctgaagaaacaacaggagattgtggcgcaggagaaaaaccacgctatcaagaaagagggggaactttctagaacttgtgatcgcctcgcagaagtggaagaaaagctaaaagagaaatctcagcaactccaggagaagcaacagcagttgttaaatgtgcaggaagagatgtccgagatgcagaaaaagatcaatgaaatcgaaaatttaaagaatgagctcaaaaacaaggagctgactctggagcacatggagacagagagactcgaactagcccaaaaactcaatgaaaactatgaggaagtgaagagcattaccaaagagagaaaagttctgaaggagttacagaagtccttcgagactgagcgggaccacctcagagggtatatccgtgaaattgaggccaccggcctgcaaactaaagaggagctgaagattgctcacattcacctaaaagaacaccaagaaacaattgatgagctgcgaaggtcagtcagcgagaaaaccgcgcagatcataaacacgcaagatctcgagaagtctcatactaaacttcaggaggaaatcccagtgctgcacgaagagcaggagctgctgcctaacgttaaggaagtttctgagacacaggagaccatgaacgagctggagttacttaccgagcaaagtaccaccaaagacagcaccacactggcgagaattgaaatggaaaggctaaggcttaatgaaaagtttcaggagtctcaggaggaaatcaaatcacttaccaaggagcgtgataatttaaagacaattaaggaggcgctggaggtcaaacacgatcagctcaaagagcacatacgagaaaccctcgctaagattcaagagtcccaatctaagcaggaacagtccctgaatatgaaagagaaggacaacgagaccactaagatcgtgtcagagatggaacaatttaagccaaaagactccgcgttgctgaggatcgagatcgaaatgctgggcctgagtaagcgcctgcaggaatcccacgacgagatgaagagcgtggcaaaggaaaaagatgatcttcagaggctacaagaagtcctccagtctgagagcgaccaactgaaggagaacattaaggagatagtagctaagcatctggagaccgaagaggagctgaaggtcgcccattgttgcttaaaggaacaagaggagacaataaatgaattgcgagtgaatctatctgaaaaggaaactgagattagtacaatacagaagcagctagaagcgataaacgacaagctccagaataagattcaggaaatctacgagaaggaggagcaatttaatattaaacagatcagtgaagtgcaagaaaaggtcaatgagttgaaacaatttaaagagcatcggaaggctaaagactctgccctgcaatccattgaatcaaaaatgcttgagctgacaaacagacttcaagagagccaggaggagatccagattatgatcaaagagaaggaggaaatgaagcgcgtgcaggaggccctgcagattgagagggatcagctgaaggagaataccaaggagatcgtggctaagatgaaggaatcccaggaaaaggagtaccagtttcttaagatgaccgcggtcaatgagacccaggagaagatgtgcgaaattgagcacctgaaagagcagttcgagactcaaaagttgaaccttgagaacatcgaaacagaaaatataaggctaacccagattcttcacgagaatctggaagaaatgagaagcgtgacgaaggagagagacgatttacggtcagtggaggagacactgaaagtagagagagatcagctcaaggagaatttgcgcgaaacgatcacccgcgacctggaaaaacaggaagagttgaaaattgttcatatgcatctcaaggagcaccaagagacaattgacaagttgagaggaattgtatcggaaaagactaatgagatcagcaacatgcaaaaggacctggagcattccaatgacgctctcaaagcccaggatctaaagatccaagaagaactaagaatcgcacacatgcatctgaaggagcagcaggagacgatcgacaaactgagagggattgtttcagaaaagaccgataagctgtctaacatgcaaaaggatctcgaaaacagtaatgccaagctgcaggagaaaatccaggaactcaaggcgaatgagcatcagctgatcactctcaagaaggacgttaacgaaacacagaaaaaggtttccgagatggagcagctgaagaagcagattaaagatcagtctctcacactgagtaaacttgagatcgagaacttaaaccttgcccagaaactccacgagaacctggaggaaatgaaatctgtgatgaaggaaagagataatctaaggagggtggaggagactctgaagctggagcgtgatcagctcaaagagagcttgcaggagactaaggcgcgagacctcgagatccagcaggaactgaaaactgccaggatgctctcgaaagagcataaggagaccgtcgacaagctccgcgaaaagatttcagagaagaccatccaaatcagtgacattcagaaggatctagataagagcaaggatgagctccaaaagaaaatccaggagctacagaagaaggagctccagctgctgagggtgaaggaggatgtgaacatgagccataaaaaaattaatgaaatggagcaacttaagaaacagtttgaagcccagaatctgagcatgcagtctgtgcggatggacaactttcagctgacaaaaaaacttcatgagagcttggaggagatccggatcgtggcaaaagaacgagacgagctgcgtcggattaaggagagtcttaagatggaacgcgaccagtttatcgcaactctacgggagatgatcgcccgagatcgccaaaatcatcaggtgaagcccgaaaagagattgttgtccgacggacagcaacaccttaccgagtctttgcgcgagaaatgttctagaatcaaggaacttctcaagcggtactccgaaatggacgaccattacgaatgtttgaatcgattaagtctagacttagagaaggaaattgaatttcagaaggagctgtctatgagagtgaaggcgaatctgagtttgccctatctgcagacgaagcacatcgagaagctgttcactgccaaccagcgctgcagcatggaattccatagaatcatgaagaagctgaagtatgtgttgagctacgtgactaagatcaaagaggaacagcatgaatcaatcaacaaattcgagatggacttcattgacgaggtcgaaaagcagaaggagctgctaattaagatccagcatctgcagcaggactgcgacgtgccctcaagggaacttagagaccttaagctgaaccagaacatggacctgcatatcgaggaaatactgaaggatttttctgagtccgaattcccttcaattaagaccgagtttcagcaggtcctcagtaatcggaaggagatgacacaattcttggaggagtggctgaacacacgattcgatattgaaaagcttaaaaacggaatccagaaagaaaacgacaggatttgtcaggttaacaatttctttaataaccgcatcatcgccataatgaacgagtctacagagtttgaggaacgatctgccaccatcagtaaagaatgggaacaagatttgaaatctttgaaggagaaaaacgagaagttatttaagaactatcagacattgaaaacctcccttgcctcaggggcacaggtaaaccccaccacccaggacaacaaaaatccgcatgtcacttctagggctacccaactgaccacggaaaagatccgggaacttgagaattctctgcacgaagccaaggaatctgctatgcacaaggagtctaaaataattaaaatgcagaaagagctggaagtaacaaacgatataatcgccaaattgcaggcaaaagtgcacgaaagtaacaagtgcctggaaaaaacgaaggagacaattcaggttctacaggataaagtcgccttaggggctaagccttataaagaggagattgaagacctaaagatgaaactggtgaaaattgatctggagaagatgaaaaacgcgaaagaattcgaaaaggagattagcgcaaccaaggctacggttgaataccagaaggaggttatcagactgctgagggagaatctgaggcgatctcagcaggctcaggatacctccgttattagcgagcacaccgatcctcagccatcgaacaagcctctgacatgtgggggaggttccggcatcgtacaaaacaccaaggccctgattctcaagagcgagcacatccggctggaaaaggagatctctaaactgaaacagcagaacgagcagttgattaaacagaaaaatgaactcttaagtaataatcagcacctgtccaacgaagtcaaaacttggaaggaacgaacactgaaacgagaagcgcacaagcaggtgacatgcgagaatagtcctaaaagtccaaaggtgacagggacggcctctaagaaaaagcagataactcctagccagtgtaaagagcgtaacctccaggatcctgtgcccaaggagagccccaagtcatgctttttcgactcgcgttcgaagagcttgccatctccacaccctgttcgatattttgataacagcagtctgggactctgccccgaggtgcagaatgcaggtgccgaaagcgttgattcacagcccggtccttggcatgcctcaagcggcaaagacgttcccgagtgtaaaacgcagtac

SEQ ID NO: 121260 - DNA, 7037 bp, Artificial Sequence
  derived and/or modified sequence
atggctgaggagggcgcagttgcagtgtgcgttagggtccgaccacttaattctcgcgaagaatcgcttggagagaccgctcaggtgtactggaaaaccgataataacgtgatctatcaggtagacggatccaagagcttcaactttgatcgcgtttttcacggaaacgaaaccaccaagaatgtctatgaagagatcgctgctcctatcatcgactccgccatccaaggctataatgggactatcttcgcatatggtcagaccgcttcgggaaaaacttacacaatgatgggctctgaggaccatctcggagtaattcctagagccatccacgacatcttccagaaaattaaaaaattccccgaccgggagtttctgctgagagtgtcatacatggagatctataatgagaccatcacagacctactgtgcggaacgcagaagatgaagcctctgatcatccgggaggatgtgaatcggaacgtctacgttgctgatctgacagaggaagtagtttatacttcagagatggctttgaagtggatcaccaagggggagaaatccaggcactatggggagaccaagatgaaccaacggagctcaaggagccacacaatctttagaatgatactcgaaagcagggagaagggggagccttccaactgcgagggctcagttaaggtgtcccatcttaatctggtggatttggcagggagcgaaagagctgcccagaccggggcagctggcgtgcgattgaaggagggctgcaatattaaccgatctctcttcatactaggtcaggtgatcaagaagctgagcgacggccaagttggcggtttcattaattacagagactctaagctgacccggatccttcagaattcgctgggcggaaatgcgaaaacacggattatttgcaccattactccagttagctttgacgagacactgaccgctctgcagtttgccagcaccgctaaatacatgaaaaacaccccctatgtgaacgaggtatctacggatgaagcgctccttaagagatatcgcaaagaaatcatggacttgaagaagcagctggaggaagtgagtctagaaacacgggcacaagcaatggagaaggatcaactcgcccagttgctggaggagaaagatctcttgcagaaggtgcagaacgaaaaaattgagaacctgacaagaatgctggtgacctcctcatctttgaccttacaacaggagttaaaagcaaagcgaaagaggcgcgtgacctggtgtctgggcaagattaataagatgaagaactcaaattatgccgatcagtttaatattcccacaaatataacaacaaaaactcataagctctctataaacctgctgagagagatagatgagtcagtatgttctgagagcgacgttttttctaacacccttgacacactatccgaaatcgaatggaatccagcgaccaagctcttgaatcaggaaaacatcgagtccgagctaaacagtttgcgagcagattatgacaatctggttctggattacgagcagctccgtactgagaaggaagagatggagttgaaactgaaagaaaaaaacgacttagatgagtttgaggcattagagagaaagactaaaaaagaccaggagatgcaacttattcacgaaatttcaaatctgaaaaacttggtgaaacacgcagaggtgtacaatcaggatctcgagaatgagctgtcatcgaaagttgagctgctgcgagagaaggaagaccagattaagaagcttcaggaatatatagattcccagaagttggagaatatcaaaatggaccttagctattccttggagagcattgaggatcctaagcagatgaaacagacgctgttcgacgccgagacggtcgctctagatgctaaacgggagtctgcgttcttaaggagtgagaatctggaattgaaagagaagatgaaggaactcgctaccacatacaagcagatggagaatgacatccagctttatcagagccaactcgaggccaaaaagaagatgcaagtggatctggagaaggagctgcagtctgcttttaacgagattacaaagctcacaagtctcatcgacggtaaggtcccaaaagatcttttatgcaaccttgagttggaaggcaagattactgatcttcaaaaggagttaaacaaagaggttgaagagaacgaggccctgcgtgaggaggtcatccttctgtcagaacttaagtcgcttccatcagaggtggagcgcctgaggaaagaaatccaagacaaatccgaagaactacatattatcacaagcgagaaggataagctgtttagtgaggtcgtccacaaggagtcccgcgtgcagggtttactcgaagagatagggaagactaaggacgatctggcaaccacgcagagtaattacaagtctacagatcaggagttccagaacttcaaaacactgcacatggattttgagcagaagtacaagatggtgttggaggagaacgagcgaatgaatcaggagattgtcaacctgagtaaggaagcccaaaaattcgactcttccctgggcgcactgaaaaccgagttgagctacaagactcaagagctccaggagaaaactcgtgaagtgcaggagcggctcaatgagatggaacagctgaaggagcagctggaaaaccgtgactcgaccctgcagaccgtagaaagagagaaaacactgattactgaaaagctacagcagaccctggaggaagtcaagaccctcactcaagagaaggacgatctgaaacagttgcaggagagcttgcagattgagagggaccagttgaaaagcgacatacacgataccgtgaacatgaatattgacacacaggaacagctgcgcaatgcattagagtcccttaagcagcatcaggagaccattaacactctgaaatcaaaaatctccgaagaggtctcccgcaatcttcatatggaggagaatacaggcgagacaaaagatgagtttcagcaaaagatggtgggaattgacaagaaacaagatctggaggctaaaaacacacagacacttacggccgatgtaaaggataacgagataattgagcagcagaggaagattttcagcctgatccaagagaagaatgagctgcaacagatgctggaatccgtcatcgcagagaaggagcagcttaagactgatctgaaggaaaacattgaaatgaccatcgagaatcaagaggaactgcggctactcggagacgaactgaagaagcaacaagagatcgtggcccaagagaagaatcacgccatcaagaaggagggagaactctcacgaacctgcgacagactggctgaggtagaggaaaagttgaaagagaaatctcaacagttgcaggagaagcagcagcagctgctgaacgtgcaagaggaaatgagcgagatgcaaaagaagatcaacgagatcgagaatctaaagaacgagttaaagaataaggaacttactctggaacatatggagacggaacggctagagctggctcaaaaactgaacgaaaattacgaggaggtgaaaagcatcacaaaggagcggaaagtgctgaaggagctgcagaaaagttttgagactgaaagggatcatttgcggggttatataagagagattgaggctaccgggctccagacgaaagaagagctcaaaattgcccacatccatcttaaggagcaccaggaaactattgacgaactccggagatctgtgtccgaaaagacagcccagattattaatacgcaagatctcgagaaatcccacactaagttgcaggaagagatccccgttctccatgaagagcaggaacttctacccaatgtaaaggaagtgagcgaaacccaggaaacaatgaatgagttagagctgctgacagaacaatcaacaaccaaggattctacaacattggccagaattgaaatggagagactgcgactcaatgaaaaattccaggagtcgcaggaggagattaaatctctcaccaaagagcgcgataatctcaagaccataaaagaggccctcgaagtgaaacatgatcagctcaaagaacatattcgcgaaacgttggccaagattcaagagagtcagtccaagcaggagcagtccctgaatatgaaagagaaggataacgagacaaccaagattgtgagtgaaatggagcagtttaagcctaaagactctgcactgctgaggattgagatcgaaatgcttgggttgagtaaacgcctgcaggagtcacacgatgaaatgaagtcagttgctaaagagaaggacgatcttcagcgcctgcaggaagtcctccagtctgaatctgatcagttgaaagagaacattaaagagattgtcgcaaaacacctggaaactgaggaggagttaaaggtagcacattgttgtcttaaggagcaggaagagacaattaatgaactcagggtcaatctgtctgaaaaggaaaccgagatcagcaccatccagaaacagctagaggccatcaatgacaagttgcagaacaaaatccaagaaatatacgagaaggaagagcagttcaacattaaacaaattagcgaagttcaagagaaggttaatgaactgaaacagtttaaggagcaccggaaggcaaaagattccgctttgcaatctatcgagtccaagatgctggagctgactaatcgactccaggaatctcaggaggaaattcagatcatgatcaaggaaaaggaggagatgaagagagtgcaggaggccttacaaatcgaaagagaccagctgaaggagaacactaaggaaatcgtagctaaaatgaaagaaagccaagaaaaggagtaccagttcctgaaaatgaccgccgtgaacgaaactcaggaaaaaatgtgtgagattgaacatctgaaggagcaattcgagacacaaaagttgaatcttgagaatatcgagactgagaatattcggctcacccagatcctccatgaaaacctagaggaaatgcgcagcgttacaaaagaacgtgatgacctgcgatccgttgaggagacccttaaagtggagcgcgaccagcttaaggaaaacctcagggagacaatcactcgggatctggagaaacaggaggaattaaagattgtgcacatgcacctgaaagagcaccaggagacaatcgacaagttgcgcggtattgtctctgagaagacaaatgaaatctcaaacatgcaaaaagacttagagcattcaaacgatgcgctaaaagctcaagacctaaagattcaagaggagctgcgcattgcgcacatgcatctcaaggagcagcaagagaccatcgacaaactccgtgggattgtttccgaaaaaaccgacaagctgtctaacatgcaaaaggacctggaaaacagcaatgcaaagctgcaggaaaagatccaggagctgaaagccaacgagcaccagctgatcacattgaaaaaggacgttaatgaaacacaaaaaaaggtcagcgagatggaacagctgaagaaacaaatcaaagaccaatctctgaccctatctaagctcgaaattgaaaacctgaacctggctcagaagttacacgagaacttagaagaaatgaaatccgtaatgaaagagagggataacctgcgcagggttgaggaaaccctgaaactagaacgggaccagctcaaagagtccttacaagaaacaaaagccagagacctggagatacaacaagaattaaaaactgccaggatgctgtcaaaagaacacaaagaaaccgtggacaagttgagggagaaaatttctgagaagaccattcaaattagcgacatccaaaaagacttggataaatccaaggacgaactacagaagaaaatccaggaactgcaaaaaaaggagcttcaactgctgcgggtgaaggaggacgtgaacatgagtcacaaaaagatcaatgagatggaacaactcaagaagcagtttgaggcgcagaatttgtcaatgcagtccgtacgcatggataattttcagctgacaaaaaagctccatgagtccctggaggaaattagaatcgtggccaaggagagggatgaactgcggcgaatcaaagaatctctcaaaatggagagagatcagttcattgccactctccgcgagatgattgctcgagaccggcagaaccatcaggtcaaaccagagaagaggctgttgagcgacggccagcaacatttgaccgaatccctccgtgagaagtgctctcggatcaaagaactcctcaagcggtacagcgagatggacgatcattacgaatgtctgaaccggctttccctggatctcgaaaaagagattgagtttcaccggatcatgaaaaaactcaaatacgtgctatcctatgttaccaaaattaaggaagagcagcacgagtcaattaataagttcgagatggatttcatcgatgaagttgaaaagcagaaggaacttcttatcaaaattcagcatctccagcaggactgcgacgtaccttccagggaattgcgcgacctgaagctcaaccaaaacatggacctccatatagaagaaatcctgaaagattttagcgagtcagaatttccatccattaagactgagtttcaacaagtgctgtcaaacagaaaggagatgacgcagtttctggaagagtggctcaacacccgtttcgacatcgaaaagttaaagaatggtattcaaaaggaaaacgatagaatttgccaggttaacaatttttttaacaaccggatcatcgcaattatgaatgaatctactgagttcgaagaacgaagtgccaccatcagcaaggaatgggagcaggatcttaagagtctgaaggaaaagaatgaaaagctgttcaaaaattatcagactctcaagacctcactggcttcaggcgcacaggtgaatcctactacccaggataacaagaaccctcacgtgacaagcagagcaacccagttgactaccgagta

SEQ ID NO: 121261 - DNA, 8612 bp, Artificial Sequence
  derived and/or modified sequence
taaatttaaaggcggggcggcctgtgagccctgaagtgccggccgcggagggtcctggccattttcctgggaccagttcagcctgataggatggcggaggaaggagccgtggccgtctgcgtgcgagtgcggccgctgaacagcagagaagaatcacttggagaaactgcccaagtttactggaaaactgacaataatgtcatttatcaagttgatggaagtaaatccttcaattttgatcgtgtctttcatggtaatgaaactaccaaaaatgtgtatgaagaaatagcagcaccaatcatcgattctgccatacaaggctacaatggtactatatttgcctatggacagactgcttcaggaaaaacatataccatgatgggttcagaagatcatttgggagttatacccagggcaattcatgacattttccaaaaaattaagaagtttcctgatagggaatttctcttacgtgtatcttacatggaaatatacaatgaaaccattacagatttactctgtggcactcaaaaaatgaaacctttaattattcgagaagatgtcaataggaatgtgtatgttgctgatctcacagaagaagttgtatatacatcagaaatggctttgaaatggattacaaagggagaaaagagcaggcattatggagaaacaaaaatgaatcaaagaagcagtcgttctcataccatctttaggatgattttggaaagcagagagaagggtgaaccttctaattgtgaaggatctgttaaggtatcccatttgaatttggttgatcttgcaggcagtgaaagagctgctcaaacaggcgctgcaggtgtgcggctcaaggaaggctgtaatataaatcgaagcttatttattttgggacaagtgatcaagaaacttagtgatggacaagttggtggtttcataaattatcgagatagcaagttaacacgaattctccagaattccttgggaggaaatgcaaagacacgtattatctgcacaattactccagtatcttttgatgaaacacttactgctctccagtttgccagtactgctaaatatatgaagaatactccttatgttaatgaggtatcaactgatgaagctctcctgaaaaggtatagaaaagaaataatggatcttaaaaaacaattagaggaggtttctttagagacgcgggctcaggcaatggaaaaagaccaattggcccaacttttggaagaaaaagatttgcttcagaaagtacagaatgagaaaattgaaaacttaacacggatgctggtgacctcttcttccctcacgttgcaacaggaattaaaggctaaaagaaaacgaagagttacttggtgccttggcaaaattaacaaaatgaagaactcaaactatgcagatcaatttaatataccaacaaatataacaacaaaaacacataagctttctataaatttattacgagaaattgatgaatctgtctgttcagagtctgatgttttcagtaacactcttgatacattaagtgagatagaatggaatccagcaacaaagctactaaatcaggagaatatagaaagtgagttgaactcacttcgtgctgactatgataatctggtattagactatgaacaactacgaacagaaaaagaagaaatggaattgaaattaaaagaaaagaatgatttggatgaatttgaggctctagaaagaaaaactaaaaaagatcaagagatgcaactaattcatgaaatttcgaacttaaagaatttagttaagcatgcagaagtatataatcaagatcttgagaatgaactcagttcaaaagtagagctgcttagagaaaaggaagaccagattaagaagctacaggaatacatagactctcaaaagctagaaaatataaaaatggacttgtcatactcattggaaagcattgaagacccaaaacaaatgaagcagactctgtttgatgctgaaactgtagcccttgatgccaagagagaatcagcctttcttagaagtgaaaatctggagctgaaggagaaaatgaaagaacttgcaactacatacaagcaaatggaaaatgatattcagttatatcaaagccagttggaggcaaaaaagaaaatgcaagttgatctggagaaagaattacaatctgcttttaatgagataacaaaactcacctcccttatagatggcaaagttccaaaagatttgctctgtaatttggaattggaaggaaagattactgatcttcagaaagaactaaataaagaagttgaagaaaatgaagctttgcgggaagaagtcattttgctttcagaattgaaatctttaccttctgaagtagaaaggctgaggaaagagatacaagacaaatctgaagagctccatataataacatcagaaaaagataaattgttttctgaagtagttcataaggagagtagagttcaaggtttacttgaagaaattgggaaaacaaaagatgacctagcaactacacagtcgaattataaaagcactgatcaagaattccaaaatttcaaaacccttcatatggactttgagcaaaagtataagatggtccttgaggagaatgagagaatgaatcaggaaatagttaatctctctaaagaagcccaaaaatttgattcgagtttgggtgctttgaagaccgagctttcttacaagacccaagaacttcaggagaaaacacgtgaggttcaagaaagactaaatgagatggaacagctgaaggaacaattagaaaatagagattctacgctgcaaactgtagaaagggagaaaacactgattactgagaaactgcagcaaactttagaagaagtaaaaactttaactcaagaaaaagatgatctaaaacaactccaagaaagcttgcaaattgagagggaccaactcaaaagtgatattcacgatactgttaacatgaatatagatactcaagaacaattacgaaatgctcttgagtctctgaaacaacatcaagaaacaattaatacactaaaatcgaaaatttctgaggaagtttccaggaatttgcatatggaggaaaatacaggagaaactaaagatgaatttcagcaaaagatggttggcatagataaaaaacaggatttggaagctaaaaatacccaaacactaactgcagatgttaaggataatgagataattgagcaacaaaggaagatattttctttaatacaggagaaaaatgaactccaacaaatgttagagagtgttatagcagaaaaggaacaattgaagactgacctaaaggaaaatattgaaatgaccattgaaaaccaggaagaattaagacttcttggggatgaacttaaaaagcaacaagagatagttgcacaagaaaagaaccatgccataaagaaagaaggagagctttctaggacctgtgacagactggcagaagttgaagaaaaactaaaggaaaagagccagcaactccaagaaaaacagcaacaacttcttaatgtacaagaagagatgagtgagatgcagaaaaagattaatgaaatagagaatttaaagaatgaattaaagaacaaagaattgacattggaacatatggaaacagagaggcttgagttggctcagaaacttaatgaaaattatgaggaagtgaaatctataaccaaagaaagaaaagttctaaaggaattacagaagtcatttgaaacagagagagaccaccttagaggatatataagagaaattgaagctacaggcctacaaaccaaagaagaactaaaaattgctcatattcacctaaaagaacaccaagaaactattgatgaactaagaagaagcgtatctgagaagacagctcaaataataaatactcaggacttagaaaaatcccataccaaattacaagaagagatcccagtgcttcatgaggaacaagagttactgcctaatgtgaaagaagtcagtgagactcaggaaacaatgaatgaactggagttattaacagaacagtccacaaccaaggactcaacaacactggcaagaatagaaatggaaaggctcaggttgaatgaaaaatttcaagaaagtcaggaagagataaaatctctaaccaaggaaagagacaaccttaaaacgataaaagaagcccttgaagttaaacatgaccagctgaaagaacatattagagaaactttggctaaaatccaggagtctcaaagcaaacaagaacagtccttaaatatgaaagaaaaagacaatgaaactaccaaaatcgtgagtgagatggagcaattcaaacccaaagattcagcactactaaggatagaaatagaaatgctcggattgtccaaaagacttcaagaaagtcatgatgaaatgaaatctgtagctaaggagaaagatgacctacagaggctgcaagaagttcttcaatctgaaagtgaccagctcaaagaaaacataaaagaaattgtagctaaacacctggaaactgaagaggaacttaaagttgctcattgttgcctgaaagaacaagaggaaactattaatgagttaagagtgaatctttcagagaaggaaactgaaatatcaaccattcaaaagcagttagaagcaatcaatgataaattacagaacaagatccaagagatttatgagaaagaggaacaatttaatataaaacaaattagtgaggttcaggaaaaagtgaatgaactgaaacaattcaaggagcatcgcaaagccaaggattcagcactacaaagtatagaaagtaagatgctcgagttgaccaacagacttcaagaaagtcaagaagaaatacaaattatgattaaggaaaaagaggaaatgaaaagagtacaggaggcccttcagatagagagagaccaactgaaagaaaacactaaagaaattgtagctaaaatgaaagaatctcaagaaaaagaatatcagtttcttaagatgacagctgtcaatgagactcaggagaaaatgtgtgaaatagaacacttgaaggagcaatttgagacccagaagttaaacctggaaaacatagaaacggagaatataaggttgactcagatactacatgaaaaccttgaagaaatgagatctgtaacaaaagaaagagatgaccttaggagtgtggaggagactctcaaagtagagagagaccagctcaaggaaaaccttagagaaactataactagagacctagaaaaacaagaggagctaaaaattgttcacatgcatctgaaggagcaccaagaaactattgataaactaagagggattgtttcagagaaaacaaatgaaatatcaaatatgcaaaaggacttagaacactcaaatgatgccttaaaagcacaggatctgaaaatacaagaggaactaagaattgctcacatgcatctgaaagagcagcaggaaactattgacaaactcagaggaattgtttctgagaagacagataaactatcaaatatgcaaaaagatttagaaaattcaaatgctaaattacaagaaaagattcaagaacttaaggcaaatgaacatcaacttattacgttaaaaaaagatgtcaatgagacacagaaaaaagtgtctgaaatggagcaactaaagaaacaaataaaagaccaaagcttaactctgagtaaattagaaatagagaatttaaatttggctcagaaacttcatgaaaaccttgaagaaatgaaatctgtaatgaaagaaagagataatctaagaagagtagaggagacactcaaactggagagagaccaactcaaggaaagcctgcaagaaaccaaagctagagatctggaaatacaacaggaactaaaaactgctcgtatgctatcaaaagaacacaaagaaactgttgataaacttagagaaaaaatttcagaaaagacaattcaaatttcagacattcaaaaggatttagataaatcaaaagatgaattacagaaaaagatccaagaacttcagaaaaaagaacttcaactgcttagagtgaaagaagatgtcaatatgagtcataaaaaaattaatgaaatggaacagttgaagaagcaatttgaggcccaaaacttatctatgcaaagtgtgagaatggataacttccagttgactaagaaacttcatgaaagccttgaagaaataagaattgtagctaaagaaagagatgagctaaggaggataaaagaatctctcaaaatggaaagggaccaattcatagcaaccttaagggaaatgatagctagagaccgacagaaccaccaagtaaaacctgaaaaaaggttactaagtgatggacaacagcaccttacggaaagcctgagagaaaagtgctctagaataaaagagcttttgaagagatactcagagatggatgatcattatgagtgcttgaatagattgtctcttgacttggagaaggaaattgaattccaaaaagagctttcaatgagagttaaagcaaacctctcacttccctatttacaaaccaaacacattgaaaaactttttactgcaaaccagagatgctccatggaattccacagaatcatgaagaaactgaagtatgtgttaagctatgttacaaaaataaaagaagaacaacatgaatccatcaataaatttgaaatggattttattgatgaagtggaaaagcaaaaggaattgctaattaaaatacagcaccttcaacaagattgtgatgtaccatccagagaattaagggatctcaaattgaaccagaatatggatctacatattgaggaaattctcaaagatttctcagaaagtgagttccctagcataaagactgaatttcaacaagtactaagtaataggaaagaaatgacacagtttttggaagagtggttaaatactcgttttgatatagaaaagcttaaaaatggcatccagaaagaaaatgataggatttgtcaagtgaataacttctttaataacagaataattgccataatgaatgaatcaacagagtttgaggaaagaagtgctaccatatccaaagagtgggaacaggacctgaaatcactgaaagagaaaaatgaaaaactatttaaaaactaccaaacattgaagacttccttggcatctggtgcccaggttaatcctaccacacaagacaataagaatcctcatgttacatcaagagctacacagttaaccacagagaaaattcgagagctggaaaattcactgcatgaagctaaagaaagtgctatgcataaggaaagcaagattataaagatgcagaaagaacttgaggtgactaatgacataatagcaaaacttcaagccaaagttcatgaatcaaataaatgccttgaaaaaacaaaagagacaattcaagtacttcaggacaaagttgctttaggagctaagccatataaagaagaaattgaagatctcaaaatgaagcttgtgaaaatagacctagagaaaatgaaaaatgccaaagaatttgaaaaggaaatcagtgctacaaaagccactgtagaatatcaaaaggaagttataaggctattgagagaaaatctcagaagaagtcaacaggcccaagatacctcagtgatatcagaacatactgatcctcagccttcaaataaacccttaacttgtggaggtggcagcggcattgtacaaaacacaaaagctcttattttgaaaagtgaacatataaggctagaaaaagaaatttctaagttaaagcagcaaaatgaacagctaataaaacaaaagaatgaattgttaagcaataatcagcatctttccaatgaggtcaaaacttggaaggaaagaacccttaaaagagaggctcacaaacaagtaacttgtgagaattctccaaagtctcctaaagtgactggaacagcttctaaaaagaaacaaattacaccctctcaatgcaaggaacggaatttacaagatcctgtgccaaaggaatcaccaaaatcttgtttttttgatagccgatcaaagtctttaccatcacctcatccagttcgctattttgataactcaagtttaggcctttgtccagaggtgcaaaatgcaggagcagagagtgtggattctcagccaggtccttggcacgcctcctcaggcaaggatgtgcctgagtgcaaaactcagtagactcctctttgtcacttctctggagatccagcattccttatttggaaatgactttgtttatgtgtctatccctggtaatgatgttgtagtgcagcttaatttcaattcagtctttactttgccactagagttgaaagataagggaacaggaaatgaatgcattgtggtaatttagaatggtgatagcaataccttcttcttgcatatggtaatacttttaaaagttgaattgttttatttatttgtatattttgtaaagaataaagttattgaaagaaatgtaaagttatctacatgacttagcatattccaaagcataatacatacattaatataaaacatcattttattaacaaaattgtaaatgtttttaataccttacacattcaataaatgtttagtagttctgaatcacc

SEQ ID NO: 121262 - DNA, 8504 bp, Artificial Sequence
  derived and/or modified sequence
taaatttaaaggcggggcggcctgtgagccctgaagtgccggccgcggagggtcctggccattttcctgggaccagttcagcctgataggatggcggaggaaggagccgtggccgtctgcgtgcgagtgcggccgctgaacagcagagaagaatcacttggagaaactgcccaagtttactggaaaactgacaataatgtcatttatcaagttgatggaagtaaatccttcaattttgatcgtgtctttcatggtaatgaaactaccaaaaatgtgtatgaagaaatagcagcaccaatcatcgattctgccatacaaggctacaatggtactatatttgcctatggacagactgcttcaggaaaaacatataccatgatgggttcagaagatcatttgggagttatacccagggcaattcatgacattttccaaaaaattaagaagtttcctgatagggaatttctcttacgtgtatcttacatggaaatatacaatgaaaccattacagatttactctgtggcactcaaaaaatgaaacctttaattattcgagaagatgtcaataggaatgtgtatgttgctgatctcacagaagaagttgtatatacatcagaaatggctttgaaatggattacaaagggagaaaagagcaggcattatggagaaacaaaaatgaatcaaagaagcagtcgttctcataccatctttaggatgattttggaaagcagagagaagggtgaaccttctaattgtgaaggatctgttaaggtatcccatttgaatttggttgatcttgcaggcagtgaaagagctgctcaaacaggcgctgcaggtgtgcggctcaaggaaggctgtaatataaatcgaagcttatttattttgggacaagtgatcaagaaacttagtgatggacaagttggtggtttcataaattatcgagatagcaagttaacacgaattctccagaattccttgggaggaaatgcaaagacacgtattatctgcacaattactccagtatcttttgatgaaacacttactgctctccagtttgccagtactgctaaatatatgaagaatactccttatgttaatgaggtatcaactgatgaagctctcctgaaaaggtatagaaaagaaataatggatcttaaaaaacaattagaggaggtttctttagagacgcgggctcaggcaatggaaaaagaccaattggcccaacttttggaagaaaaagatttgcttcagaaagtacagaatgagaaaattgaaaacttaacacggatgctggtgacctcttcttccctcacgttgcaacaggaattaaaggctaaaagaaaacgaagagttacttggtgccttggcaaaattaacaaaatgaagaactcaaactatgcagatcaatttaatataccaacaaatataacaacaaaaacacataagctttctataaatttattacgagaaattgatgaatctgtctgttcagagtctgatgttttcagtaacactcttgatacattaagtgagatagaatggaatccagcaacaaagctactaaatcaggagaatatagaaagtgagttgaactcacttcgtgctgactatgataatctggtattagactatgaacaactacgaacagaaaaagaagaaatggaattgaaattaaaagaaaagaatgatttggatgaatttgaggctctagaaagaaaaactaaaaaagatcaagagatgcaactaattcatgaaatttcgaacttaaagaatttagttaagcatgcagaagtatataatcaagatcttgagaatgaactcagttcaaaagtagagctgcttagagaaaaggaagaccagattaagaagctacaggaatacatagactctcaaaagctagaaaatataaaaatggacttgtcatactcattggaaagcattgaagacccaaaacaaatgaagcagactctgtttgatgctgaaactgtagcccttgatgccaagagagaatcagcctttcttagaagtgaaaatctggagctgaaggagaaaatgaaagaacttgcaactacatacaagcaaatggaaaatgatattcagttatatcaaagccagttggaggcaaaaaagaaaatgcaagttgatctggagaaagaattacaatctgcttttaatgagataacaaaactcacctcccttatagatggcaaagttccaaaagatttgctctgtaatttggaattggaaggaaagattactgatcttcagaaagaactaaataaagaagttgaagaaaatgaagctttgcgggaagaagtcattttgctttcagaattgaaatctttaccttctgaagtagaaaggctgaggaaagagatacaagacaaatctgaagagctccatataataacatcagaaaaagataaattgttttctgaagtagttcataaggagagtagagttcaaggtttacttgaagaaattgggaaaacaaaagatgacctagcaactacacagtcgaattataaaagcactgatcaagaattccaaaatttcaaaacccttcatatggactttgagcaaaagtataagatggtccttgaggagaatgagagaatgaatcaggaaatagttaatctctctaaagaagcccaaaaatttgattcgagtttgggtgctttgaagaccgagctttcttacaagacccaagaacttcaggagaaaacacgtgaggttcaagaaagactaaatgagatggaacagctgaaggaacaattagaaaatagagattctacgctgcaaactgtagaaagggagaaaacactgattactgagaaactgcagcaaactttagaagaagtaaaaactttaactcaagaaaaagatgatctaaaacaactccaagaaagcttgcaaattgagagggaccaactcaaaagtgatattcacgatactgttaacatgaatatagatactcaagaacaattacgaaatgctcttgagtctctgaaacaacatcaagaaacaattaatacactaaaatcgaaaatttctgaggaagtttccaggaatttgcatatggaggaaaatacaggagaaactaaagatgaatttcagcaaaagatggttggcatagataaaaaacaggatttggaagctaaaaatacccaaacactaactgcagatgttaaggataatgagataattgagcaacaaaggaagatattttctttaatacaggagaaaaatgaactccaacaaatgttagagagtgttatagcagaaaaggaacaattgaagactgacctaaaggaaaatattgaaatgaccattgaaaaccaggaagaattaagacttcttggggatgaacttaaaaagcaacaagagatagttgcacaagaaaagaaccatgccataaagaaagaaggagagctttctaggacctgtgacagactggcagaagttgaagaaaaactaaaggaaaagagccagcaactccaagaaaaacagcaacaacttcttaatgtacaagaagagatgagtgagatgcagaaaaagattaatgaaatagagaatttaaagaatgaattaaagaacaaagaattgacattggaacatatggaaacagagaggcttgagttggctcagaaacttaatgaaaattatgaggaagtgaaatctataaccaaagaaagaaaagttctaaaggaattacagaagtcatttgaaacagagagagaccaccttagaggatatataagagaaattgaagctacaggcctacaaaccaaagaagaactaaaaattgctcatattcacctaaaagaacaccaagaaactattgatgaactaagaagaagcgtatctgagaagacagctcaaataataaatactcaggacttagaaaaatcccataccaaattacaagaagagatcccagtgcttcatgaggaacaagagttactgcctaatgtgaaagaagtcagtgagactcaggaaacaatgaatgaactggagttattaacagaacagtccacaaccaaggactcaacaacactggcaagaatagaaatggaaaggctcaggttgaatgaaaaatttcaagaaagtcaggaagagataaaatctctaaccaaggaaagagacaaccttaaaacgataaaagaagcccttgaagttaaacatgaccagctgaaagaacatattagagaaactttggctaaaatccaggagtctcaaagcaaacaagaacagtccttaaatatgaaagaaaaagacaatgaaactaccaaaatcgtgagtgagatggagcaattcaaacccaaagattcagcactactaaggatagaaatagaaatgctcggattgtccaaaagacttcaagaaagtcatgatgaaatgaaatctgtagctaaggagaaagatgacctacagaggctgcaagaagttcttcaatctgaaagtgaccagctcaaagaaaacataaaagaaattgtagctaaacacctggaaactgaagaggaacttaaagttgctcattgttgcctgaaagaacaagaggaaactattaatgagttaagagtgaatctttcagagaaggaaactgaaatatcaaccattcaaaagcagttagaagcaatcaatgataaattacagaacaagatccaagagatttatgagaaagaggaacaatttaatataaaacaaattagtgaggttcaggaaaaagtgaatgaactgaaacaattcaaggagcatcgcaaagccaaggattcagcactacaaagtatagaaagtaagatgctcgagttgaccaacagacttcaagaaagtcaagaagaaatacaaattatgattaaggaaaaagaggaaatgaaaagagtacaggaggcccttcagatagagagagaccaactgaaagaaaacactaaagaaattgtagctaaaatgaaagaatctcaagaaaaagaatatcagtttcttaagatgacagctgtcaatgagactcaggagaaaatgtgtgaaatagaacacttgaaggagcaatttgagacccagaagttaaacctggaaaacatagaaacggagaatataaggttgactcagatactacatgaaaaccttgaagaaatgagatctgtaacaaaagaaagagatgaccttaggagtgtggaggagactctcaaagtagagagagaccagctcaaggaaaaccttagagaaactataactagagacctagaaaaacaagaggagctaaaaattgttcacatgcatctgaaggagcaccaagaaactattgataaactaagagggattgtttcagagaaaacaaatgaaatatcaaatatgcaaaaggacttagaacactcaaatgatgccttaaaagcacaggatctgaaaatacaagaggaactaagaattgctcacatgcatctgaaagagcagcaggaaactattgacaaactcagaggaattgtttctgagaagacagataaactatcaaatatgcaaaaagatttagaaaattcaaatgctaaattacaagaaaagattcaagaacttaaggcaaatgaacatcaacttattacgttaaaaaaagatgtcaatgagacacagaaaaaagtgtctgaaatggagcaactaaagaaacaaataaaagaccaaagcttaactctgagtaaattagaaatagagaatttaaatttggctcagaaacttcatgaaaaccttgaagaaatgaaatctgtaatgaaagaaagagataatctaagaagagtagaggagacactcaaactggagagagaccaactcaaggaaagcctgcaagaaaccaaagctagagatctggaaatacaacaggaactaaaaactgctcgtatgctatcaaaagaacacaaagaaactgttgataaacttagagaaaaaatttcagaaaagacaattcaaatttcagacattcaaaaggatttagataaatcaaaagatgaattacagaaaaagatccaagaacttcagaaaaaagaacttcaactgcttagagtgaaagaagatgtcaatatgagtcataaaaaaattaatgaaatggaacagttgaagaagcaatttgaggcccaaaacttatctatgcaaagtgtgagaatggataacttccagttgactaagaaacttcatgaaagccttgaagaaataagaattgtagctaaagaaagagatgagctaaggaggataaaagaatctctcaaaatggaaagggaccaattcatagcaaccttaagggaaatgatagctagagaccgacagaaccaccaagtaaaacctgaaaaaaggttactaagtgatggacaacagcaccttacggaaagcctgagagaaaagtgctctagaataaaagagcttttgaagagatactcagagatggatgatcattatgagtgcttgaatagattgtctcttgacttggagaaggaaattgaattccacagaatcatgaagaaactgaagtatgtgttaagctatgttacaaaaataaaagaagaacaacatgaatccatcaataaatttgaaatggattttattgatgaagtggaaaagcaaaaggaattgctaattaaaatacagcaccttcaacaagattgtgatgtaccatccagagaattaagggatctcaaattgaaccagaatatggatctacatattgaggaaattctcaaagatttctcagaaagtgagttccctagcataaagactgaatttcaacaagtactaagtaataggaaagaaatgacacagtttttggaagagtggttaaatactcgttttgatatagaaaagcttaaaaatggcatccagaaagaaaatgataggatttgtcaagtgaataacttctttaataacagaataattgccataatgaatgaatcaacagagtttgaggaaagaagtgctaccatatccaaagagtgggaacaggacctgaaatcactgaaagagaaaaatgaaaaactatttaaaaactaccaaacattgaagacttccttggcatctggtgcccaggttaatcctaccacacaagacaataagaatcctcatgttacatcaagagctacacagttaaccacagagaaaattcgagagctggaaaattcactgcatgaagctaaagaaagtgctatgcataaggaaagcaagattataaagatgcagaaagaacttgaggtgactaatgacataatagcaaaacttcaagccaaagttcatgaatcaaataaatgccttgaaaaaacaaaagagacaattcaagtacttcaggacaaagttgctttaggagctaagccatataaagaagaaattgaagatctcaaaatgaagcttgtgaaaatagacctagagaaaatgaaaaatgccaaagaatttgaaaaggaaatcagtgctacaaaagccactgtagaatatcaaaaggaagttataaggctattgagagaaaatctcagaagaagtcaacaggcccaagatacctcagtgatatcagaacatactgatcctcagccttcaaataaacccttaacttgtggaggtggcagcggcattgtacaaaacacaaaagctcttattttgaaaagtgaacatataaggctagaaaaagaaatttctaagttaaagcagcaaaatgaacagctaataaaacaaaagaatgaattgttaagcaataatcagcatctttccaatgaggtcaaaacttggaaggaaagaacccttaaaagagaggctcacaaacaagtaacttgtgagaattctccaaagtctcctaaagtgactggaacagcttctaaaaagaaacaaattacaccctctcaatgcaaggaacggaatttacaagatcctgtgccaaaggaatcaccaaaatcttgtttttttgatagccgatcaaagtctttaccatcacctcatccagttcgctattttgataactcaagtttaggcctttgtccagaggtgcaaaatgcaggagcagagagtgtggattctcagccaggtccttggcacgcctcctcaggcaaggatgtgcctgagtgcaaaactcagtagactcctctttgtcacttctctggagatccagcattccttatttggaaatgactttgtttatgtgtctatccctggtaatgatgttgtagtgcagcttaatttcaattcagtctttactttgccactagagttgaaagataagggaacaggaaatgaatgcattgtggtaatttagaatggtgatagcaataccttcttcttgcatatggtaatacttttaaaagttgaattgttttatttatttgtatattttgtaaagaataaagttattgaaagaaatgtaaagttatctacatgacttagcatattccaaagcataatacatacattaatataaaacatcattttattaacaaaattgtaaatgtttttaataccttacacattcaataaatgtttagtagttctgaatcacc

SEQ ID NO: 121263 - DNA, 8106 bp, Artificial Sequence
  derived and/or modified sequence
atggccgaggagggcgccgtggccgtgtgcgtgagagtgagacccctgaacagcagagaggagagcctgggcgagaccgcccaggtgtactggaagaccgacaacaacgtgatctaccaggtggacggcagcaagagcttcaacttcgacagagtgttccacggcaacgagaccaccaagaacgtgtacgaggagatcgccgcccccatcatcgacagcgccatccagggctacaacggcaccatcttcgcctacggccagaccgccagcggcaagacctacaccatgatgggcagcgaggaccacctgggcgtgatccccagagccatccacgacatcttccagaagatcaagaagttccccgacagagagttcctgctgagagtgagctacatggagatctacaacgagaccatcaccgacctgctgtgcggcacccagaagatgaagcccctgatcatcagagaggacgtgaacagaaacgtgtacgtggccgacctgaccgaggaggtggtgtacaccagcgagatggccctgaagtggatcaccaagggcgagaagagcagacactacggcgagaccaagatgaaccagagaagcagcagaagccacaccatcttcagaatgatcctggagagcagagagaagggcgagcccagcaactgcgagggcagcgtgaaggtgagccacctgaacctggtggacctggccggcagcgagagagccgcccagaccggcgccgccggcgtgagactgaaggagggctgcaacatcaacagaagcctgttcatcctgggccaggtgatcaagaagctgagcgacggccaggtgggcggcttcatcaactacagagacagcaagctgaccagaatcctgcagaacagcctgggcggcaacgccaagaccagaatcatctgcaccatcacccccgtgagcttcgacgagaccctgaccgccctgcagttcgccagcaccgccaagtacatgaagaacaccccctacgtgaacgaggtgagcaccgacgaggccctgctgaagagatacagaaaggagatcatggacctgaagaagcagctggaggaggtgagcctggagaccagagcccaggccatggagaaggaccagctggcccagctgctggaggagaaggacctgctgcagaaggtgcagaacgagaagatcgagaacctgaccagaatgctggtgaccagcagcagcctgaccctgcagcaggagctgaaggccaagagaaagagaagagtgacctggtgcctgggcaagatcaacaagatgaagaacagcaactacgccgaccagttcaacatccccaccaacatcaccaccaagacccacaagctgagcatcaacctgctgagagagatcgacgagagcgtgtgcagcgagagcgacgtgttcagcaacaccctggacaccctgagcgagatcgagtggaaccccgccaccaagctgctgaaccaggagaacatcgagagcgagctgaacagcctgagagccgactacgacaacctggtgctggactacgagcagctgagaaccgagaaggaggagatggagctgaagctgaaggagaagaacgacctggacgagttcgaggccctggagagaaagaccaagaaggaccaggagatgcagctgatccacgagatcagcaacctgaagaacctggtgaagcacgccgaggtgtacaaccaggacctggagaacgagctgagcagcaaggtggagctgctgagagagaaggaggaccagatcaagaagctgcaggagtacatcgacagccagaagctggagaacatcaagatggacctgagctacagcctggagagcatcgaggaccccaagcagatgaagcagaccctgttcgacgccgagaccgtggccctggacgccaagagagagagcgccttcctgagaagcgagaacctggagctgaaggagaagatgaaggagctggccaccacctacaagcagatggagaacgacatccagctgtaccagagccagctggaggccaagaagaagatgcaggtggacctggagaaggagctgcagagcgccttcaacgagatcaccaagctgaccagcctgatcgacggcaaggtgcccaaggacctgctgtgcaacctggagctggagggcaagatcaccgacctgcagaaggagctgaacaaggaggtggaggagaacgaggccctgagagaggaggtgatcctgctgagcgagctgaagagcctgcccagcgaggtggagagactgagaaaggagatccaggacaagagcgaggagctgcacatcatcaccagcgagaaggacaagctgttcagcgaggtggtgcacaaggagagcagagtgcagggcctgctggaggagatcggcaagaccaaggacgacctggccaccacccagagcaactacaagagcaccgaccaggagttccagaacttcaagaccctgcacatggacttcgagcagaagtacaagatggtgctggaggagaacgagagaatgaaccaggagatcgtgaacctgagcaaggaggcccagaagttcgacagcagcctgggcgccctgaagaccgagctgagctacaagacccaggagctgcaggagaagaccagagaggtgcaggagagactgaacgagatggagcagctgaaggagcagctggagaacagagacagcaccctgcagaccgtggagagagagaagaccctgatcaccgagaagctgcagcagaccctggaggaggtgaagaccctgacccaggagaaggacgacctgaagcagctgcaggagagcctgcagatcgagagagaccagctgaagagcgacatccacgacaccgtgaacatgaacatcgacacccaggagcagctgagaaacgccctggagagcctgaagcagcaccaggagaccatcaacaccctgaagagcaagatcagcgaggaggtgagcagaaacctgcacatggaggagaacaccggcgagaccaaggacgagttccagcagaagatggtgggcatcgacaagaagcaggacctggaggccaagaacacccagaccctgaccgccgacgtgaaggacaacgagatcatcgagcagcagagaaagatcttcagcctgatccaggagaagaacgagctgcagcagatgctggagagcgtgatcgccgagaaggagcagctgaagaccgacctgaaggagaacatcgagatgaccatcgagaaccaggaggagctgagactgctgggcgacgagctgaagaagcagcaggagatcgtggcccaggagaagaaccacgccatcaagaaggagggcgagctgagcagaacctgcgacagactggccgaggtggaggagaagctgaaggagaagagccagcagctgcaggagaagcagcagcagctgctgaacgtgcaggaggagatgagcgagatgcagaagaagatcaacgagatcgagaacctgaagaacgagctgaagaacaaggagctgaccctggagcacatggagaccgagagactggagctggcccagaagctgaacgagaactacgaggaggtgaagagcatcaccaaggagagaaaggtgctgaaggagctgcagaagagcttcgagaccgagagagaccacctgagaggctacatcagagagatcgaggccaccggcctgcagaccaaggaggagctgaagatcgcccacatccacctgaaggagcaccaggagaccatcgacgagctgagaagaagcgtgagcgagaagaccgcccagatcatcaacacccaggacctggagaagagccacaccaagctgcaggaggagatccccgtgctgcacgaggagcaggagctgctgcccaacgtgaaggaggtgagcgagacccaggagaccatgaacgagctggagctgctgaccgagcagagcaccaccaaggacagcaccaccctggccagaatcgagatggagagactgagactgaacgagaagttccaggagagccaggaggagatcaagagcctgaccaaggagagagacaacctgaagaccatcaaggaggccctggaggtgaagcacgaccagctgaaggagcacatcagagagaccctggccaagatccaggagagccagagcaagcaggagcagagcctgaacatgaaggagaaggacaacgagaccaccaagatcgtgagcgagatggagcagttcaagcccaaggacagcgccctgctgagaatcgagatcgagatgctgggcctgagcaagagactgcaggagagccacgacgagatgaagagcgtggccaaggagaaggacgacctgcagagactgcaggaggtgctgcagagcgagagcgaccagctgaaggagaacatcaaggagatcgtggccaagcacctggagaccgaggaggagctgaaggtggcccactgctgcctgaaggagcaggaggagaccatcaacgagctgagagtgaacctgagcgagaaggagaccgagatcagcaccatccagaagcagctggaggccatcaacgacaagctgcagaacaagatccaggagatctacgagaaggaggagcagttcaacatcaagcagatcagcgaggtgcaggagaaggtgaacgagctgaagcagttcaaggagcacagaaaggccaaggacagcgccctgcagagcatcgagagcaagatgctggagctgaccaacagactgcaggagagccaggaggagatccagatcatgatcaaggagaaggaggagatgaagagagtgcaggaggccctgcagatcgagagagaccagctgaaggagaacaccaaggagatcgtggccaagatgaaggagagccaggagaaggagtaccagttcctgaagatgaccgccgtgaacgagacccaggagaagatgtgcgagatcgagcacctgaaggagcagttcgagacccagaagctgaacctggagaacatcgagaccgagaacatcagactgacccagatcctgcacgagaacctggaggagatgagaagcgtgaccaaggagagagacgacctgagaagcgtggaggagaccctgaaggtggagagagaccagctgaaggagaacctgagagagaccatcaccagagacctggagaagcaggaggagctgaagatcgtgcacatgcacctgaaggagcaccaggagaccatcgacaagctgagaggcatcgtgagcgagaagaccaacgagatcagcaacatgcagaaggacctggagcacagcaacgacgccctgaaggcccaggacctgaagatccaggaggagctgagaatcgcccacatgcacctgaaggagcagcaggagaccatcgacaagctgagaggcatcgtgagcgagaagaccgacaagctgagcaacatgcagaaggacctggagaacagcaacgccaagctgcaggagaagatccaggagctgaaggccaacgagcaccagctgatcaccctgaagaaggacgtgaacgagacccagaagaaggtgagcgagatggagcagctgaagaagcagatcaaggaccagagcctgaccctgagcaagctggagatcgagaacctgaacctggcccagaagctgcacgagaacctggaggagatgaagagcgtgatgaaggagagagacaacctgagaagagtggaggagaccctgaagctggagagagaccagctgaaggagagcctgcaggagaccaaggccagagacctggagatccagcaggagctgaagaccgccagaatgctgagcaaggagcacaaggagaccgtggacaagctgagagagaagatcagcgagaagaccatccagatcagcgacatccagaaggacctggacaagagcaaggacgagctgcagaagaagatccaggagctgcagaagaaggagctgcagctgctgagagtgaaggaggacgtgaacatgagccacaagaagatcaacgagatggagcagctgaagaagcagttcgaggcccagaacctgagcatgcagagcgtgagaatggacaacttccagctgaccaagaagctgcacgagagcctggaggagatcagaatcgtggccaaggagagagacgagctgagaagaatcaaggagagcctgaagatggagagagaccagttcatcgccaccctgagagagatgatcgccagagacagacagaaccaccaggtgaagcccgagaagagactgctgagcgacggccagcagcacctgaccgagagcctgagagagaagtgcagcagaatcaaggagctgctgaagagatacagcgagatggacgaccactacgagtgcctgaacagactgagcctggacctggagaaggagatcgagttccagaaggagctgagcatgagagtgaaggccaacctgagcctgccctacctgcagaccaagcacatcgagaagctgttcaccgccaaccagagatgcagcatggagttccacagaatcatgaagaagctgaagtacgtgctgagctacgtgaccaagatcaaggaggagcagcacgagagcatcaacaagttcgagatggacttcatcgacgaggtggagaagcagaaggagctgctgatcaagatccagcacctgcagcaggactgcgacgtgcccagcagagagctgagagacctgaagctgaaccagaacatggacctgcacatcgaggagatcctgaaggacttcagcgagagcgagttccccagcatcaagaccgagttccagcaggtgctgagcaacagaaaggagatgacccagttcctggaggagtggctgaacaccagattcgacatcgagaagctgaagaacggcatccagaaggagaacgacagaatctgccaggtgaacaacttcttcaacaacagaatcatcgccatcatgaacgagagcaccgagttcgaggagagaagcgccaccatcagcaaggagtgggagcaggacctgaagagcctgaaggagaagaacgagaagctgttcaagaactaccagaccctgaagaccagcctggccagcggcgcccaggtgaaccccaccacccaggacaacaagaacccccacgtgaccagcagagccacccagctgaccaccgagaagatcagagagctggagaacagcctgcacgaggccaaggagagcgccatgcacaaggagagcaagatcatcaagatgcagaaggagctggaggtgaccaacgacatcatcgccaagctgcaggccaaggtgcacgagagcaacaagtgcctggagaagaccaaggagaccatccaggtgctgcaggacaaggtggccctgggcgccaagccctacaaggaggagatcgaggacctgaagatgaagctggtgaagatcgacctggagaagatgaagaacgccaaggagttcgagaaggagatcagcgccaccaaggccaccgtggagtaccagaaggaggtgatcagactgctgagagagaacctgagaagaagccagcaggcccaggacaccagcgtgatcagcgagcacaccgacccccagcccagcaacaagcccctgacctgcggcggcggcagcggcatcgtgcagaacaccaaggccctgatcctgaagagcgagcacatcagactggagaaggagatcagcaagctgaagcagcagaacgagcagctgatcaagcagaagaacgagctgctgagcaacaaccagcacctgagcaacgaggtgaagacctggaaggagagaaccctgaagagagaggcccacaagcaggtgacctgcgagaacagccccaagagccccaaggtgaccggcaccgccagcaagaagaagcagatcacccccagccagtgcaaggagagaaacctgcaggaccccgtgcccaaggagagccccaagagctgcttcttcgacagcagaagcaagagcctgcccagcccccaccccgtgagatacttcgacaacagcagcctgggcctgtgccccgaggtgcagaacgccggcgccgagagcgtggacagccagcccggcccctggcacgccagcagcggcaaggacgtgcccgagtgcaagacccagtag

SEQ ID NO: 121264 - DNA, 7038 bp, Artificial Sequence
  derived and/or modified sequence
atggccgaggagggcgccgtggccgtgtgcgtgagagtgagacccctgaacagcagagaggagagcctgggcgagaccgcccaggtgtactggaagaccgacaacaacgtgatctaccaggtggacggcagcaagagcttcaacttcgacagagtgttccacggcaacgagaccaccaagaacgtgtacgaggagatcgccgcccccatcatcgacagcgccatccagggctacaacggcaccatcttcgcctacggccagaccgccagcggcaagacctacaccatgatgggcagcgaggaccacctgggcgtgatccccagagccatccacgacatcttccagaagatcaagaagttccccgacagagagttcctgctgagagtgagctacatggagatctacaacgagaccatcaccgacctgctgtgcggcacccagaagatgaagcccctgatcatcagagaggacgtgaacagaaacgtgtacgtggccgacctgaccgaggaggtggtgtacaccagcgagatggccctgaagtggatcaccaagggcgagaagagcagacactacggcgagaccaagatgaaccagagaagcagcagaagccacaccatcttcagaatgatcctggagagcagagagaagggcgagcccagcaactgcgagggcagcgtgaaggtgagccacctgaacctggtggacctggccggcagcgagagagccgcccagaccggcgccgccggcgtgagactgaaggagggctgcaacatcaacagaagcctgttcatcctgggccaggtgatcaagaagctgagcgacggccaggtgggcggcttcatcaactacagagacagcaagctgaccagaatcctgcagaacagcctgggcggcaacgccaagaccagaatcatctgcaccatcacccccgtgagcttcgacgagaccctgaccgccctgcagttcgccagcaccgccaagtacatgaagaacaccccctacgtgaacgaggtgagcaccgacgaggccctgctgaagagatacagaaaggagatcatggacctgaagaagcagctggaggaggtgagcctggagaccagagcccaggccatggagaaggaccagctggcccagctgctggaggagaaggacctgctgcagaaggtgcagaacgagaagatcgagaacctgaccagaatgctggtgaccagcagcagcctgaccctgcagcaggagctgaaggccaagagaaagagaagagtgacctggtgcctgggcaagatcaacaagatgaagaacagcaactacgccgaccagttcaacatccccaccaacatcaccaccaagacccacaagctgagcatcaacctgctgagagagatcgacgagagcgtgtgcagcgagagcgacgtgttcagcaacaccctggacaccctgagcgagatcgagtggaaccccgccaccaagctgctgaaccaggagaacatcgagagcgagctgaacagcctgagagccgactacgacaacctggtgctggactacgagcagctgagaaccgagaaggaggagatggagctgaagctgaaggagaagaacgacctggacgagttcgaggccctggagagaaagaccaagaaggaccaggagatgcagctgatccacgagatcagcaacctgaagaacctggtgaagcacgccgaggtgtacaaccaggacctggagaacgagctgagcagcaaggtggagctgctgagagagaaggaggaccagatcaagaagctgcaggagtacatcgacagccagaagctggagaacatcaagatggacctgagctacagcctggagagcatcgaggaccccaagcagatgaagcagaccctgttcgacgccgagaccgtggccctggacgccaagagagagagcgccttcctgagaagcgagaacctggagctgaaggagaagatgaaggagctggccaccacctacaagcagatggagaacgacatccagctgtaccagagccagctggaggccaagaagaagatgcaggtggacctggagaaggagctgcagagcgccttcaacgagatcaccaagctgaccagcctgatcgacggcaaggtgcccaaggacctgctgtgcaacctggagctggagggcaagatcaccgacctgcagaaggagctgaacaaggaggtggaggagaacgaggccctgagagaggaggtgatcctgctgagcgagctgaagagcctgcccagcgaggtggagagactgagaaaggagatccaggacaagagcgaggagctgcacatcatcaccagcgagaaggacaagctgttcagcgaggtggtgcacaaggagagcagagtgcagggcctgctggaggagatcggcaagaccaaggacgacctggccaccacccagagcaactacaagagcaccgaccaggagttccagaacttcaagaccctgcacatggacttcgagcagaagtacaagatggtgctggaggagaacgagagaatgaaccaggagatcgtgaacctgagcaaggaggcccagaagttcgacagcagcctgggcgccctgaagaccgagctgagctacaagacccaggagctgcaggagaagaccagagaggtgcaggagagactgaacgagatggagcagctgaaggagcagctggagaacagagacagcaccctgcagaccgtggagagagagaagaccctgatcaccgagaagctgcagcagaccctggaggaggtgaagaccctgacccaggagaaggacgacctgaagcagctgcaggagagcctgcagatcgagagagaccagctgaagagcgacatccacgacaccgtgaacatgaacatcgacacccaggagcagctgagaaacgccctggagagcctgaagcagcaccaggagaccatcaacaccctgaagagcaagatcagcgaggaggtgagcagaaacctgcacatggaggagaacaccggcgagaccaaggacgagttccagcagaagatggtgggcatcgacaagaagcaggacctggaggccaagaacacccagaccctgaccgccgacgtgaaggacaacgagatcatcgagcagcagagaaagatcttcagcctgatccaggagaagaacgagctgcagcagatgctggagagcgtgatcgccgagaaggagcagctgaagaccgacctgaaggagaacatcgagatgaccatcgagaaccaggaggagctgagactgctgggcgacgagctgaagaagcagcaggagatcgtggcccaggagaagaaccacgccatcaagaaggagggcgagctgagcagaacctgcgacagactggccgaggtggaggagaagctgaaggagaagagccagcagctgcaggagaagcagcagcagctgctgaacgtgcaggaggagatgagcgagatgcagaagaagatcaacgagatcgagaacctgaagaacgagctgaagaacaaggagctgaccctggagcacatggagaccgagagactggagctggcccagaagctgaacgagaactacgaggaggtgaagagcatcaccaaggagagaaaggtgctgaaggagctgcagaagagcttcgagaccgagagagaccacctgagaggctacatcagagagatcgaggccaccggcctgcagaccaaggaggagctgaagatcgcccacatccacctgaaggagcaccaggagaccatcgacgagctgagaagaagcgtgagcgagaagaccgcccagatcatcaacacccaggacctggagaagagccacaccaagctgcaggaggagatccccgtgctgcacgaggagcaggagctgctgcccaacgtgaaggaggtgagcgagacccaggagaccatgaacgagctggagctgctgaccgagcagagcaccaccaaggacagcaccaccctggccagaatcgagatggagagactgagactgaacgagaagttccaggagagccaggaggagatcaagagcctgaccaaggagagagacaacctgaagaccatcaaggaggccctggaggtgaagcacgaccagctgaaggagcacatcagagagaccctggccaagatccaggagagccagagcaagcaggagcagagcctgaacatgaaggagaaggacaacgagaccaccaagatcgtgagcgagatggagcagttcaagcccaaggacagcgccctgctgagaatcgagatcgagatgctgggcctgagcaagagactgcaggagagccacgacgagatgaagagcgtggccaaggagaaggacgacctgcagagactgcaggaggtgctgcagagcgagagcgaccagctgaaggagaacatcaaggagatcgtggccaagcacctggagaccgaggaggagctgaaggtggcccactgctgcctgaaggagcaggaggagaccatcaacgagctgagagtgaacctgagcgagaaggagaccgagatcagcaccatccagaagcagctggaggccatcaacgacaagctgcagaacaagatccaggagatctacgagaaggaggagcagttcaacatcaagcagatcagcgaggtgcaggagaaggtgaacgagctgaagcagttcaaggagcacagaaaggccaaggacagcgccctgcagagcatcgagagcaagatgctggagctgaccaacagactgcaggagagccaggaggagatccagatcatgatcaaggagaaggaggagatgaagagagtgcaggaggccctgcagatcgagagagaccagctgaaggagaacaccaaggagatcgtggccaagatgaaggagagccaggagaaggagtaccagttcctgaagatgaccgccgtgaacgagacccaggagaagatgtgcgagatcgagcacctgaaggagcagttcgagacccagaagctgaacctggagaacatcgagaccgagaacatcagactgacccagatcctgcacgagaacctggaggagatgagaagcgtgaccaaggagagagacgacctgagaagcgtggaggagaccctgaaggtggagagagaccagctgaaggagaacctgagagagaccatcaccagagacctggagaagcaggaggagctgaagatcgtgcacatgcacctgaaggagcaccaggagaccatcgacaagctgagaggcatcgtgagcgagaagaccaacgagatcagcaacatgcagaaggacctggagcacagcaacgacgccctgaaggcccaggacctgaagatccaggaggagctgagaatcgcccacatgcacctgaaggagcagcaggagaccatcgacaagctgagaggcatcgtgagcgagaagaccgacaagctgagcaacatgcagaaggacctggagaacagcaacgccaagctgcaggagaagatccaggagctgaaggccaacgagcaccagctgatcaccctgaagaaggacgtgaacgagacccagaagaaggtgagcgagatggagcagctgaagaagcagatcaaggaccagagcctgaccctgagcaagctggagatcgagaacctgaacctggcccagaagctgcacgagaacctggaggagatgaagagcgtgatgaaggagagagacaacctgagaagagtggaggagaccctgaagctggagagagaccagctgaaggagagcctgcaggagaccaaggccagagacctggagatccagcaggagctgaagaccgccagaatgctgagcaaggagcacaaggagaccgtggacaagctgagagagaagatcagcgagaagaccatccagatcagcgacatccagaaggacctggacaagagcaaggacgagctgcagaagaagatccaggagctgcagaagaaggagctgcagctgctgagagtgaaggaggacgtgaacatgagccacaagaagatcaacgagatggagcagctgaagaagcagttcgaggcccagaacctgagcatgcagagcgtgagaatggacaacttccagctgaccaagaagctgcacgagagcctggaggagatcagaatcgtggccaaggagagagacgagctgagaagaatcaaggagagcctgaagatggagagagaccagttcatcgccaccctgagagagatgatcgccagagacagacagaaccaccaggtgaagcccgagaagagactgctgagcgacggccagcagcacctgaccgagagcctgagagagaagtgcagcagaatcaaggagctgctgaagagatacagcgagatggacgaccactacgagtgcctgaacagactgagcctggacctggagaaggagatcgagttccacagaatcatgaagaagctgaagtacgtgctgagctacgtgaccaagatcaaggaggagcagcacgagagcatcaacaagttcgagatggacttcatcgacgaggtggagaagcagaaggagctgctgatcaagatccagcacctgcagcaggactgcgacgtgcccagcagagagctgagagacctgaagctgaaccagaacatggacctgcacatcgaggagatcctgaaggacttcagcgagagcgagttccccagcatcaagaccgagttccagcaggtgctgagcaacagaaaggagatgacccagttcctggaggagtggctgaacaccagattcgacatcgagaagctgaagaacggcatccagaaggagaacgacagaatctgccaggtgaacaacttcttcaacaacagaatcatcgccatcatgaacgagagcaccgagttcgaggagagaagcgccaccatcagcaaggagtgggagcaggacctgaagagcctgaaggagaagaacgagaagctgttcaagaactaccagaccctgaagaccagcctggccagcggcgcccaggtgaaccccaccacccaggacaacaagaacccccacgtgaccagcagagccacccagctgaccaccgagtag

SEQ ID NO: 121265 - protein, 463 aa, Artificial Sequence
  derived and/or modified sequence
MGAGPSLLLAALLLLLSGDGAVRCDTPANCTYLDLLGTWVFQVGSSGSQRDVNCSVMGPQEKKVVVYLQKLDTAYDDLGNSGHFTIIYNQGFEIVLNDYKWFAFFKYKEEGSKVTTYCNETMTGWVHDVLGRNWACFTGKKVGTASENVYVNIAHLKNSQEKYSNRLYKYDHNFVKAINAIQKSWTATTYMEYETLTLGDMIRRSGGHSRKIPRPKPAPLTAEIQQKILHLPTSWDWRNVHGINFVSPVRNQASCGSCYSFASMGMLEARIRILTNNSQTPILSPQEVVSCSQYAQGCEGGFPYLIAGKYAQDFGLVEEACFPYTGTDSPCKMKEDCFRYYSSEYHYVGGFYGGCNEALMKLELVHHGPMAVAFEVYDDFLHYKKGIYHHTGLRDPFNPFELTNHAVLLVGYGTDSASGMDYWIVKNSWGTGWGENGYFRIRRGTDECAIESIAVAATPIPKL

SEQ ID NO: 121266 - protein, 446 aa, Artificial Sequence
  derived and/or modified sequence
MGAGPSCDTPANCTYLDLLGTWVFQVGSSGSQRDVNCSVMGPQEKKVVVYLQKLDTAYDDLGNSGHFTIIYNQGFEIVLNDYKWFAFFKYKEEGSKVTTYCNETMTGWVHDVLGRNWACFTGKKVGTASENVYVNIAHLKNSQEKYSNRLYKYDHNFVKAINAIQKSWTATTYMEYETLTLGDMIRRSGGHSRKIPRPKPAPLTAEIQQKILHLPTSWDWRNVHGINFVSPVRNQASCGSCYSFASMGMLEARIRILTNNSQTPILSPQEVVSCSQYAQGCEGGFPYLIAGKYAQDFGLVEEACFPYTGTDSPCKMKEDCFRYYSSEYHYVGGFYGGCNEALMKLELVHHGPMAVAFEVYDDFLHYKKGIYHHTGLRDPFNPFELTNHAVLLVGYGTDSASGMDYWIVKNSWGTGWGENGYFRIRRGTDECAIESIAVAATPIPKL

SEQ ID NO: 121267 - DNA, 1392 bp, Artificial Sequence
  derived and/or modified sequence
atgggtgctggtccctctctgctgctcgctgcgctgctgttgttgcttagcggtgatggcgccgtgcgctgcgacacgccagccaactgcacatatctcgacctcctggggacttgggtgttccaggtcggatcatcaggcagtcagcgcgacgtcaactgttctgttatgggaccccaggaaaagaaggttgtggtgtatctgcaaaaacttgataccgcctatgatgatctcggcaacagtggacattttacaatcatttacaaccagggtttcgaaattgtgctgaatgattataagtggtttgccttttttaagtataaagaggaggggtcaaaagtcaccacctactgcaatgaaactatgactggatgggttcacgacgtcctgggtagaaactgggcatgttttacaggcaaaaaggtcgggaccgccagtgagaacgtgtacgtcaacatagcccacctaaaaaatagtcaggagaaatactctaataggctgtacaagtacgatcataacttcgtcaaggcaattaatgctattcagaagtcatggaccgccaccacatacatggagtacgagactctgaccttgggcgatatgatccggagaagtggaggacatagtcggaaaatccctcgtcctaaaccagcccccctaactgcagaaatccagcagaagatattgcacctgccaacgtcctgggactggcgaaatgtccatggcatcaacttcgttagcccagtgaggaaccaggcgtcatgtggatcttgctactcctttgcctccatgggcatgctagaggcgcgaatccgtatcttgacaaacaactcacaaacaccaatactgagtccacaggaagtagtttcctgtagccagtatgcccagggttgcgaaggcgggtttccctacctgattgctggcaagtacgcccaggatttcggtctcgtggaagaagcctgctttccttataccggcaccgactccccctgtaaaatgaaagaagactgttttcggtactacagttcagagtatcactatgttggcggcttctatggagggtgcaatgaagctctgatgaaattggaactggtgcaccacggcccaatggctgtcgcttttgaggtgtacgatgattttctgcactacaaaaagggaatttaccatcacactgggcttcgcgacccttttaatccttttgaactcacaaaccacgccgttttgctggtcgggtacgggaccgacagcgcctccgggatggactattggatcgttaagaacagctggggtactggttggggagagaatggatactttcgcattagaaggggaaccgacgagtgcgccattgaaagcattgcagtcgctgcaaccccaatcccaaagctttag

SEQ ID NO: 121268 - DNA, 1392 bp, Artificial Sequence
  derived and/or modified sequence
atgggcgccggccccagcctgctgctggccgccctgctgctgctgctgtctggagatggagctgtgcgctgtgacaccccagccaactgcacctacctggacctgctgggcacctgggtgttccaggtgggcagcagcggcagccagagagatgtgaactgcagcgtgatgggcccccaggagaagaaggtggtggtgtacctgcagaagctggacacagcctatgatgacctgggcaacagcggccacttcaccatcatctacaaccagggctttgagatcgtgctgaatgactacaagtggtttgccttcttcaagtacaaggaggagggcagcaaggtgaccacctactgcaatgagaccatgacaggctgggtgcatgatgtgctgggcaggaactgggcctgcttcaccgggaagaaggtgggcacagcctctgaaaatgtgtatgtgaacatcgcccacctgaagaacagccaggagaagtacagcaacagactctacaagtatgaccacaactttgtgaaggccatcaatgccatccagaagtcctggacagccaccacctacatggagtatgagaccctgaccctgggggacatgatcagaagaagtggcggccacagcaggaagatcccccggcccaagccagcccccctgacagctgagatccagcagaagatcctgcacctgcccacctcctgggactggagaaatgtgcacggcatcaactttgtgtcccctgtgaggaaccaggccagctgtggcagctgctacagctttgcctccatgggcatgctggaggcccgcatccgcatcctgaccaacaacagccagacccccatcctgagcccccaggaggtggtgtcctgcagccagtatgcccagggctgtgagggcggcttcccctacctgattgctgggaagtatgcccaggactttggcctggtggaggaggcctgcttcccctacacaggaacagacagcccctgcaagatgaaggaggactgcttccgctactacagcagcgagtaccactacgtgggcggcttctacggcggctgcaatgaggccctgatgaagctggagctggtgcaccacggccccatggctgtggcctttgaggtgtatgatgacttcctgcactacaagaagggcatctaccaccacacaggcctgcgggaccccttcaacccctttgagctgaccaaccacgctgtgctgctggtgggctacggcacagacagcgccagcggcatggactactggatcgtgaagaacagctggggcaccggctggggagaaaatggctacttccgcatccggcggggcacagatgaatgtgccatcgagagcattgctgtggccgccacccccatccccaagctgtag

SEQ ID NO: 121269 - DNA, 1392 bp, Artificial Sequence
  derived and/or modified sequence
atgggcgccggccccagcctgctgctggccgccctgctgctgctgctgtcaggggacggagcggttagatgtgatacgcctgctaactgtacgtatctggatctgctgggcacatgggtgtttcaggtaggatcttcagggagccagcgtgacgtaaattgtagtgtgatggggcctcaagagaagaaggtggttgtttatcttcaaaaactcgataccgcatacgacgacctgggtaactctggtcacttcacaatcatctataatcagggattcgagatcgtattgaatgactacaagtggtttgccttctttaaatataaagaggaagggtctaaggtcacaacttactgtaatgaaacaatgacaggctgggtgcacgacgtgttagggcgtaattgggcctgctttactgggaagaaagtaggaaccgcctccgagaacgtgtatgtgaatattgcccacttaaagaactctcaggaaaagtatagtaataggctgtataagtacgaccataacttcgtgaaggccataaatgccatccaaaaaagttggaccgccaccacatacatggaatacgagaccctgactctgggagacatgatccggcggtccggcggacattcccgcaagatccccaggcccaaaccagccccactgacggcagagatccaacagaagattcttcatctgcctacctcatgggactggaggaacgttcatggtattaactttgtgagcccagtgcgcaatcaggcctcttgcggctcctgctacagttttgcttcgatgggcatgctggaggcccggatcaggattctgactaacaattctcagacacccattctgtcacctcaagaggttgtgagttgcagtcaatacgcgcagggatgcgaagggggctttccatacctcatagcagggaagtatgcccaggacttcggacttgtcgaagaggcatgcttcccctacaccggcaccgattcaccttgcaagatgaaggaggattgcttccggtattactcctcagagtatcactatgtggggggcttctacgggggatgcaatgaagcactcatgaaattggaactggtgcatcatggaccgatggcggtcgcctttgaagtgtacgatgattttctgcactacaaaaagggtatttaccaccataccgggctgcgagaccctttcaacccattcgaactgacaaaccacgctgtgttactcgtgggttacggaacggattccgctagcgggatggattattggatagttaaaaattcctggggaacgggctggggcgaaaatggctatttcagaatcaggagaggaaccgatgagtgcgcgattgagtcaatcgcagtcgctgccaccccgatcccaaagctttag

SEQ ID NO: 121270 - DNA, 1392 bp, Artificial Sequence
  derived and/or modified sequence
atgggagccggaccaagtctcctgcttgccgcactgcttctcctgttgagcggagacggcgctgtgaggtgcgatacccctgctaattgtacttacttggatttactcggcacctgggtgtttcaggtgggctcctccgggtctcagcgagacgtgaattgctccgtgatgggccctcaagaaaaaaaggttgtggtctacctgcaaaagcttgacacagcatacgatgatttgggaaacagtgggcactttacgattatatacaaccaggggttcgaaattgtgttgaatgactacaaatggttcgctttctttaagtataaggaggaaggcagcaaagtgaccacttactgtaacgaaactatgactgggtgggttcatgacgtccttggcaggaactgggcatgttttaccggtaagaaggtgggcaccgcttccgagaacgtatacgtgaatatcgcccacttaaaaaattcccaggagaagtactcaaatcgattatacaaatacgaccacaacttcgtgaaggcgattaatgccatccaaaagtcatggactgcaacaacatacatggaatacgagactctgaccctaggagatatgattcgtcggagtggaggtcactcgcgcaagattccgcgacccaagcctgccccattgacagccgagatccaacagaagatcttacatctgccaacttcgtgggattggcgcaacgtgcatggcattaacttcgtttcacccgtaagaaatcaggcgagttgtggcagttgctattcgttcgcatccatgggcatgctggaagctcgcatcagaatcttgaccaacaattcgcagacgcctatcctgagcccccaagaagtcgtcagctgctcgcagtatgctcaaggatgtgagggagggttcccatacctgattgctggtaagtacgcacaggactttggtctggtggaagaagcatgcttcccctacactggcaccgacagcccctgtaagatgaaggaggactgtttcaggtattattccagtgaatatcattacgtcgggggattttatggcggatgcaatgaggctctgatgaagctggaattggtccaccacggccctatggctgttgcattcgaggtgtacgacgatttcttgcattacaagaaagggatttaccatcacactggattgagagaccccttcaatccttttgagctcacaaatcatgccgtgcttctggtgggctatgggaccgacagtgcctccggaatggactattggatcgtgaagaatagctggggcaccggctggggtgagaatggctactttcgcattcggaggggtacagacgaatgtgccattgaatctatagcagtcgcagctactcccatccccaaattatag

SEQ ID NO: 121271 - DNA, 1392 bp, Artificial Sequence
  derived and/or modified sequence
atgggcgccggccccagcctgctgctggccgccctgctgctgctgctgagcggcgacggcgccgtgagatgcgacacccccgccaactgcacctacctggacctgctgggcacctgggtgttccaggtgggcagcagcggcagccagagagacgtgaactgcagcgtgatgggcccccaggagaagaaggtggtggtgtacctgcagaagctggacaccgcctacgacgacctgggcaacagcggccacttcaccatcatctacaaccagggcttcgagatcgtgctgaacgactacaagtggttcgccttcttcaagtacaaggaggagggcagcaaggtgaccacctactgcaacgagaccatgaccggctgggtgcacgacgtgctgggcagaaactgggcctgcttcaccggcaagaaggtgggcaccgccagcgagaacgtgtacgtgaacatcgcccacctgaagaacagccaggagaagtacagcaacagactgtacaagtacgaccacaacttcgtgaaggccatcaacgccatccagaagagctggaccgccaccacctacatggagtacgagaccctgaccctgggcgacatgatcagaagaagcggcggccacagcagaaagatccccagacccaagcccgcccccctgaccgccgagatccagcagaagatcctgcacctgcccaccagctgggactggagaaacgtgcacggcatcaacttcgtgagccccgtgagaaaccaggccagctgcggcagctgctacagcttcgccagcatgggcatgctggaggccagaatcagaatcctgaccaacaacagccagacccccatcctgagcccccaggaggtggtgagctgcagccagtacgcccagggctgcgagggcggcttcccctacctgatcgccggcaagtacgcccaggacttcggcctggtggaggaggcctgcttcccctacaccggcaccgacagcccctgcaagatgaaggaggactgcttcagatactacagcagcgagtaccactacgtgggcggcttctacggcggctgcaacgaggccctgatgaagctggagctggtgcaccacggccccatggccgtggccttcgaggtgtacgacgacttcctgcactacaagaagggcatctaccaccacaccggcctgagagaccccttcaaccccttcgagctgaccaaccacgccgtgctgctggtgggctacggcaccgacagcgccagcggcatggactactggatcgtgaagaacagctggggcaccggctggggcgagaacggctacttcagaatcagaagaggcaccgacgagtgcgccatcgagagcatcgccgtggccgccacccccatccccaagctgtag

SEQ ID NO: 121272 - DNA, 1341 bp, Artificial Sequence
  derived and/or modified sequence
atgggcgccggaccaagttgtgatacccccgccaactgcacctacctggatctcctgggcacctgggtgttccaagtgggcagcagtggctcgcaacgggacgtgaattgctctgtgatgggaccacaggagaagaaagtggttgtttacctgcaaaagctcgataccgcctacgacgatctggggaactcagggcatttcactataatctataatcaaggatttgagatagtcctgaacgactacaagtggtttgcatttttcaagtacaaggaggagggctccaaagttacaacatactgtaacgaaacaatgaccggatgggttcacgacgtactggggcggaactgggcctgctttacaggcaagaaagtaggaacagcctccgagaacgtctacgtgaacatcgcccacctgaaaaatagccaggaaaagtattccaatcgcctatataaatatgatcacaactttgtcaaagcaattaatgcaattcaaaagtcctggacagccactacgtacatggagtacgaaacgcttaccctgggagatatgatcagacgatctggaggacactcacgcaagatccctcgtccaaaacccgccccacttacagccgaaatccagcaaaaaatcctccatttgcctacctcttgggactggaggaatgtacacggcattaacttcgtatctcccgtgagaaaccaggccagctgcggatcctgctacagctttgcaagtatgggaatgctagaggcccgaattcggatacttacgaataactcgcagactccaatcctgtcccctcaggaagttgtgagctgctctcagtatgcccagggttgtgagggcggctttccctatctcatcgctgggaaatatgcccaggattttggtctcgtggaggaagcttgcttcccttacactggaacggatagcccctgtaaaatgaaggaggactgcttccgttattactctagcgaatatcattacgtgggcggattctacggaggttgcaacgaggctctgatgaaactggagctggtccatcatggacctatggctgtggcttttgaagtctatgacgatttcttgcactataagaaaggcatctaccatcacacgggactcagagacccctttaatccctttgagcttacgaaccatgccgtgctgcttgtaggctacgggacggacagtgcatccggaatggattattggatcgttaagaattcttggggcactgggtggggagagaacgggtacttccgcatacggagaggtacagatgagtgcgcaattgaaagtatcgctgtcgccgcaactcctattccaaagttgtag

SEQ ID NO: 121273 - DNA, 1341 bp, Artificial Sequence
  derived and/or modified sequence
atgggcgccggccccagctgtgacaccccagccaactgcacctacctggacctgctgggcacctgggtgttccaggtgggcagcagcggcagccagagagatgtgaactgcagcgtgatgggcccccaggagaagaaggtggtggtgtacctgcagaagctggacacagcctatgatgacctgggcaacagcggccacttcaccatcatctacaaccagggctttgaaattgtgctgaatgactacaagtggtttgccttcttcaagtacaaggaggagggcagcaaggtgaccacctactgcaatgagaccatgacaggctgggtgcatgatgtgctgggcaggaactgggcctgcttcaccgggaagaaggtgggcacagcctctgaaaatgtgtatgtgaacatcgcccacctgaagaacagccaggagaagtacagcaaccggctgtacaagtatgaccacaactttgtgaaggccatcaatgccatccagaagtcctggacagccaccacctacatggagtatgagaccctgaccctgggggacatgatccgccgcagcggcggccacagcaggaagatcccccggcccaagccagcccccctgacagctgagatccagcagaagatcctgcacctgcccacctcctgggactggagaaatgtgcacggcatcaactttgtgtcccctgtgaggaaccaggccagctgtggcagctgctacagctttgcctccatgggcatgctggaggcccgcatccgcatcctgaccaacaacagccagacccccatcctgagcccccaggaggtggtgtcctgcagccagtatgcccagggctgtgagggcggcttcccctacctgattgctgggaagtatgcccaggactttggcctggtggaggaggcctgcttcccctacacaggaacagacagcccctgcaagatgaaggaggactgcttccgctactacagcagcgagtaccactacgtgggcggcttctatggaggctgcaatgaggccctgatgaagctggagctggtgcaccacggccccatggctgtggcctttgaggtgtatgatgacttcctgcactacaagaagggcatctaccaccacacaggcctgcgggaccccttcaacccctttgagctgaccaaccacgctgtgctgctggtgggctatggaacagattctgccagcggcatggactactggatcgtgaagaacagctggggcaccggctggggagaaaatggctacttccgcatcagaagaggaacagatgaatgtgccatcgagagcattgctgtggccgccacccccatccccaagctgtag

SEQ ID NO: 121274 - DNA, 1341 bp, Artificial Sequence
  derived and/or modified sequence
atgggcgccggccccagctgcgacacccccgccaactgcacctaccttgatctcctggggacctgggtgtttcaagtaggatcatccggaagccagagggatgtcaactgttcagtgatgggcccacaggagaagaaagttgtggtgtatcttcagaaactcgatacggcatatgatgacctaggtaatagcgggcatttcacgattatttataatcagggctttgaaatcgttttgaatgattataaatggttcgccttctttaagtataaagaggagggcagcaaggtcaccacatattgcaacgagacgatgactgggtgggtgcacgatgtgcttggccgcaattgggcatgttttacgggtaaaaaagttggtacggcttcagaaaacgtgtatgtcaacatagcccacctgaagaattcccaggaaaagtatagtaatcggctctacaagtatgaccataattttgtgaaagccattaatgcaatccagaaatcttggaccgcaaccacctacatggagtacgaaaccttgaccctgggcgatatgattagaagatcaggcggccactccagaaagatccctcggcccaaacccgctccgctgacagccgaaattcagcaaaagatcctacatctgccaactagttgggactggagaaatgtgcacgggatcaattttgtgtcgcctgtccgcaatcaggctagttgtggctcctgctatagtttcgccagcatggggatgctggaggctcgcatcaggattctcactaacaacagccagacccctattttaagcccacaagaagtcgtctcttgctcccagtacgcgcagggttgcgagggtggtttcccctatctgatcgcgggcaaatatgctcaggatttcgggctggttgaggaagcttgtttcccatacacgggcacagacagcccgtgtaagatgaaagaagattgttttcgatattattcttctgagtaccattatgtcggtggattctatggaggttgcaatgaagctctaatgaagcttgagttagtgcaccacggtccgatggccgtggccttcgaggtttatgacgacttcctgcactataagaagggcatttatcaccacactggactacgagatccttttaatcccttcgaattgacaaaccatgcagttttgctggtggggtacggaacagatagcgcctctggaatggattactggatcgtaaaaaactcttggggaactggatggggtgaaaatggatacttcaggattaggagggggacagacgagtgtgctattgagtcaatagccgttgcggccactccaatcccaaagctgtag

SEQ ID NO: 121275 - DNA, 1341 bp, Artificial Sequence
  derived and/or modified sequence
atgggcgcaggcccatcttgcgacacaccagcgaattgcacctacctcgaccttctggggacttgggtgtttcaggtcggttcctctggcagccagcgtgatgtcaactgctccgttatgggacctcaggaaaaaaaggtggtcgtttatctccagaaactcgataccgcttatgacgatctcggaaactcagggcactttactattatatataaccagggcttcgagattgtcctaaatgactataagtggttcgcattcttcaaatacaaggaggaggggagcaaagttacgacttactgcaacgaaaccatgaccggctgggtacacgatgttctcgggaggaattgggcatgtttcaccggaaaaaaagtcggcaccgcttccgagaacgtgtatgtgaatattgctcacctgaagaattcacaggaaaaatactcaaaccggttgtacaaatacgaccacaattttgtgaaagccattaacgcaatccagaagtcatggacagccaccacatacatggagtacgaaaccctgacgttgggagacatgataaggcgctctgggggacacagtaggaaaataccaagacccaagcccgcacccctgactgccgaaatccaacagaagattctgcatctgcccacgagttgggattggcggaatgtccacggcattaactttgttagccctgttagaaaccaagcatcgtgcggcagttgttatagctttgcctccatgggcatgcttgaggcccgtatcaggatcttgaccaataattctcagacgcccattctgtctccccaggaagtggtgagctgctcgcaatacgcacaagggtgcgaagggggatttccttatttgatcgctggaaagtacgcgcaggatttcggacttgtggaagaggcctgttttccgtataccggtactgactccccatgcaaaatgaaggaggattgcttcagatactatagctccgaataccattatgtgggcggattctacggagggtgtaacgaggccctcatgaaattagagctggtacaccatggtcctatggctgtggccttcgaagtgtatgacgactttctccactacaaaaagggaatctaccaccacacaggcctgcgcgatcccttcaatccctttgagttgaccaatcacgccgtgctcctggtgggatacggcaccgactcagcctcaggaatggattactggatcgttaagaattcgtggggcaccggatggggagagaacggatatttccgaattaggcggggtacagacgaatgcgctatcgagtccatcgccgtggcagcgaccccaattccgaagctgtag

SEQ ID NO: 121276 - DNA, 1903 bp, Artificial Sequence
  derived and/or modified sequence
ggtttccgggccggcgtagctatttcaaggcgcgcgcctcgtggtggactcaccgctagcccgcagcgctcggcttcctggtaattcttcacctcttttctcagctccctgcagcatgggtgctgggccctccttgctgctcgccgccctcctgctgcttctctccggcgacggcgccgtgcgctgcgacacacctgccaactgcacctatcttgacctgctgggcacctgggtcttccaggtgggctccagcggttcccagcgcgatgtcaactgctcggttatgggaccacaagaaaaaaaagtagtggtgtaccttcagaagctggatacagcatatgatgaccttggcaattctggccatttcaccatcatttacaaccaaggctttgagattgtgttgaatgactacaagtggtttgccttttttaagtataaagaagagggcagcaaggtgaccacttactgcaacgagacaatgactgggtgggtgcatgatgtgttgggccggaactgggcttgtttcaccggaaagaaggtgggaactgcctctgagaatgtgtatgtcaacatagcacaccttaagaattctcaggaaaagtattctaataggctctacaagtatgatcacaactttgtgaaagctatcaatgccattcagaagtcttggactgcaactacatacatggaatatgagactcttaccctgggagatatgattaggagaagtggtggccacagtcgaaaaatcccaaggcccaaacctgcaccactgactgctgaaatacagcaaaagattttgcatttgccaacatcttgggactggagaaatgttcatggtatcaattttgtcagtcctgttcgaaaccaagcatcctgtggcagctgctactcatttgcttctatgggtatgctagaagcgagaatccgtatactaaccaacaattctcagaccccaatcctaagccctcaggaggttgtgtcttgtagccagtatgctcaaggctgtgaaggcggcttcccataccttattgcaggaaagtacgcccaagattttgggctggtggaagaagcttgcttcccctacacaggcactgattctccatgcaaaatgaaggaagactgctttcgttattactcctctgagtaccactatgtaggaggtttctatggaggctgcaatgaagccctgatgaagcttgagttggtccatcatgggcccatggcagttgcttttgaagtatatgatgacttcctccactacaaaaaggggatctaccaccacactggtctaagagaccctttcaacccctttgagctgactaatcatgctgttctgcttgtgggctatggcactgactcagcctctgggatggattactggattgttaaaaacagctggggcaccggctggggtgagaatggctacttccggatccgcagaggaactgatgagtgtgcaattgagagcatagcagtggcagccacaccaattcctaaattgtagggtatgccttccagtatttcataatgatctgcatcagttgtaaaggggaattggtatattcacagactgtagactttcagcagcaatctcagaagcttacaaatagatttccatgaagatatttgtcttcagaattaaaactgcccttaattttaatatacctttcaatcggccactggccatttttttctaagtattcaattaagtgggaattttctggaagatggtcagctatgaagtaatagagtttgcttaatcatttgtaattcaaacatgctatattttttaaaatcaatgtgaaaacatagacttatttttaaattgtaccaatcacaagaaaataatggcaataattatcaaaacttttaaaatagatgctcatatttttaaaataaa

SEQ ID NO: 121277 - DNA, 1742 bp, Artificial Sequence
  derived and/or modified sequence
atgggtgctgggccctcctgcgacacacctgccaactgcacctatcttgacctgctgggcacctgggtcttccaggtgggctccagcggttcccagcgcgatgtcaactgctcggttatgggaccacaagaaaaaaaagtagtggtgtaccttcagaagctggatacagcatatgatgaccttggcaattctggccatttcaccatcatttacaaccaaggctttgagattgtgttgaatgactacaagtggtttgccttttttaagtataaagaagagggcagcaaggtgaccacttactgcaacgagacaatgactgggtgggtgcatgatgtgttgggccggaactgggcttgtttcaccggaaagaaggtgggaactgcctctgagaatgtgtatgtcaacatagcacaccttaagaattctcaggaaaagtattctaataggctctacaagtatgatcacaactttgtgaaagctatcaatgccattcagaagtcttggactgcaactacatacatggaatatgagactcttaccctgggagatatgattaggagaagtggtggccacagtcgaaaaatcccaaggcccaaacctgcaccactgactgctgaaatacagcaaaagattttgcatttgccaacatcttgggactggagaaatgttcatggtatcaattttgtcagtcctgttcgaaaccaagcatcctgtggcagctgctactcatttgcttctatgggtatgctagaagcgagaatccgtatactaaccaacaattctcagaccccaatcctaagccctcaggaggttgtgtcttgtagccagtatgctcaaggctgtgaaggcggcttcccataccttattgcaggaaagtacgcccaagattttgggctggtggaagaagcttgcttcccctacacaggcactgattctccatgcaaaatgaaggaagactgctttcgttattactcctctgagtaccactatgtaggaggtttctatggaggctgcaatgaagccctgatgaagcttgagttggtccatcatgggcccatggcagttgcttttgaagtatatgatgacttcctccactacaaaaaggggatctaccaccacactggtctaagagaccctttcaacccctttgagctgactaatcatgctgttctgcttgtgggctatggcactgactcagcctctgggatggattactggattgttaaaaacagctggggcaccggctggggtgagaatggctacttccggatccgcagaggaactgatgagtgtgcaattgagagcatagcagtggcagccacaccaattcctaaattgtagggtatgccttccagtatttcataatgatctgcatcagttgtaaaggggaattggtatattcacagactgtagactttcagcagcaatctcagaagcttacaaatagatttccatgaagatatttgtcttcagaattaaaactgcccttaattttaatatacctttcaatcggccactggccatttttttctaagtattcaattaagtgggaattttctggaagatggtcagctatgaagtaatagagtttgcttaatcatttgtaattcaaacatgctatattttttaaaatcaatgtgaaaacatagacttatttttaaattgtaccaatcacaagaaaataatggcaataattatcaaaacttttaaaatagatgctcatatttttaaaataaagtttt

SEQ ID NO: 121278 - DNA, 1341 bp, Artificial Sequence
  derived and/or modified sequence
atgggcgccggccccagctgcgacacccccgccaactgcacctacctggacctgctgggcacctgggtgttccaggtgggcagcagcggcagccagagagacgtgaactgcagcgtgatgggcccccaggagaagaaggtggtggtgtacctgcagaagctggacaccgcctacgacgacctgggcaacagcggccacttcaccatcatctacaaccagggcttcgagatcgtgctgaacgactacaagtggttcgccttcttcaagtacaaggaggagggcagcaaggtgaccacctactgcaacgagaccatgaccggctgggtgcacgacgtgctgggcagaaactgggcctgcttcaccggcaagaaggtgggcaccgccagcgagaacgtgtacgtgaacatcgcccacctgaagaacagccaggagaagtacagcaacagactgtacaagtacgaccacaacttcgtgaaggccatcaacgccatccagaagagctggaccgccaccacctacatggagtacgagaccctgaccctgggcgacatgatcagaagaagcggcggccacagcagaaagatccccagacccaagcccgcccccctgaccgccgagatccagcagaagatcctgcacctgcccaccagctgggactggagaaacgtgcacggcatcaacttcgtgagccccgtgagaaaccaggccagctgcggcagctgctacagcttcgccagcatgggcatgctggaggccagaatcagaatcctgaccaacaacagccagacccccatcctgagcccccaggaggtggtgagctgcagccagtacgcccagggctgcgagggcggcttcccctacctgatcgccggcaagtacgcccaggacttcggcctggtggaggaggcctgcttcccctacaccggcaccgacagcccctgcaagatgaaggaggactgcttcagatactacagcagcgagtaccactacgtgggcggcttctacggcggctgcaacgaggccctgatgaagctggagctggtgcaccacggccccatggccgtggccttcgaggtgtacgacgacttcctgcactacaagaagggcatctaccaccacaccggcctgagagaccccttcaaccccttcgagctgaccaaccacgccgtgctgctggtgggctacggcaccgacagcgccagcggcatggactactggatcgtgaagaacagctggggcaccggctggggcgagaacggctacttcagaatcagaagaggcaccgacgagtgcgccatcgagagcatcgccgtggccgccacccccatccccaagctgtag

SEQ ID NO: 121279 - protein, 252 aa, Artificial Sequence
  derived and/or modified sequence
MGPPSASPHRECIPWQGLLLTASLLNFWNPPTTAKLTIESMPLSVAEGKEVLLLVHNLPQHLFGYSWYKGERVDGNSLIVGYVIGTQQATPGAAYSGRETIYTNASLLIQNVTQNDIGFYTLQVIKSDLVNEEATGQFHVYQENAPGLPVGAVAGIVTGVLVGVALVAALVCFLLLAKTGRTSIQRDLKEQQPQALAPGRGPSHSSAFSMSPLSTAQAPLPNPRTAASIYEELLKHDTNIYCRMDHKAEVAS

SEQ ID NO: 121280 - DNA, 759 bp, Artificial Sequence
  derived and/or modified sequence
atgggcccccccagcgccagcccccacagagagtgcatcccctggcagggcctgctgctgaccgccagcctgctgaacttctggaacccccccaccaccgccaagctgaccatcgagagcatgcccctgagcgtggccgagggcaaggaggtgctgctgctggtgcacaacctgccccagcacctgttcggctacagctggtacaagggcgagagagtggacggcaacagcctgatcgtgggctacgtgatcggcacccagcaggccacccccggcgccgcctacagcggcagagagaccatctacaccaacgccagcctgctgatccagaacgtgacccagaacgacatcggcttctacaccctgcaggtgatcaagagcgacctggtgaacgaggaggccaccggccagttccacgtgtaccaggagaacgcccccggcctgcccgtgggcgccgtggccggcatcgtgaccggcgtgctggtgggcgtggccctggtggccgccctggtgtgcttcctgctgctggccaagaccggcagaaccagcatccagagagacctgaaggagcagcagccccaggccctggcccccggcagaggccccagccacagcagcgccttcagcatgagccccctgagcaccgcccaggcccccctgcccaaccccagaaccgccgccagcatctacgaggagctgctgaagcacgacaccaacatctactgcagaatggaccacaaggccgaggtggccagctag

SEQ ID NO: 121281 - DNA, 759 bp, Artificial Sequence
  derived and/or modified sequence
atgggaccgccaagtgctagcccgcatcgtgaatgtatcccatggcaggggctgttactcaccgctagtttacttaatttttggaacccaccaaccactgctaaactgaccatcgagagcatgcctctttccgttgccgaggggaaagaggtgttgctgctggtccacaatttgccccagcacctgttcggatatagctggtataagggcgaacgggtggacggcaattcgttaattgtgggatacgtgatagggacccaacaagccacccccggggctgcctatagtgggagggaaaccatttatacaaacgcctccctcctgatccagaatgtcacacaaaacgatatagggttttatactctgcaggtcattaaaagcgatttagtgaacgaagaggcgaccgggcagttccacgtctaccaagaaaatgccccaggcctcccggtgggggcagtggccggtattgttaccggcgtactggtcggagttgccttggttgcggcactggtgtgctttctacttctggctaagaccggacgtacctctatccagagggatctgaaggaacagcaacctcaggctcttgcaccgggccgagggcctagtcattctagcgcttttagtatgtccccactgtctactgctcaggcaccgcttcctaaccctcgaacagctgcgagtatttacgaggagctactgaaacacgacacaaatatttactgtcgcatggaccataaggcggaggttgcatcgtag

SEQ ID NO: 121282 - DNA, 759 bp, Artificial Sequence
  derived and/or modified sequence
atgggccccccatctgccagcccccaccgggagtgcatcccctggcagggcctgctgctgacagccagcctgctgaacttctggaacccccccaccacagccaagctgaccatcgagagcatgcccctgtctgtggccgagggcaaggaggtgctgctgctggtgcacaacctgccccagcacctgtttggctacagctggtacaagggggagcgggtggatggcaacagcctgattgtgggctacgtgattggcacccagcaggccaccccaggagctgcctacagcggccgggagaccatctacaccaatgccagcctgctgatccagaatgtgacccagaatgacatcggcttctacaccctgcaggtgatcaagagtgacctggtgaatgaggaggccaccggccagttccacgtgtaccaggagaatgcccctggcctgcctgtgggcgctgtggccggcatcgtgactggagtgctggtgggcgtggccctggtggccgccctggtgtgcttcctgctgctggccaagacaggccgcaccagcatccagagggacctgaaggagcagcagccccaggccctggcccctggccggggccccagccacagcagcgccttctccatgagccccctgagcacagcccaggcccccctgcccaaccccaggacagctgccagcatctatgaggagctgctgaagcatgacaccaacatctactgcaggatggaccacaaggccgaggtggccagctag

SEQ ID NO: 121283 - DNA, 759 bp, Artificial Sequence
  derived and/or modified sequence
atgggcccccccagcgccagcccccaccgggagtgcatcccctggcaaggactattgctcactgccagtttgctaaatttctggaatccaccaacaaccgccaaattgaccatcgagtccatgcctctctcagtggctgaaggcaaggaagtcctcctgttggtgcataacctcccacaacacctgtttggctattcatggtataagggggaaagggtcgatggtaatagtctaatagtcggatatgttataggcacacagcaagcaacccccggcgccgcctacagcggacgggagactatttatacgaacgcctcattgctgatccagaatgtaactcagaacgatatcgggttttacacacttcaggttatcaagagcgacctcgtgaacgaggaagcaactggacagtttcatgtgtaccaggagaacgctcccggactgcccgtcggagcagttgccggtattgtcaccggagtgctggtgggcgttgccctggtggcagctcttgtatgcttccttctcttggctaaaacaggtcgtacaagtatccaacgagacttaaaagaacagcaacctcaggctttggccccagggcggggcccttctcactcttccgccttctctatgtctccgctgagcaccgcgcaagccccgctgcctaatccacgaacagctgcctcaatttatgaggagctgcttaaacatgacacaaacatctattgcaggatggaccacaaagcagaagtagcctcttag

SEQ ID NO: 121284 - DNA, 759 bp, Artificial Sequence
  derived and/or modified sequence
atgggacccccatcggcctcaccccacagggagtgtattccttggcaaggacttctacttacagcctctcttctcaacttctggaaccctccgactactgctaaactgacaatcgagagtatgcctctgtccgtggcagaaggcaaggaggtgctactgctcgtgcataacctgccacagcatctattcggctattcctggtacaaaggcgaacgcgttgatggcaacagcctgatcgttggttacgtaataggcactcagcaggcaaccccaggagcggcatactcaggccgagagaccatatacacaaacgcttctctactcatccaaaacgtaacacagaatgatatcggattctatacccttcaggtcatcaagagtgatctggtgaatgaagaggccacaggacagttccacgtttatcaggagaacgcaccgggtctacccgtcggggctgtggcgggaattgtgactggcgtactcgtcggcgtggccctggttgccgctttagtctgcttcttactgctggcgaagaccggcaggactagtatccaaagggatctgaaggaacagcagccccaggccctcgctccgggaagaggcccatcacacagtagcgccttcagcatgtcacctctcagtacagctcaggccccactacccaacccaagaacagcagcaagcatctatgaggaactgttaaagcatgacacaaacatttactgccgaatggaccacaaagcagaagtcgcctcttag

SEQ ID NO: 121285 - DNA, 1316 bp, Artificial Sequence
  derived and/or modified sequence
aaatgtagacagaagggagaaaggaagaagagaaaatgaggcaaaactgagaggggaggggacagagaggtgacctgggcagagcttcacccatgaccctggaaagtgctcctgccctgggaggaggctcagcatggaaagaggaaggacagcagagcctaagtcacagtagccctgactacagcattcctggagcccaggctcttttccacagaggaggaaagagcaggcagcagagaccatggggcccccctcagcctctccccacagagaatgcatcccctggcaggggcttctgctcacagcctcacttctaaacttctggaacccgcccaccactgccaagctcactattgaatccatgccgctcagtgtcgcagaggggaaggaggtgcttctacttgtccacaatctgccccagcatctttttggctacagctggtacaaaggggaaagagtggatggcaacagtctaattgtaggatatgtaataggaactcaacaagctaccccaggggccgcatacagcggtcgagagacaatatacaccaatgcatccctgctgatccagaatgtcacccagaatgacataggattctacaccctacaagtcataaagtcagatcttgtgaatgaagaagcaactggacagttccatgtataccaagaaaatgccccaggccttcctgtgggggccgtcgccggcatcgtgaccggggtcctggtcggagtggcgctggtggccgcgctggtgtgtttcctgctccttgccaaaactggaagaaccagcatccagcgtgacctcaaggagcagcagccccaagcccttgcccctggccgtggtccctcccacagctctgccttctcgatgtcccctctctccactgcccaggcccccctacccaaccccaggacagcagcttccatctatgaggaattgctaaaacatgacacaaacatttactgccggatggaccacaaagcagaagtggcttcttagcttccgccaggagctgctcctgtgggttgatggagagtccccaaggcccccagccctggggatggggaaggacatgaagcctgagccagagaaccagctataagtcctgagaagacactggtgtctggggacagggagggatgggggtccctgatgaatatctggagacctcgacagcctgccctaggccctgggtgggtcaggacaaaggcctctcatcaccgcagaaagcgggggcttgcagggaaagtgaatgggcctgtggcccacctggggtcacttggaaaggatctgaataaaggggacccttcctctc

SEQ ID NO: 121286 - protein, 349 aa, Artificial Sequence
  derived and/or modified sequence
MGPISAPSCRWRIPWQGLLLTASLFTFWNPPTTAQLTIEAVPSNAAEGKEVLLLVHNLPQDPRGYNWYKGETVDANRRIIGYVISNQQITPGPAYSNRETIYPNASLLMRNVTRNDTGSYTLQVIKLNLMSEEVTGQFSVHPETPKPSISSNNSNPVEDKDAVAFTCEPETQNTTYLWWVNGQSLPVSPRLQLSNGNRTLTLLSVTRNDVGPYECEIQNPASANFSDPVTLNVLYGPDAPTISPSDTYYHAGVNLNLSCHAASNPPSQYSWSVNGTFQQYTQKLFIPNITTKNSGSYACHTTNSATGRNRTTVRMITVSDALVQGSSPGLSARATVSIMIGVLARVALI

SEQ ID NO: 121287 - DNA, 1050 bp, Artificial Sequence
  derived and/or modified sequence
atgggacccatctccgcacccagttgtcgatggaggattccgtggcaagggctgctgcttacggcatcattgttcacgttttggaatccacctacaactgcacagctcaccatagaagctgtcccatctaacgcagctgaaggcaaggaagtgttgttgctggtccacaacctgccacaagacccaagaggctacaactggtataagggtgagacggttgatgccaatagacgaatcattgggtatgtgatttccaaccagcagatcactcccggacccgcatactccaaccgggaaaccatttacccgaatgcctccttgctgatgaggaatgtcactaggaatgatactgggagctacaccctccaagtaatcaagctgaatttgatgtctgaggaggtcacgggtcaattcagtgtgcaccctgagacccctaaaccaagcatttcatccaataattcaaaccccgtggaagacaaggatgctgtggcgtttacctgtgaacccgagacccagaataccacatacctctggtgggtgaacggccaatctcttcctgtatcacccagattgcagttatccaacggtaaccgcactctgaccctgctgtctgttactagaaacgacgtgggcccatacgaatgcgaaatccagaatccagcatctgcaaacttctctgatcccgtgaccctgaacgtgctctatgggccagatgcacctaccatcagcccctcagacacatactaccatgcaggagtgaaccttaatcttagctgccatgcagcttctaaccctccctctcagtacagttggtccgtgaacgggacttttcaacaatacacccagaagttgtttattcctaatataactaccaagaacagcggctcatatgcttgtcacactacgaactcagccaccgggcgaaataggacaactgttagaatgattacagttagtgacgcactagtgcagggctctagccctgggctatccgccagggcgactgtgagcattatgatcggggtcctcgctcgtgtagctcttatttag

SEQ ID NO: 121288 - DNA, 1050 bp, Artificial Sequence
  derived and/or modified sequence
atggggcctattagcgcgcccagctgccggtggcggatcccgtggcagggcctgctactgacagccagtctgttcacgttctggaatccccccaccaccgctcaactcacaatcgaagccgtgccaagtaatgctgccgaagggaaagaggtgctgttactggtgcacaatctcccccaggaccctcggggatataactggtacaaaggtgaaacagtagatgccaatcggcggatcatcgggtacgtgatcagcaaccagcaaatcactcctggccctgcgtattccaaccgtgagacaatctaccctaacgccagccttctgatgcggaatgtgacaagaaacgatactggcagctatacattacaagtgatcaagctaaacctgatgagtgaagaagtgaccggtcagttttctgtccacccagagaccccaaaaccaagtatctcctccaataattctaatcctgtagaggataaagacgccgtggcatttacctgcgaacccgaaacccagaacaccacctacctttggtgggtgaacggccaatcactgccggtgagcccaagactgcagctgagtaatggtaaccggacgctgacacttttatctgttactcgcaatgatgttggcccttacgaatgcgagatccagaatcccgcctccgccaatttttccgatcctgtcacactgaatgtcctgtacggcccggacgcccccacaatctctcctagtgatacttattaccatgccggtgtcaacctaaacctatcttgccatgcagcctctaaccccccctcccaatactcatggtccgtgaatggcacattccaacagtacactcagaagctcttcattcctaatattaccacaaagaacagtggttcctatgcatgccacacgacaaactctgcaactgggcgaaaccgcactaccgtgagaatgattactgtgtcagacgctcttgtccagggctcctctccaggcttatccgcccgcgccaccgtgtccataatgatcggagtgctcgccagagttgctctcatctag

SEQ ID NO: 121289 - DNA, 1050 bp, Artificial Sequence
  derived and/or modified sequence
atgggcccgattagcgcaccatcctgcaggtggcgtataccttggcaaggcctgctgctcaccgcctccctttttaccttttggaatccaccaaccaccgcccagctgactatcgaagcagttccctcaaatgccgccgaaggaaaagaagtgctcctcttggttcacaatctaccccaggatcctagaggatacaactggtataagggcgaaacggtcgatgcgaatcgcaggatcataggatatgttatctccaatcaacagatcacaccagggccagcctacagcaatagagagacaatctaccctaacgccagccttctgatgcggaatgtgacaagaaacgatactggcagctatacattacaagtgatcaagctaaacctgatgagtgaagaagtgaccggtcagttttctgtccacccagagaccccaaaaccaagtatctcctccaataattctaatcctgtagaggataaagacgccgtggcatttacctgcgaacccgaaacccagaacaccacctacctttggtgggtgaacggccaatcactgccggtgagcccaagactgcagctgagtaatggtaaccggacgctgacacttttatctgttactcgcaatgatgttggcccttacgaatgcgagatccagaatcccgcctccgccaatttttccgatcctgtcacactgaatgtcctgtacggcccggacgcccccacaatctctcctagtgatacttattaccatgccggtgtcaacctaaacctatcttgccatgcagcctctaaccccccctcccaatactcatggtccgtgaatggcacattccaacagtacactcagaagctcttcattcctaatattaccacaaagaacagtggttcctatgcatgccacaccacgaacagtgcaacaggacgaaatagaacaactgtgagaatgataacagtctccgatgcgttagtccaaggatcatcacccggactgtctgctcgtgccaccgtttcgatcatgattggggtgttggcaagagtagcgttgatttag

SEQ ID NO: 121290 - DNA, 2305 bp, Artificial Sequence
  derived and/or modified sequence
agcacaaaaggaggaaggacagcacagctgacagccgtgctcagaaagtttctggatcccaggctcatctccacagaggagaacacgcaggcagcagagaccatggggcccatctcagccccttcctgcagatggcgcatcccctggcaggggctcctgctcacagcctcacttttcaccttctggaacccgcccaccactgctcagctcactattgaagctgtgccatccaatgctgcagaggggaaggaggttcttctacttgtccacaatctgccccaggaccctcgtggctacaactggtacaaaggggaaacagtggatgccaaccgtcgaattataggatatgtaatatcaaatcaacagattaccccagggcctgcatacagcaatcgagagacaatataccccaatgcatccctgctgatgcggaacgtcaccagaaatgacacaggatcctacaccctacaagtcataaagctaaatcttatgagtgaagaagtaactggccagttcagcgtacatccggagactcccaagccctccatctccagcaacaactccaaccccgtggaggacaaggatgctgtggccttcacctgtgaacctgagactcagaacacaacctacctgtggtgggtaaatggtcagagtctcccggtcagtcccaggctgcagctgtccaatggcaacaggaccctcactctactcagtgtcacaaggaatgacgtaggaccctatgaatgtgaaatacagaacccagcgagtgcaaacttcagtgacccagtcaccctgaatgtcctctatggcccagatgcccccaccatttccccttcagacacctattaccatgcaggggtaaatctcaacctctcctgccatgcggcctctaatccaccctcacagtattcttggtctgtcaatggcacattccagcaatacacacaaaagctctttatccccaacatcactacaaagaacagcggatcctatgcctgccacaccactaactcagccactggccgcaacaggaccacagtcaggatgatcacagtctctgatgctttagtacaaggaagttctcctggcctctcagctagagccactgtcagcatcatgattggagtactggccagggtggctctgatatagtagctctggtgtagtttctgcatttcaagaagactggcagacagttgtttttattcttcctcaaagcatttgcaatcagctaccattcaaaattgcttcttcttcaagatttatggaaaatactctgacgagtactcttgaacacaagttcctgataactttaagatcacgccactggactgtctatgaacttgcaaacaggctgatacctttgtgaagttgcccaccaaaacacagaaggaaaaaaacatgaatttcattgaactaaataataatgaggataatgtttttaagatttttttttttttttttttgagatggaatctcgctctgtcgcccaggctggagtgcagtggcacgatctcaactcactgcaagctccgcctcctgggttcacaccattctcctgcctcagcctcctgagtagctgggactacaggcgcctgccacaacgcccggctaattttttgtatttttagtagagacggggtttcactgtggtctcaatctcctgacttcatggtccgcctgcctcagcctcccaaagttctgggattacaggtgtgagccaccgcgcccagcccgtttttaagattttttatttgaaaaattgccaattctttaagtgttttctttttcagatttatgaatttctttatcttttaagctatctataccttactgcaatttggtaaagcagacttttgtgaacaaaaattataacatttacttttgctccctacctgactgccacagaactgggcaactattcatgagtattcatatgtttatggtaattcagttatttgcacaagttcagtgagaatctgctgtctttataatgggatatagtttaaaacattggttatattaccaaggctttgattgggatgttatatttgagaaaatacagagaatgatagattaacggagtgtctaatctatcgtgtcaaccccaaatttttacgtatgagatcctttagtccacccaatggctgacagtaacagcatctttaacacaactctttgttcaaatgtactatggtctcttttagagtcagactcctagactcacttgttctcactgtctgttttaatttaacccaggcatgcaatgctagataataaaattgctccctattggctgatcaga

SEQ ID NO: 121291 - DNA, 1050 bp, Artificial Sequence
  derived and/or modified sequence
atgggccccatcagcgcccccagctgcagatggagaatcccctggcagggcctgctgctgaccgccagcctgttcaccttctggaacccccccaccaccgcccagctgaccatcgaggccgtgcccagcaacgccgccgagggcaaggaggtgctgctgctggtgcacaacctgccccaggaccccagaggctacaactggtacaagggcgagaccgtggacgccaacagaagaatcatcggctacgtgatcagcaaccagcagatcacccccggccccgcctacagcaacagagagaccatctaccccaacgccagcctgctgatgagaaacgtgaccagaaacgacaccggcagctacaccctgcaggtgatcaagctgaacctgatgagcgaggaggtgaccggccagttcagcgtgcaccccgagacccccaagcccagcatcagcagcaacaacagcaaccccgtggaggacaaggacgccgtggccttcacctgcgagcccgagacccagaacaccacctacctgtggtgggtgaacggccagagcctgcccgtgagccccagactgcagctgagcaacggcaacagaaccctgaccctgctgagcgtgaccagaaacgacgtgggcccctacgagtgcgagatccagaaccccgccagcgccaacttcagcgaccccgtgaccctgaacgtgctgtacggccccgacgcccccaccatcagccccagcgacacctactaccacgccggcgtgaacctgaacctgagctgccacgccgccagcaacccccccagccagtacagctggagcgtgaacggcaccttccagcagtacacccagaagctgttcatccccaacatcaccaccaagaacagcggcagctacgcctgccacaccaccaacagcgccaccggcagaaacagaaccaccgtgagaatgatcaccgtgagcgacgccctggtgcagggcagcagccccggcctgagcgccagagccaccgtgagcatcatgatcggcgtgctggccagagtggccctgatctag

SEQ ID NO: 121292 - DNA, 1050 bp, Artificial Sequence
  derived and/or modified sequence
atgggccctatctctgccccctcttgtcgttggagaataccctggcaaggacttctgctgacagcttccttgtttacgttttggaacccaccaactaccgcccagctgactatcgaagccgtgcccagtaatgccgccgagggcaaggaggtgttattgttagtgcacaatctgccgcaggatccccgtggctataactggtacaagggcgagacggtggatgccaatcggcggatcattgggtatgtgatctcaaatcagcagattacacccggccctgcctactctaaccgtgaaactatttaccccaatgcttccctgttgatgagaaacgtcacaagaaacgatacagggtcctatacacttcaggtcattaaattgaatctcatgagtgaagaggtgaccggccagtttagcgtgcaccctgaaacccctaagccttccatcagttcaaataactctaaccctgtggaagataaggacgccgtcgcgtttacatgcgaaccagagacacagaacactacatacttgtggtgggttaacggccaatctctgccagtgtcacccaggctgcaactgtctaatggcaacaggactttgacattgctgtctgttactcgcaatgacgtgggcccgtacgaatgcgaaatccagaatcctgcttccgccaacttttccgacccagtgactctaaacgtgctgtacggacccgacgctcctaccatctctccgtccgatacttactatcacgcaggggttaatctgaatctatcatgccacgcggcttctaacccaccatcccagtactcgtggtcggtgaacggcacattccaacaatatactcaaaagttattcatacccaacatcacaactaagaatagtgggagctacgcgtgccataccactaattctgcgacaggacggaaccgcactactgtgcgaatgatcacagtctctgacgctctcgttcaaggctcttctcccggcctctcagcccgcgccacagtttctattatgatcggcgttcttgcgagagtggcattaatttag

SEQ ID NO: 121293 - DNA, 1050 bp, Artificial Sequence
  derived and/or modified sequence
atgggccccatcagcgcccccagctgccgctggaggatcccctggcagggcctgctgctgacagccagcctcttcaccttctggaacccccccaccacagcccagctgaccatcgaggccgtgcccagcaatgctgctgagggcaaggaggtgctgctgctggtgcacaacctgccccaggacccccggggctacaactggtacaagggggagaccgtggatgccaacagacgcatcatcggctacgtgatcagcaaccagcagatcaccccaggccctgcctacagcaaccgggagaccatctacccaaatgccagcctgctgatgagaaatgtgaccagaaatgacaccggcagctacaccctgcaggtgatcaagctgaacctgatgtctgaggaggtgacaggccagttctctgtgcaccctgagacccccaagcccagcatcagcagcaacaacagcaaccctgtggaggacaaggatgctgtggccttcacctgtgagcctgagacccagaacaccacctacctgtggtgggtgaatggccagagcctgcctgtgagcccccggctgcagctgagcaatggaaacagaaccctgaccctgctgtctgtgaccagaaatgatgtgggcccctatgaatgtgagatccagaacccagccagcgccaacttcagtgaccctgtgaccctgaatgtgctgtatggcccagatgcccccaccatcagccccagcgacacctactaccacgccggcgtgaacctgaacctgagctgccacgccgccagcaacccccccagccagtacagctggagcgtgaatggcaccttccagcagtacacccagaagctgttcatccccaacatcaccaccaagaacagcggcagctatgcctgccacaccaccaacagcgccaccggcaggaacagaaccaccgtgaggatgatcaccgtgtctgatgccctggtgcagggcagcagccctggcctgagcgcccgggccaccgtgtccatcatgattggagtgctggcccgggtggccctgatctag

SEQ ID NO: 121294 - DNA, 1050 bp, Artificial Sequence
  derived and/or modified sequence
atgggccccatcagcgcccccagctgccggtggcggatcccctggcaaggtctgctcctgacggcatcattgtttacgttttggaatcccccaactacagcacaactgaccatcgaggccgtgccgtcaaacgccgcagaaggtaaggaagtgctgctgttagtacataatctacctcaggatcctagaggctataactggtataagggagagaccgtggacgcaaaccgccgaattataggttacgtgatctccaaccagcagattacacctggcccagcttattccaacagagagactatttatcctaatgctagccttttaatgaggaatgtgacccgtaacgatacaggctcttatacacttcaggtcatcaaactgaatctgatgagcgaggaggttacggggcagtttagcgttcaccctgaaacccctaaaccttcaattagttccaataacagcaatcccgtggaggataaggatgccgtcgcctttacatgcgaacccgaaacccagaacacaacatacctgtggtgggtcaatggacagagcctcccagtgtctcctagactgcagctaagcaatggaaacagaactctaactttactaagcgttaccagaaacgacgttggtccttacgagtgcgagatccagaacccggcctctgctaatttttccgaccccgttaccttgaatgtgctctacggacctgatgcccctaccatctctccgtcagacacatactatcacgctggggtcaacctgaacttgtcatgtcatgctgcatccaacccaccctcacaatatagctggtccgttaatggaacattccagcagtatactcagaagctgttcatccctaatattaccacaaaaaactcaggcagctacgcctgtcacactacaaattcggcaactggccgtaataggactactgtcaggatgatcactgtatctgatgccttagtccagggaagttctcccggactttcggctcgcgcgacggtgtccatcatgattggcgtgctggctagggtggccctgatctag

SEQ ID NO: 121295 - RNA, 1050 nt, Artificial Sequence
  derived and/or modified sequence
auggggccuauuagcgcgcccagcugccgguggcggaucccguggcagggccugcuacugacagccagucuguucacguucuggaauccccccaccaccgcucaacucacaaucgaagccgugccaaguaaugcugccgaagggaaagaggugcuguuacuggugcacaaucucccccaggacccucggggauauaacugguacaaaggugaaacaguagaugccaaucggcggaucaucggguacgugaucagcaaccagcaaaucacuccuggcccugcguauuccaaccgugagacaaucuacccuaacgccagccuucugaugcggaaugugacaagaaacgauacuggcagcuauacauuacaagugaucaagcuaaaccugaugagugaagaagugaccggucaguuuucuguccacccagagaccccaaaaccaaguaucuccuccaauaauucuaauccuguagaggauaaagacgccguggcauuuaccugcgaacccgaaacccagaacaccaccuaccuuuggugggugaacggccaaucacugccggugagcccaagacugcagcugaguaaugguaaccggacgcugacacuuuuaucuguuacucgcaaugauguuggcccuuacgaaugcgagauccagaaucccgccuccgccaauuuuuccgauccugucacacugaauguccuguacggcccggacgcccccacaaucucuccuagugauacuuauuaccaugccggugucaaccuaaaccuaucuugccaugcagccucuaacccccccucccaauacucaugguccgugaauggcacauuccaacaguacacucagaagcucuucauuccuaauauuaccacaaagaacagugguuccuaugcaugccacacgacaaacucugcaacugggcgaaaccgcacuaccgugagaaugauuacugugucagacgcucuuguccagggcuccucuccaggcuuauccgcccgcgccaccguguccauaaugaucggagugcucgccagaguugcucucaucuag

SEQ ID NO: 121296 - RNA, 1050 nt, Artificial Sequence
  derived and/or modified sequence
augggcccgauuagcgcaccauccugcagguggcguauaccuuggcaaggccugcugcucaccgccucccuuuuuaccuuuuggaauccaccaaccaccgcccagcugacuaucgaagcaguucccucaaaugccgccgaaggaaaagaagugcuccucuugguucacaaucuaccccaggauccuagaggauacaacugguauaagggcgaaacggucgaugcgaaucgcaggaucauaggauauguuaucuccaaucaacagaucacaccagggccagccuacagcaauagagagacaaucuacccuaacgccagccuucugaugcggaaugugacaagaaacgauacuggcagcuauacauuacaagugaucaagcuaaaccugaugagugaagaagugaccggucaguuuucuguccacccagagaccccaaaaccaaguaucuccuccaauaauucuaauccuguagaggauaaagacgccguggcauuuaccugcgaacccgaaacccagaacaccaccuaccuuuggugggugaacggccaaucacugccggugagcccaagacugcagcugaguaaugguaaccggacgcugacacuuuuaucuguuacucgcaaugauguuggcccuuacgaaugcgagauccagaaucccgccuccgccaauuuuuccgauccugucacacugaauguccuguacggcccggacgcccccacaaucucuccuagugauacuuauuaccaugccggugucaaccuaaaccuaucuugccaugcagccucuaacccccccucccaauacucaugguccgugaauggcacauuccaacaguacacucagaagcucuucauuccuaauauuaccacaaagaacagugguuccuaugcaugccacaccacgaacagugcaacaggacgaaauagaacaacugugagaaugauaacagucuccgaugcguuaguccaaggaucaucacccggacugucugcucgugccaccguuucgaucaugauugggguguuggcaagaguagcguugauuuag

SEQ ID NO: 121297 - protein, 244 aa, Artificial Sequence
  derived and/or modified sequence
MGPPSAAPRGGHRPWQGLLITASLLTFWHPPTTVQFTIEALPSSAAEGKDVLLLACNISETIQAYYWHKGKTAEGSPLIAGYITDIQANIPGAAYSGRETVYPNGSLLFQNITLEDAGSYTLRTINASYDSDQATGQLHVHQNNVPGLPVGAVAGIVTGVLVGVALVAALVCFLLLSRTGRASIQRDLREQPPPASTPGHGPSHRSTFSAPLPSPRTATPIYEELLYSDANIYCQIDHKADVVS

SEQ ID NO: 121298 - DNA, 1205 bp, Artificial Sequence
  derived and/or modified sequence
acagaaggaggaaggtcagcagccccgacagccgacagtcacagcagctctgacaagagcgttcctggagcccagctcctctccacagaggacaagcaggcagcagagaccatgggccccccctcagccgctccccgtggagggcacaggccctggcaggggctcctgatcacagcctcacttttaaccttctggcacccgcccaccactgtccagttcactattgaagccctgccgtccagtgctgcagagggaaaggatgttcttctactggcctgcaatatttcagaaactattcaagcctattattggcacaaggggaaaacggcagaagggagccctctcattgctggttatataacagacattcaagcaaatatcccaggggccgcatacagtggtcgagagacagtataccccaatggatccctgctgttccaaaacatcaccctggaggacgcaggatcctacaccctacgaaccataaatgccagttacgactctgaccaagcaactggccagctccacgtacaccaaaacaacgtcccaggccttcctgtgggggccgtcgctggcatcgtgactggggtcctggttggggtggctctggtggccgccctggtgtgttttctgcttctctccaggactggaagggccagcatccagcgtgacctcagggagcagccgcccccagcctccacccctggccatggtccctctcacagatccaccttctcggcccctctacccagccccagaacagccactcccatctatgaggaattgctatactctgatgcaaacatttactgccagatcgaccacaaagcagatgtggtctcttaggttcctctgggagctgctcttgtgggttgatggagcgtccccaaagctcccagccctggggacggggaaggacatggagcctgagccagagaaccagctctgagtcctgaggagacacaggcctggggacagggagggatgggagtccctgctgaatatctggagaccctgacaggttgccctgggctctgggtgggccgggacaaaggcctctcatcaccacaggaagcgggggcttgcaaggaaagtgaatgggcctgtggcccacccggggtcaccaggaaaggatctgaataaagaggacccttcctctcattggctctttttctgctcacgggaacttagcagaaactcacctg

SEQ ID NO: 121299 - DNA, 735 bp, Artificial Sequence
  derived and/or modified sequence
atgggaccaccttcagccgcaccacgcggaggacacaggccttggcaagggctgctgattacagccagcctgctgacattctggcatccaccaacaacagtccagtttaccatcgaagcgctcccgtcttccgcggccgagggtaaagatgtgctcctcctggcctgcaatatctctgagaccattcaggcctactactggcacaagggcaaaacggccgaaggctcccctttgattgccggctacatcactgacatccaagccaatatcccgggtgctgcctatagcgggagggaaacagtctaccctaatgggtctctgctctttcagaacattacgttggaggacgctgggagctatacgcttagaacaatcaatgccagctacgactctgatcaggccaccggccagctgcacgtgcatcagaataacgttcccggcttaccggtgggggccgtggccggaattgtgacaggagtcctggtcggtgttgccttggtggccgcactggtctgctttttgctgcttagtaggactggtagggcttcgatccagagagacctgcgcgagcagcctcctcctgcatccacacccggtcatggcccttcacaccggtctacttttagcgccccattgccaagcccccgtacagcaactccaatctacgaagaactgttgtattccgacgctaatatctactgtcagatcgatcataaagctgatgtggtgagctag

SEQ ID NO: 121300 - DNA, 735 bp, Artificial Sequence
  derived and/or modified sequence
atgggccccccatctgctgccccccggggcggccaccggccctggcagggcctgctgatcacagccagcctgctgaccttctggcacccccccaccaccgtgcagttcaccatcgaggccctgcccagcagcgctgctgagggcaaggatgtgctgctgctggcctgcaacatcagcgagaccatccaggcctactactggcacaagggcaagacagctgagggcagccccctgattgctggctacatcacagacatccaggccaacatccctggagctgcctacagcggccgggagaccgtgtaccccaacggcagcctgctcttccagaacatcaccctggaggatgctggcagctacaccctgcggaccatcaatgccagctatgacagcgaccaggccaccggccagctgcacgtgcaccagaacaacgtgcccggcctgcctgtgggcgctgtggccggcatcgtgactggagtgctggtgggcgtggccctggtggccgccctggtgtgcttcctgctgctgagcaggacaggccgggccagcatccagagggacctgcgggagcagcccccaccagccagcaccccaggccacggccccagccacaggagcaccttcagcgcccccctgcccagccccaggacagccacccccatctatgaggagctgctgtacagtgatgccaacatctactgccagattgaccacaaggcagatgtggtgtcctag

SEQ ID NO: 121301 - DNA, 735 bp, Artificial Sequence
  derived and/or modified sequence
atgggcccccccagcgccgccccccggggcggccaccggccctggcagggcttactgataactgcatcactcctgacgttctggcatcctcctaccacagttcagtttaccattgaggccctgccatcttccgccgccgagggcaaagacgtcctgctgcttgcatgcaacatatcagagacaattcaggcatactattggcataaggggaagacagcggagggcagcccattgatagctggctacattactgacatccaggccaacatcccaggcgccgcttattcgggtagggagacggtttacccaaacggatctctgctgtttcagaatattaccctcgaggatgcaggctcgtataccctaaggactattaacgcttcttacgacagtgaccaggcaaccggacagctgcacgtgcaccagaacaatgttccaggcttgcccgtaggcgccgtggccggaatagtgactggcgtgctcgtgggagtggcactagttgcagccctcgtttgtttcctgttgctgtctagaaccggacgagcaagcattcagcgggatctgagagagcaaccaccgcccgcctccactccaggccacggcccatcgcaccggtctacattctccgcgcctctgccttccccgagaaccgccacacccatttacgaggaattattatattccgacgctaatatctattgccaaatcgaccataaggccgacgtggtatcctag

SEQ ID NO: 121302 - DNA, 735 bp, Artificial Sequence
  derived and/or modified sequence
atgggtccaccttcggcggctccgagaggtggccaccgtccgtggcagggactgctgatcaccgcttcattactgaccttttggcaccctcccaccaccgtccagttcacgattgaagcccttccttcaagcgccgctgagggcaaagatgtattgctgctggcgtgtaacatttctgagacgattcaggcgtactattggcacaagggaaagacagctgagggcagccctctcatcgcaggctacatcacagacatccaagccaatataccgggagcagcttacagtggcagggaaaccgtataccccaatgggtcactcctgttccaaaatatcacactggaggatgctgggtcatacacacttcggactataaatgcctcatacgactctgaccaggcgacaggacagctgcatgtgcaccagaataatgtgcccggtcttcccgttggcgcagtggcaggaatcgtgactggagtgctggtgggagtggccctggtggcagcgctggtctgcttcctgttgctgtcgagaaccggacgcgctagcatccagagagatctgagagaacaaccaccccctgccagtacacccggtcacggaccatcccaccggtctacattctccgctccactgccgagtccacggaccgccacacctatctacgaagagctgctgtattctgatgcaaacatttactgccagattgaccacaaagctgacgttgtgtcatag

SEQ ID NO: 121303 - DNA, 735 bp, Artificial Sequence
  derived and/or modified sequence
atgggcccccccagcgccgcccccagaggcggccacagaccctggcagggcctgctgatcaccgccagcctgctgaccttctggcacccccccaccaccgtgcagttcaccatcgaggccctgcccagcagcgccgccgagggcaaggacgtgctgctgctggcctgcaacatcagcgagaccatccaggcctactactggcacaagggcaagaccgccgagggcagccccctgatcgccggctacatcaccgacatccaggccaacatccccggcgccgcctacagcggcagagagaccgtgtaccccaacggcagcctgctgttccagaacatcaccctggaggacgccggcagctacaccctgagaaccatcaacgccagctacgacagcgaccaggccaccggccagctgcacgtgcaccagaacaacgtgcccggcctgcccgtgggcgccgtggccggcatcgtgaccggcgtgctggtgggcgtggccctggtggccgccctggtgtgcttcctgctgctgagcagaaccggcagagccagcatccagagagacctgagagagcagcccccccccgccagcacccccggccacggccccagccacagaagcaccttcagcgcccccctgcccagccccagaaccgccacccccatctacgaggagctgctgtacagcgacgccaacatctactgccagatcgaccacaaggccgacgtggtgagctag

SEQ ID NO: 121304 - protein, 129 aa, Artificial Sequence
  derived and/or modified sequence
MMTDLKQSHSVRLNDGPFMPVLGFGTYAPDHTPKSQAAEATKVAIDVGFRHIDSAYLYQNEEEVGQAIWEKIADGTVKREEIFYTIKLWATFFRAELVHPALERSLKKLGPDYVDLFIIHVPFAMKGSS

SEQ ID NO: 121305 - protein, 323 aa, Artificial Sequence
  derived and/or modified sequence
MDPKYQRVELNDGHFMPVLGFGTYAPPEVPRNRAVEVTKLAIEAGFRHIDSAYLYNNEEQVGLAIRSKIADGSVKREDIFYTSKLWCTFFQPQMVQPALESSLKKLQLDYVDLYLLHFPMALKPGETPLPKDENGKVIFDTVDLSATWEVMEKCKDAGLAKSIGVSNFNCRQLEMILNKPGLKYKPVCNQVECHPYLNQSKLLDFCKSKDIVLVAHSALGTQRHKLWVDPNSPVLLEDPVLCALAKKHKQTPALIALRYQLQRGVVVLAKSYNEQRIRENIQVFEFQLTSEDMKVLDGLNRNYRYVVMDFLMDHPDYPFSDEY

SEQ ID NO: 121306 - DNA, 972 bp, Artificial Sequence
  derived and/or modified sequence
atggaccccaagtaccagagagtggagctgaacgacggccacttcatgcccgtgctgggcttcggcacctacgccccccccgaggtgcccagaaacagagccgtggaggtgaccaagctggccatcgaggccggcttcagacacatcgacagcgcctacctgtacaacaacgaggagcaggtgggcctggccatcagaagcaagatcgccgacggcagcgtgaagagagaggacatcttctacaccagcaagctgtggtgcaccttcttccagccccagatggtgcagcccgccctggagagcagcctgaagaagctgcagctggactacgtggacctgtacctgctgcacttccccatggccctgaagcccggcgagacccccctgcccaaggacgagaacggcaaggtgatcttcgacaccgtggacctgagcgccacctgggaggtgatggagaagtgcaaggacgccggcctggccaagagcatcggcgtgagcaacttcaactgcagacagctggagatgatcctgaacaagcccggcctgaagtacaagcccgtgtgcaaccaggtggagtgccacccctacctgaaccagagcaagctgctggacttctgcaagagcaaggacatcgtgctggtggcccacagcgccctgggcacccagagacacaagctgtgggtggaccccaacagccccgtgctgctggaggaccccgtgctgtgcgccctggccaagaagcacaagcagacccccgccctgatcgccctgagataccagctgcagagaggcgtggtggtgctggccaagagctacaacgagcagagaatcagagagaacatccaggtgttcgagttccagctgaccagcgaggacatgaaggtgctggacggcctgaacagaaactacagatacgtggtgatggacttcctgatggaccaccccgactaccccttcagcgacgagtactag

SEQ ID NO: 121307 - DNA, 84 bp, Artificial Sequence
  derived and/or modified sequence
aaccccaactggaagagaatcagactgaacgacggccccttcatgcccgtgctgggcttcggcacctacgcccccgaccactag

SEQ ID NO: 121308 - DNA, 1414 bp, Artificial Sequence
  derived and/or modified sequence
aggaagaagtgaatagaagaaaagagggtgttgcaaatcaaaagcacatagagatatcatcttacaccagtcagaatggctattcttaaaatgtcagacaacaacagatattggattgccacatcatcaggaccacaccttcatcaggaatgaatattcctactacaattaaagaagaaacaaaattaatttgttggtgaaaaacatgttgctgaaggaaacaggatctgcttagtgaaagaagtggcaagcaatggatcccaaatatcagcgtgtagagctaaatgatggtcacttcatgcccgtattgggatttggcacctatgcacctccagaggttccgaggaacagagctgtagaggtcaccaaattagcaatagaagctggcttccgccatattgattctgcttatttatacaataatgaggagcaggttggactggccatccgaagcaagattgcagatggcagtgtgaagagagaagacatattctacacttcaaagctttggtgcactttctttcaaccacagatggtccaaccagccttggaaagctcactgaaaaaacttcaactggactatgttgacctctatcttcttcatttcccaatggctctcaagccaggtgagacgccactaccaaaagatgaaaatggaaaagtaatattcgacacagtggatctctctgccacatgggaggtcatggagaagtgtaaggatgcaggattggccaagtccatcggggtgtcaaacttcaactgcaggcagctggagatgatcctcaacaagccaggactcaagtacaagcctgtctgcaaccaggtagaatgtcatccttacctcaaccagagcaaactgctggatttctgcaagtcaaaagacattgttctggttgcccacagtgctctgggaacccaacgacataaactatgggtggacccaaactccccagttcttttggaggacccagttctttgtgccttagcaaagaaacacaaacaaaccccagccctgattgccctgcgctaccagctgcagcgtggggttgtggtcctggccaagagctacaatgagcagcggatcagagagaacatccaggtttttgaattccagttgacatcagaggatatgaaagttctagatggtctaaacagaaattatcgatatgttgtcatggattttcttatggaccatcctgattatccattttcagatgaatattagcatagagggtgttgcacgacatctagcagaaggccctgtgtgtggatggtgatgcagaggatgtctctatgctggtgactggacacacagcctctggttaaatccctcccctcctgcttggcaacttcagctagctagatatatccatggtccagaaagcaaacataataaatttttatcttgaagtaa

SEQ ID NO: 121309 - DNA, 1194 bp, Artificial Sequence
  derived and/or modified sequence
acaggatctgcttagtgaaagaagtggcaagcaatggatcccaaatatcagcgtgtagagctaaatgatggtcacttcatgcccgtattgggatttggcacctatgcacctccagaggttccgaggaacagagctgtagaggtcaccaaattagcaatagaagctggcttccgccatattgattctgcttatttatacaataatgaggagcaggttggactggccatccgaagcaagattgcagatggcagtgtgaagagagaagacatattctacacttcaaagctttggtgcactttctttcaaccacagatggtccaaccagccttggaaagctcactgaaaaaacttcaactggactatgttgacctctatcttcttcatttcccaatggctctcaagccaggtgagacgccactaccaaaagatgaaaatggaaaagtaatattcgacacagtggatctctctgccacatgggaggtcatggagaagtgtaaggatgcaggattggccaagtccatcggggtgtcaaacttcaactgcaggcagctggagatgatcctcaacaagccaggactcaagtacaagcctgtctgcaaccaggtagaatgtcatccttacctcaaccagagcaaactgctggatttctgcaagtcaaaagacattgttctggttgcccacagtgctctgggaacccaacgacataaactatgggtggacccaaactccccagttcttttggaggacccagttctttgtgccttagcaaagaaacacaaacaaaccccagccctgattgccctgcgctaccagctgcagcgtggggttgtggtcctggccaagagctacaatgagcagcggatcagagagaacatccaggtttttgaattccagttgacatcagaggatatgaaagttctagatggtctaaacagaaattatcgatatgttgtcatggattttcttatggaccatcctgattatccattttcagatgaatattagcatagagggtgttgcacgacatctagcagaaggccctgtgtgtggatggtgatgcagaggatgtctctatgctggtgactggacacacagcctctggttaaatccctcccctcctgcttggcaacttcagctagctagatatatccatggtccagaaagcaaacataataaatttttatcttgaagtaa

SEQ ID NO: 121310 - DNA, 81 bp, Artificial Sequence
  derived and/or modified sequence
aatccaaattggaaaaggataaggctgaatgatggacccttcatgccagtgctgggatttggcacttatgctcctgatcat

SEQ ID NO: 121311 - DNA, 972 bp, Artificial Sequence
  derived and/or modified sequence
atggatccaaaataccagagagtggagctgaacgatggacactttatgcctgtcctaggcttcggcacctacgctcctcccgaagtgcctaggaatcgcgccgtggaggtaaccaaactagcaatcgaggcgggcttccgtcatatcgactctgcatacctctacaataatgaggaacaagtgggcctcgccattcggagcaagattgccgacggatccgtgaagcgagaagatatcttttacacttctaaactctggtgtactttcttccagccccagatggtgcagccagctctggaatcaagcctgaaaaagctccagcttgattatgtggacctgtacttgttacatttccccatggccctgaagccaggcgagacaccactgccaaaggacgagaatgggaaagttatcttcgatacggtggatctaagtgcaacctgggaggttatggagaaatgcaaagatgctggcctcgccaaaagcatcggtgtgtccaacttcaactgtaggcagctcgaaatgattctcaacaagcccggcctcaagtacaaaccagtgtgtaaccaggtcgaatgtcatccatacctaaatcagagtaagctgctggacttttgcaagtccaaggacatcgtgttagtagcacattcagccctgggcacacagagacataagctgtgggtggacccaaattcacctgtgctgcttgaggatccagtgttatgcgccttggccaagaagcacaagcagaccccggctctgattgcccttaggtaccagctccagagaggagttgttgttcttgcaaagtcctacaacgagcaaaggattcgtgaaaacatccaggtattcgagtttcaactgacgagcgaggatatgaaagtactcgacggtctgaaccggaattacaggtacgtcgtcatggacttcctcatggatcatcctgactacccattcagcgatgaatactag

SEQ ID NO: 121312 - DNA, 972 bp, Artificial Sequence
  derived and/or modified sequence
atggatcccaagtaccaacgggtggagttaaacgatgggcacttcatgcccgttctgggcttcggcacctacgcccccccggaggttcctagaaatagggccgtggaagtcacgaaattagcaattgaggcaggatttcgccacattgatagcgcctacttatacaacaatgaagaacaggtggggctggctattagatctaagattgcggatggctctgtgaagagagaggatattttttatacttctaagctgtggtgcaccttttttcagccccagatggttcagcctgcactggaaagcagccttaaaaagctgcagctagattacgtggatctgtatctcttgcattttccaatggctctcaagcccggcgaaacgcccctgcctaaagatgagaacgggaaggttatcttcgatactgtggacttgtccgctacctgggaggtcatggaaaagtgtaaagacgcgggactggcaaaaagcattggcgtttctaacttcaactgccgccagctggagatgatcttgaacaagcccggactaaagtataagcctgtgtgcaaccaggtggagtgccatccttacttgaatcagagtaagctgctggacttttgcaagtccaaggacattgtcttggtggcacactccgccctgggtactcagcgccacaagctgtgggtcgaccctaatagtccggtcctgttagaggacccagtgttatgtgcattggccaagaagcacaagcaaaccccggccttgattgctctgcgataccagctgcaaagaggagtcgtcgtgctggctaaatcgtacaacgagcagcgtattcgagaaaatattcaggtgttcgagtttcagttgaccagcgaagacatgaaggtcctggatggactgaacaggaactataggtacgtcgtaatggatttcctgatggatcaccctgactaccccttctccgacgaatattag

SEQ ID NO: 121313 - DNA, 84 bp, Artificial Sequence
  derived and/or modified sequence
aacccgaactggaagagaatcagactcaacgatggccccttcatgcccgtgctaggcttcggcacgtacgctccagaccactag

SEQ ID NO: 121314 - DNA, 972 bp, Artificial Sequence
  derived and/or modified sequence
atggaccccaagtaccagagggtggagctgaatgatggccacttcatgcctgtgctgggcttcggcacctacgcccctcctgaggtgcccaggaacagagctgtggaggtgaccaagctggccatcgaggccggcttccgccacattgattctgcctacctgtacaacaatgaggagcaggtgggcctggccatccgcagcaagattgctgatggctctgtgaagcgggaggacatcttctacaccagcaagctgtggtgcaccttcttccagccccagatggtgcagcctgccctggagagcagcctgaagaagctgcagctggactatgtggacctgtacctgctgcacttccccatggccctgaagccaggagagacccccctgcccaaggatgaaaatggcaaggtgatctttgacacagtggacctgagcgccacctgggaggtgatggagaagtgcaaggatgctggcctggccaagagcattggagtgagcaacttcaactgccggcagctggagatgatcctgaacaagccaggcctgaagtacaagcctgtgtgcaaccaggtggagtgccacccctacctgaaccagagcaagctgctggacttctgcaagagcaaggacatcgtgctggtggcccacagcgccctgggcacccagaggcacaagctgtgggtggaccccaacagccctgtgctgctggaggaccctgtgctgtgtgccctggccaagaagcacaagcagaccccagccctgattgccctgcgctaccagctgcagaggggcgtggtggtgctggccaagagctacaatgagcagaggatccgggagaacatccaggtgtttgagttccagctgaccagcgaggacatgaaggtgctggatggcctgaacagaaactaccgctacgtggtgatggacttcctgatggaccacccagactaccccttcagtgatgagtactag

SEQ ID NO: 121315 - DNA, 84 bp, Artificial Sequence
  derived and/or modified sequence
aaccccaactggaagaggatccggctgaatgatggccccttcatgcctgtgctgggcttcggcacctacgccccagaccactag

SEQ ID NO: 121316 - DNA, 972 bp, Artificial Sequence
  derived and/or modified sequence
atggaccccaagtaccagcgggtggagctgaacgacggccacttcatgcccgtgctgggttttgggacttacgctccaccagaagttccacgcaatcgcgctgtcgaggtgaccaagttagccattgaggccgggtttcgccatattgatagcgcctatctgtacaacaatgaggaacaagtcggcctggccatcagatctaagatagccgatggttctgttaagcgtgaagacattttctacacatctaagctctggtgcacattctttcaacctcagatggtccagcctgcactggaatcgagccttaagaagctgcagttggactacgtggacctgtacctgctccatttccctatggcactgaagcccggagagacacccctgcctaaagacgaaaacggcaaggtgatcttcgacacggttgacctctccgctacctgggaggtcatggagaagtgtaaggatgccggcctggctaagagtattggggttagcaacttcaactgcaggcaactggagatgatcttgaataagcccggcctaaaatataagccagtctgcaatcaggtcgagtgccacccttacttaaatcagtccaaattattagatttctgtaagtctaaagacatagtgctggtggcccactccgcccttgggacccaaagacataaattgtgggtggaccccaattctcccgtgctgctggaagatcccgtgctgtgcgccctggcaaaaaagcacaagcaaacaccagccctgatcgccctcaggtaccagctccaaaggggagttgttgtcctggcaaagagttacaatgagcaacgcattcgcgagaatatccaagttttcgagttccaactcactagcgaggatatgaaggttctcgacgggctgaaccgtaattacaggtacgtcgtgatggacttcttgatggatcatcccgattaccctttttcggacgaatactag

SEQ ID NO: 121317 - DNA, 972 bp, Artificial Sequence
  derived and/or modified sequence
atggaccccaagtaccagcgggtggagctgaacgacggccacttcatgcctgttctagggttcggaacatatgccccccccgaggtgccccggaaccgcgctgtggaggtgaccaagctcgccatagaagccggcttcagacacattgacagtgcatatctttataacaatgaagagcaggttggactggcgatcaggagcaagattgccgacggaagtgtcaaaagagaggatatcttctacactagtaagctttggtgcacatttttccagcctcagatggtccagcccgccttggaatcaagtctcaagaagttacagttagactatgtagacctgtatctcctgcactttccaatggcacttaaaccaggtgagaccccattgcctaaggacgagaatggcaaggttatcttcgatacagtcgatctcagcgcgacctgggaggtgatggagaaatgtaaggacgccggattggcgaagtcaatcggggtatcaaattttaattgtaggcagttagagatgatactgaataagccgggccttaagtataaaccagtttgcaaccaagtcgagtgtcatccctatctgaaccagtctaagctcttggacttctgcaaaagcaaggacatcgtcttagttgcccatagcgcccttggcacccagaggcataagctctgggttgatcccaatagccctgtgttattggaagatcccgtcctatgcgccctcgccaaaaagcataagcagactcctgccctgatcgctttacgctaccagctccagagaggtgtggtggtgctagccaaaagttacaatgagcaaagaattcgcgaaaatatccaggtgtttgaattccaactgacgagtgaggacatgaaagtcctggacgggcttaaccggaattacaggtatgtggtaatggacttcctaatggatcatcctgattacccattctccgacgaatattag

SEQ ID NO: 121318 - DNA, 84 bp, Artificial Sequence
  derived and/or modified sequence
aaccccaactggaagcggatccggctgaacgacggccccttcatgcctgtcttgggcttcggcacctacgctcccgaccattag

SEQ ID NO: 121319 - DNA, 972 bp, Artificial Sequence
  derived and/or modified sequence
atggatcctaagtatcagcgggtggaactgaacgatgggcactttatgccagtcttaggtttcgggacctacgcccctcctgaagtgccacgaaatagggccgtcgaagtgacaaagctagctattgaagccggttttcggcacatcgactcagcctacctgtataacaacgaagagcaagtaggcctggccattagatccaagattgcggatggcagcgttaagcgggaggacattttctacactagcaagttatggtgtaccttctttcagccgcagatggtgcaacccgctctggaatcgagcttgaaaaaactccagctcgactacgttgacctatatctgctccactttcccatggcactgaaacccggagagaccccattacccaaagatgagaatggaaaagtgatctttgataccgtagacttgtctgccacctgggaggtaatggagaaatgcaaagatgcaggcctcgctaaaagtattggcgtgagtaactttaactgtcgacaactggagatgattttaaacaagcctggcctgaaatacaagccagtttgtaaccaggtggaatgccacccgtaccttaaccagagtaaactactcgatttttgcaagagtaaggacattgtgctggtcgcccattccgccctggggacgcagcgccacaagttatgggtggatccaaactcccccgtgttacttgaggacccagtgctttgcgccctcgctaagaaacataagcagaccccagccctgattgcgctgagatatcaacttcagcggggagtcgtggtgctcgcaaagtcctataacgagcagcgcatccgcgaaaacattcaagtattcgagtttcagctgactagcgaggacatgaaggtattggacggtctgaaccggaattatcggtatgtggtaatggacttccttatggatcatcctgactacccatttagcgacgagtactag

SEQ ID NO: 121320 - DNA, 972 bp, Artificial Sequence
  derived and/or modified sequence
atggaccctaaataccaacgagtggagctaaatgatggtcattttatgccggtcctgggattcgggacctacgccccacctgaggtgcctagaaatagggctgtggaggtcaccaaactggctatcgaagctggattccgccatattgactcggcctacctctacaataatgaagaacaggtaggcctggccatccgtagcaagattgccgacggctcagtgaagagagaggacatcttttatacatcgaaattgtggtgcaccttttttcagcctcagatggtgcagccagctctcgaaagttctcttaagaaattacagctcgattatgtagatctatacctcctccactttcctatggcccttaagcccggagagacacccctcccaaaagatgaaaatggcaaagtcatatttgatacagtcgacctctccgccacttgggaggtcatggagaaatgtaaagacgccggactagcaaagtcaatcggcgtcagtaacttcaattgtcggcagctcgaaatgatcctaaacaagcctggcttaaagtacaagcccgtgtgcaatcaagtggaatgccatccctatcttaaccagagtaagttgctggatttctgcaagagcaaagacatcgtgcttgtcgctcacagcgctttaggcactcagcgtcacaagctatgggttgaccccaatagtcctgtcctcttggaggatccggtcctgtgtgctctagctaaaaaacataagcaaacacctgctctgatcgctttgaggtaccagttacagcggggagtagtagtgctggcaaaaagctataatgagcagcgcattagggagaacattcaagtgtttgagttccagttgactagcgaggatatgaaggtactagacgggcttaacagaaattatcgctacgtggttatggactttctaatggaccaccctgactaccctttctccgatgaatattag

SEQ ID NO: 121321 - DNA, 84 bp, Artificial Sequence
  derived and/or modified sequence
aaccctaactggaaaagaatccggctcaatgatggcccattcatgcctgtacttggcttcggaacatatgccccagatcactag

SEQ ID NO: 121322 - DNA, 972 bp, Artificial Sequence
  derived and/or modified sequence
atggaccctaaataccaaagggtagaactgaatgatggacacttcatgccagttctcgggtttgggacctacgcccctcccgaggtccctcgaaaccgcgccgtagaggtcactaagctggccatcgaagccggcttccggcacattgacagtgcctacctctataacaacgaggagcaagtaggcctcgcaataagatccaaaatcgcagacggctctgtgaagcgtgaagatatcttctacactagcaagttgtggtgtacattcttccagccgcagatggtccagcccgcattggagagctctctgaagaagctgcagttagattacgtggatctctatctgctccatttcccgatggcgttgaagcccggagagacaccactgccaaaagatgagaacggaaaggtgatcttcgatacagtagatctgtctgcaacatgggaggttatggagaagtgcaaggatgcgggcctcgccaagtcaataggggtatctaactttaactgccggcagctggaaatgattctcaacaagccaggactgaagtacaagcctgtgtgcaatcaagtggagtgccatccctacctgaaccagtccaaactgctggatttctgcaaaagcaaggatatagtgttagtcgcacactctgcactcggaacacagcgacacaaattgtgggtggatcccaactcccctgtgttgctggaagatcccgtgctttgtgctcttgctaagaagcacaaacaaacgcccgccctgatagctctgaggtatcagctgcagcggggagttgtggtcctggccaagtcatacaatgagcagcgcatcagagaaaatattcaggttttcgaatttcagctgacatctgaggacatgaaagtgctcgacggactgaatcgcaattatcggtatgtagttatggactttcttatggaccatccggactacccattctccgatgagtactag

SEQ ID NO: 121323 - DNA, 972 bp, Artificial Sequence
  derived and/or modified sequence
atggatcctaaataccaacgcgtggagttgaacgacggacatttcatgcccgttctcggcttcggtacttacgcaccccccgaagtcccccggaatagggccgtggaggttacgaagctggctattgaggccggatttcgccatatcgattctgcctacctctacaataacgaggagcaggttggtctggctattcgtagcaagatcgccgatggatctgtgaaacgagaagacatcttctacacctccaagctgtggtgcactttcttccagccacagatggtacagccagccctggagtcttctctgaagaagctgcagctggactacgtggacctgtatctgctccatttccctatggctctgaagccaggcgaaacgccgctacccaaagatgagaacggaaaagtgatattcgatacggtagacctgagtgctacttgggaagtgatggaaaaatgtaaagacgcaggattggctaagtcaattggggtgagtaacttcaactgtcgccagttagaaatgatcttgaacaaaccaggactgaagtataagcccgtctgtaaccaagtcgagtgtcatccttatctcaatcaaagcaagctcctggacttttgcaagagcaaagatatagtactcgtcgcccactccgcattggggacacagcgtcacaaactgtgggtggaccccaatagtcctgtcttactcgaggatccagtgttgtgcgcccttgccaagaaacacaaacagactcctgcccttattgccctgcgctaccaactgcagcggggagtggtggtgttggccaagagctataacgaacagagaatccgggagaacatccaggtcttcgagttccagctgacatccgaggatatgaaagtactcgacggactcaaccgtaactatcgctacgtagtaatggattttctaatggatcacccagactatcccttttcagacgagtattag

SEQ ID NO: 121324 - DNA, 381 bp, Artificial Sequence
  derived and/or modified sequence
atggatcccaaataccagcgggtcgagctgaatgacggtcactttatgcctgtgctcggctttggcacctacgcaccacccgaggtccctagaaatcgtgcagttgaggttaccaagctggccattgaagcggggtttcggcacatcgactccgcatacctgtacaacaatgaggaacaggttgggctcgctatccgctccaagatcgccgatggctccgtgaaacgtgaggacattttctatacgagcaagctctggtgcacctttttccagccccagatggtgcaaccagctttagaaagtagtctcaagaagctccagctggattatgtggatctgtacttgctgcattttcctatggctctgaaaagtacaacctag

SEQ ID NO: 121325 - DNA, 381 bp, Artificial Sequence
  derived and/or modified sequence
atggaccccaagtaccagagggtggagctgaatgatggccacttcatgcctgtgctgggcttcggcacctacgcccctcctgaggtgcccaggaacagagctgtggaggtgaccaagctggccatcgaggccggcttccgccacattgattctgcctacctgtacaacaatgaggagcaggtgggcctggccatccgcagcaagattgctgatggctctgtgaagcgggaggacatcttctacaccagcaagctgtggtgcaccttcttccagccccagatggtgcagcctgccctggagagcagcctgaagaagctgcagctggactatgtggacctgtacctgctgcacttccccatggccctgaagagcaccacctag

SEQ ID NO: 121326 - DNA, 411 bp, Artificial Sequence
  derived and/or modified sequence
acaggatctgcttagtgaaagaagtggcaagcaatggatcccaaatatcagcgtgtagagctaaatgatggtcacttcatgcccgtattgggatttggcacctatgcacctccagaggttccgaggaacagagctgtagaggtcaccaaattagcaatagaagctggcttccgccatattgattctgcttatttatacaataatgaggagcaggttggactggccatccgaagcaagattgcagatggcagtgtgaagagagaagacatattctacacttcaaagctttggtgcactttctttcaaccacagatggtccaaccagccttggaaagctcactgaaaaaacttcaactggactatgttgacctctatcttcttcatttcccaatggctctcaagagtacaacc

SEQ ID NO: 121327 - DNA, 972 bp, Artificial Sequence
  derived and/or modified sequence
atggaccccaagtaccagcgggtggagctgaacgacggccacttcatgccggtgcttgggttcgggacttacgcacccccagaagttccgcgtaatcgggccgtcgaagtgacgaagcttgcaatagaagccgggttcaggcatatcgattcggcgtacttatacaacaacgaggagcaggttggcctggctatccgttctaagattgccgacgggtccgttaagcgtgaagatatcttctacacgtcaaaattatggtgcaccttctttcagccccagatggttcagcctgcattggagagctcactcaagaagctgcagctcgattatgtggatctctacctgttgcacttcccaatggctcttaagccgggggaaaccccgcttccgaaggacgagaacgggaaagtgatcttcgatacagttgacctctcagccacgtgggaggtcatggagaaatgcaaggacgccggcctcgcaaaatcaatcggtgtgagcaactttaactgccggcagctcgaaatgatcctgaataagcccggcttgaaatataaaccagtgtgcaatcaagtcgagtgccatccctacctgaatcagagcaagttgttagatttttgcaagtctaaggacattgtccttgtcgcccattctgcactcgggacccagcggcacaaactctgggtagatcctaacagcccagtcttgcttgaagatcctgtgctctgtgcactggccaaaaaacacaaacagacccccgcactaatagctctaaggtaccagctgcaaagaggtgtagtggtgttggcgaaaagctataacgaacaaaggataagggaaaacatccaggtgttcgaattccagctcacttcagaggatatgaaagttctggatgggctgaatcgtaattacaggtacgtcgtgatggattttctgatggaccaccccgattacccattttcggacgaatactag

SEQ ID NO: 121328 - DNA, 972 bp, Artificial Sequence
  derived and/or modified sequence
atggaccccaagtaccagcgggtggagctgaacgacggccacttcatgcctgtcctcggctttgggacctacgctccccccgaggtgcctcggaatagggccgttgaagtgactaagctggcaattgaagctggctttagacacattgacagcgcatatctgtacaacaatgaagagcaagtgggtctggccatcaggtcaaagatcgccgacggtagcgtgaagcgggaagatattttttatacatccaaactctggtgcacattcttccagcctcaaatggttcaacccgcgttggagagctcactgaagaagcttcagcttgattacgtcgatctttacctcttgcattttcctatggccctgaagcctggtgagacccctctacccaaggacgaaaacggaaaggtaatattcgacacagtcgatctcagcgctacttgggaggtcatggaaaaatgtaaagatgctgggcttgcaaagtcaattggggttagcaactttaactgtcgccagctggaaatgattctgaacaagccgggactaaaatataagcctgtctgtaaccaggtcgagtgtcacccttatctgaatcaaagcaagctccttgatttttgtaaatccaaagacattgtgttagtagctcatagtgccctcggaacacagagacacaaactctgggtagacccgaattccccagttctgcttgaggatcctgttctgtgcgcactcgccaagaagcataaacagactcccgcactgatcgccctccggtaccagctgcagaggggagtggtggtgctggccaaaagctacaacgagcagcgtatccgcgagaatattcaggtgtttgagtttcagcttaccagcgaggacatgaaagtgcttgacggcctcaatcgcaactaccggtacgtggtgatggatttccttatggatcacccagactaccccttctccgacgaatactag

SEQ ID NO: 121329 - DNA, 381 bp, Artificial Sequence
  derived and/or modified sequence
atggaccccaagtaccagcgggtggagctgaacgacggccacttcatgcccgtgttggggttcggcacatatgcccctcctgaggtgccgcgcaaccgtgccgttgaagtcacgaaactggccatagaagccggcttccgccacatcgactccgcttatctctataataacgaggagcaggttgggctggctattcgcagcaagattgcagacggctccgttaagcgcgaggacatcttctatacctccaagctgtggtgcactttcttccagccccaaatggtgcagccagcactcgagagcagtctcaagaagttgcagctggattacgtcgacctgtacctgctgcatttccccatggctttgaaaagtacaacgtag

SEQ ID NO: 121330 - DNA, 972 bp, Artificial Sequence
  derived and/or modified sequence
atggacccaaagtaccagcgggtcgaacttaatgacggccacttcatgccagtcttgggttttggcacgtacgccccaccggaagtaccgaggaaccgggcagttgaggttactaagttggcgattgaagctggttttaggcacatcgactccgcttatctgtacaataacgaagagcaggtgggcttggctatccgtagcaaaatcgccgatgggtccgtcaagcgggaggacattttttatactagtaagctgtggtgtacgttctttcagccccagatggttcagccggcactggagtctagcctgaagaagctgcagctggattatgtggacctatatttgctgcatttccccatggccctgaaacccggtgagactcccctgccaaaagatgaaaatggcaaagtcatttttgacacggtggacctgagtgctacttgggaggttatggaaaaatgtaaggacgcaggactggccaagtcaatcggcgtcagtaatttcaactgcagacaattagaaatgattctgaataagccaggactaaagtataagccagtgtgcaatcaggtggagtgtcacccctatctaaaccagtccaagctgctggacttctgtaagagcaaggacattgtgctcgttgcccactccgccctcgggacgcagcggcacaagctgtgggtcgaccccaacagtcctgtgctcctggaggatcccgtcctttgcgccctggccaaaaaacacaaacagacccccgctctgatcgccctgcgttaccaattgcaacggggagttgtcgttttggccaaaagctacaacgagcagaggataagggagaatatccaagtatttgagttccagctcacaagtgaggacatgaaagtactagacggcctcaaccggaactaccgttatgtggtgatggactttctgatggatcatcccgattacccattctcagatgagtactag

SEQ ID NO: 121331 - DNA, 972 bp, Artificial Sequence
  derived and/or modified sequence
atggatcctaagtatcagcgcgtggagctgaacgatgggcatttcatgcctgtgcttggatttggtacttacgcaccaccggaggtgcctcgcaatagggccgttgaagtgactaaattggcaatcgaggcgggattcaggcatatcgacagtgcttacctatataacaacgaggaacaagttggcttggcaatacgatcgaaaatagctgacggaagcgtcaagcgggaggacatcttttacacctccaagctctggtgcaccttctttcagccacagatggtccagcccgcactagaatcttctcttaaaaaacttcagttggactatgtggatctctacttgctccatttccccatggcactgaaacccggagagaccccactccccaaggacgagaatgggaaggtgatatttgataccgtagatctctcagccacatgggaggtgatggaaaagtgtaaggatgcaggccttgccaaatcaatcggggtgtctaacttcaactgtcgccaactagagatgatccttaacaagcctggactcaaatataaaccggtctgtaaccaggtcgaatgccacccctatctcaaccaatcaaaactgctggacttctgcaaatcaaaggacattgtgcttgtggcccattccgccctgggcactcaaaggcataagctctgggtggaccccaattcccctgtcctcctcgaggaccccgtcctgtgcgctcttgccaagaaacataagcaaacccctgcacttatcgccctgcgctatcagctgcaaagaggcgtggtggttctggccaagtcttacaatgagcagaggatccgggagaacatccaggtttttgagtttcagctgacctcagaagatatgaaggttttagatggactgaataggaattacagatacgtggtgatggattttctcatggaccaccccgactatccattcagtgacgaatattag

SEQ ID NO: 121332 - DNA, 381 bp, Artificial Sequence
  derived and/or modified sequence
atggaccccaaatatcagcgcgttgagttaaatgacggtcatttcatgcccgtgcttggctttggaacgtacgctcccccagaggtgccaaggaatcgggctgttgaagtaacaaagcttgctatcgaggccggtttcaggcatatcgactcagcgtatctctacaacaatgaagaacaagtaggtctggctatacggtctaagattgccgacgggtcagtaaagcgagaagacatcttttatacttccaagctgtggtgcacgttcttccaaccgcagatggttcaacctgcgttagaatcatcacttaaaaagctgcagctggactatgtagacttgtatcttctccactttccaatggctctgaaatcaacaacatag

SEQ ID NO: 121333 - DNA, 381 bp, Artificial Sequence
  derived and/or modified sequence
atggaccccaagtaccagagagtggagctgaacgacggccacttcatgcccgtgctgggcttcggcacctacgccccccccgaggtgcccagaaacagagccgtggaggtgaccaagctggccatcgaggccggcttcagacacatcgacagcgcctacctgtacaacaacgaggagcaggtgggcctggccatcagaagcaagatcgccgacggcagcgtgaagagagaggacatcttctacaccagcaagctgtggtgcaccttcttccagccccagatggtgcagcccgccctggagagcagcctgaagaagctgcagctggactacgtggacctgtacctgctgcacttccccatggccctgaagagcaccacctag

SEQ ID NO: 121334 - protein, 677 aa, Artificial Sequence
  derived and/or modified sequence
MQPTLLLSLLGAVGLAAVNSMPVDNRNHNEGMVTRCIIEVLSNALSKSSAPPITPECRQVLKTSRKDVKDKETTENENTKFEVRLLRDPADASEAHESSSRGEAGAPGEEDIQGPTKADTEKWAEGGGHSRERADEPQWSLYPSDSQVSEEVKTRHSEKSQREDEEEEEGENYQKGERGEDSSEEKHLEEPGETQNAFLNERKQASAIKKEELVARSETHAAGHSQEKTHSREKSSQESGEETGSQENHPQESKGQPRSQEESEEGEEDATSEVDKRRTRPRHHHGRSRPDRSSQGGSLPSEEKGHPQEESEESNVSMASLGEKRDHHSTHYRASEEEPEYGEEIKGYPGVQAPEDLEWERYRGRGSEEYRAPRPQSEESWDEEDKRNYPSLELDKMAHGYGEESEEERGLEPGKGRHHRGRGGEPRAYFMSDTREEKRFLGEGHHRVQENQMDKARRHPQGAWKELDRNYLNYGEEGAPGKWQQQGDLQDTKENREEARFQDKQYSSHHTAEKRKRLGELFNPYYDPLQWKSSHFERRDNMNDNFLEGEEENELTLNEKNFFPEYNYDWWEKKPFSEDVNWGYEKRNLARVPKLDLKRQYDRVAQLDQLLHYRKKSAEFPDFYDSEEPVSTHQEAENEKDRADQTVLTEDEKKELENLAAMDLELQKIAEKFSQRG

SEQ ID NO: 121335 - protein, 289 aa, Artificial Sequence
  derived and/or modified sequence
MPVDNRNHNEGMVTRCIIEVLSNALSKSSAPPITPECRQVLKTSRKDVKDKETTENENTKFEVRLLRDPADASEAHESSSRGEAGAPGEEDIQGPTKADTEKWAEGGGHSRERADEPQWSLYPSDSQVSEEVKTRHSEKSQREDEEEEEGENYQKGERGEDSSEEKHLEEPGETQNAFLNERKQASAIKKEELVARSETHAAGHSQEKTHSREKSSQESGEETGSQENHPQESKGQPRSQEESEEGEEDATSEVDKRRTRPRHHHGRSRPDRSSQGGSLPSEEKGHPQE

SEQ ID NO: 121336 - DNA, 2034 bp, Artificial Sequence
  derived and/or modified sequence
atgcagccgacccttcttttatccttactcggggcagtaggactcgccgcagtgaattcgatgcccgtcgataatcgtaatcacaacgaagggatggtgaccaggtgtattatagaggtgctgtctaatgccctgagtaagagttctgctcctcccatcaccccagagtgcagacaagtgttaaagacgtcgcggaaggacgtcaaagataaggagaccaccgaaaatgaaaacacaaaattcgaagttcgcttgctaagggatcctgccgatgcatccgaagctcacgaaagttcttcccgcggagaggcaggggcccccggcgaggaggatattcagggccccaccaaagccgacaccgaaaagtgggccgaaggcggcggtcactctagggagcgggccgacgaaccccagtggtctctgtatcctagtgattcgcaggtatctgaggaggttaaaacgagacacagcgagaaaagccagagggaggacgaagaggaagaggaaggagaaaactaccagaaaggcgagaggggcgaggattccagtgaagaaaaacacctagaagaacccggggaaactcagaatgccttcctgaacgaacggaaacaagccagcgccattaaaaaagaggagctggtggctcgatctgagacacatgcagccggacacagtcaggaaaaaacccacagtcgtgaaaaatctagccaggaatcaggagaggaaaccggttcccaagaaaaccacccccaggagagtaaagggcagcctcggtcccaggaggaatccgaggaaggcgaggaggacgctacgagtgaggtggacaagcggaggacgcgaccacgccaccaccacgggcggtcacgccctgaccgctcgagtcagggtggaagcctacccagtgaggagaaggggcatcctcaggaagaatccgaagagagtaacgtgagcatggcatccttgggggagaaacgggatcatcattccacccactacagagcatctgaggaggaaccggaatacggagaagagatcaaggggtatccaggagtgcaggcccccgaagatctcgaatgggaacgctacagaggccgcggatccgaagaataccgggcccctaggccgcagtcagaggagtcttgggacgaggaggacaaacgtaattatccttcacttgaactggataagatggcacatggatatggtgaagagagcgaggaagagcgcggccttgagccagggaaggggcgtcatcaccgcggaaggggaggtgaaccacgagcgtattttatgagtgatacacgcgaagagaaaagattccttggagagggacatcaccgggtgcaggaaaatcagatggacaaggcaagacgccatccgcagggcgcatggaaggaattagaccgcaattacctcaattatggtgaagagggggcccctggcaaatggcagcaacagggcgatctgcaggacaccaaagagaaccgagaagaagcaagatttcaagacaaacaatatagcagccatcatacagcggagaagcgaaagcgtctgggcgaactcttcaatccttattatgaccccctgcagtggaaaagcagccacttcgagcggcgggataacatgaatgataattttctggaaggtgaggaagagaatgagctgaccctaaacgaaaaaaactttttccctgaatacaactacgattggtgggaaaagaaacccttctctgaagacgtgaattggggctatgagaagaggaatctagcgcgggtccccaaactagatctgaaaagacagtatgacagagtcgcccagttggatcagctgctgcactataggaagaaaagtgctgaattccctgacttttacgacagcgaggaacctgtgtctacgcaccaggaggccgagaacgagaaggatagagcagatcagacggtgctgactgaagatgagaagaaggagcttgaaaacctggccgccatggacctggagttgcaaaagatagcggagaagttttcgcaacggggctag

SEQ ID NO: 121337 - DNA, 870 bp, Artificial Sequence
  derived and/or modified sequence
atgccggtcgacaatagaaaccacaatgaaggaatggtgacaagatgcattatagaggtactatccaatgcgctcagcaagtcctcggccccccctattactcccgagtgccgccaagttcttaagacctcaaggaaagacgttaaggacaaagagacaacagaaaatgaaaataccaagtttgaagtgaggttactgagagaccctgcagacgcctccgaagctcacgagtctagcagtcgcggagaagccggcgcaccaggtgaggaagacatacagggacccactaaggccgacaccgaaaagtgggcggagggagggggacattctagagaacgcgctgacgagcctcaatggagtctctatccgtccgactcccaagtgagcgaggaggtgaaaactagacacagtgagaaatcccagagagaggacgaagaagaggaggagggtgagaactaccagaaaggggagagaggcgaggatagttccgaagagaagcacctcgaggagccaggtgagactcagaatgcgtttctgaacgagcgaaagcaggctagcgccattaaaaaggaggagctggtagcgcggtccgagactcacgctgcagggcacagccaggagaagacacatagccgggagaagtcttcccaggagtccggggaggagacaggaagtcaggaaaatcatcctcaggagtctaagggacagccaagatcccaggaagaatcagaggaaggggaggaagacgcaaccagcgaggtggataagagacggactagaccccggcaccaccatgggcgctcaaggccggatcgcagcagccaagggggatctcttccaagcgaggagaaggggcaccctcaggagtag

SEQ ID NO: 121338 - DNA, 2034 bp, Artificial Sequence
  derived and/or modified sequence
atgcagcccaccctgctgctgagcctgctgggcgctgtgggcctggccgctgtgaacagcatgcctgtggacaacagaaaccacaatgaaggcatggtgacccgctgcatcatcgaggtgctgagcaatgccctgagcaagagcagcgccccacccatcaccccagagtgccggcaggtgctgaagaccagcaggaaggatgtgaaggacaaggagaccacagaaaatgaaaacaccaagtttgaggtgcggctgctgcgggaccctgcagatgccagcgaggcccacgagagcagcagcagaggagaggccggggcccctggagaggaggacatccagggccccaccaaggctgacacagagaagtgggccgagggcggcggccacagccgggagcgggcagatgagccccagtggagcctgtaccccagcgacagccaggtgtctgaggaggtgaagaccaggcacagcgagaagagccagagagaagatgaggaggaggaggagggggagaactaccagaagggggagcggggggaggacagcagcgaggagaagcacctggaggagcctggagagacccagaatgccttcctgaatgaaaggaagcaggccagcgccatcaagaaggaggagctggtggcccggtctgagacccatgctgctggccacagccaggagaagacccacagccgggagaagagcagccaggagagcggggaggagaccggcagccaggagaaccacccccaggagagcaagggccagcccaggagccaggaggagagcgaggagggggaggaggatgccaccagcgaggtggacaagaggaggacccggcccaggcaccaccacggccgcagcaggccagacaggagcagccagggcggcagcctgcccagcgaggagaagggccacccccaggaggagagcgaggagagcaatgtgtccatggccagcctgggggagaagagggaccaccacagcacccactaccgggccagcgaggaggagccagaatatggagaggagatcaagggctacccaggagtgcaggcccctgaggacctggagtgggagcgctaccggggccggggcagcgaggagtaccgggccccccggccccagagcgaggagagctgggatgaggaggacaagaggaactaccccagcctggagctggacaagatggcccacggctatggagaggagagcgaggaggagcggggcctggagcccgggaagggccgccaccaccggggccggggcggggagccccgggcctacttcatgtctgacacccgggaggagaagcgcttcctgggggagggccaccaccgggtgcaggagaaccagatggacaaggcccggcggcacccccagggcgcctggaaggagctggacaggaactacctgaactacggggaggagggcgcccctgggaagtggcagcagcagggcgacctgcaggacaccaaggagaaccgggaggaggcccgcttccaggacaagcagtacagcagccaccacacagctgagaagaggaagaggctgggggagctgttcaacccctactatgaccccctgcagtggaagagcagccactttgagcggcgggacaacatgaatgacaacttcctggagggggaggaggagaatgagctgaccctgaatgagaagaacttcttccctgagtacaactatgactggtgggagaagaagcccttctctgaagatgtgaactggggctatgagaagaggaacctggcccgggtgcccaagctggacctgaagaggcagtatgacagagtggcccagctggaccagctgctgcactacaggaagaagtctgctgagttcccagacttctatgacagcgaggagcctgtgtccacccaccaggaggctgaaaatgagaaggacagagctgaccagacagtgctgacagaagatgagaagaaggagctggagaacctggccgccatggacctggagctgcagaagattgctgagaagttcagccagaggggctag

SEQ ID NO: 121339 - DNA, 870 bp, Artificial Sequence
  derived and/or modified sequence
atgcctgtggacaacagaaaccacaatgaaggcatggtgacccgctgcatcatcgaggtgctgagcaatgccctgagcaagagcagcgccccacccatcaccccagagtgccggcaggtgctgaagaccagcaggaaggatgtgaaggacaaggagaccacagaaaatgaaaacaccaagtttgaggtgcggctgctgcgggaccctgcagatgccagcgaggcccacgagagcagcagcagaggagaggccggggcccctggagaggaggacatccagggccccaccaaggctgacacagagaagtgggccgagggcggcggccacagccgggagcgggcagatgagccccagtggagcctgtaccccagcgacagccaggtgtctgaggaggtgaagaccaggcacagcgagaagagccagagagaagatgaggaggaggaggagggggagaactaccagaagggggagcggggggaggacagcagcgaggagaagcacctggaggagcctggagagacccagaatgccttcctgaatgaaaggaagcaggccagcgccatcaagaaggaggagctggtggcccggtctgagacccatgctgctggccacagccaggagaagacccacagccgggagaagagcagccaggagagcggggaggagaccggcagccaggagaaccacccccaggagagcaagggccagcccaggagccaggaggagagcgaggagggggaggaggatgccaccagcgaggtggacaagaggaggacccggcccaggcaccaccacggccgcagcaggccagacaggagcagccagggcggcagcctgcccagcgaggagaagggccacccccaggagtag

SEQ ID NO: 121340 - DNA, 2034 bp, Artificial Sequence
  derived and/or modified sequence
atgcagcccaccctgctgctgagcctgctgggcgccgtgggcctggcggccgttaatagcatgccagtggataaccggaaccataacgagggtatggtaactagatgtattattgaagtactgtccaatgccctgtctaagtcgagcgctccccctatcacccctgaatgcaggcaggtgcttaagacctcacgcaaggatgttaaggacaaagagacaacagaaaacgagaacaccaagtttgaggtgagactgctacgcgaccctgccgacgcctctgaagcccacgaaagctcatcgcgcggagaagcaggtgcacctggggaggaggatattcaaggccccaccaaagctgatactgaaaagtgggccgagggaggcggtcacagccgagagagagccgacgagccgcagtggtcactgtatccatctgactctcaagtgagcgaagaggtgaagacaaggcactcggagaaatcacagagggaagatgaggaagaagaagagggagagaactatcaaaagggagaaaggggagaagacagctctgaggagaagcatctggaagaacctggggaaacccagaatgcctttctcaatgagagaaagcaggccagcgccatcaaaaaagaggagctagtagcgaggtcagagacgcacgccgcaggccattctcaggaaaagacacatagccgcgagaaatccagccaagaatctggcgaagagactggaagtcaggaaaatcacccccaagaatcaaaggggcagccccgctcccaagaggagagtgaggaaggcgaagaagacgccaccagcgaggtggataaacggcgcacaagacccagacatcatcatggaagaagtcgccccgataggtccagtcaagggggctcacttccctccgaggaaaagggccacccacaggaggagagcgaggaatctaatgtgagtatggcttcccttggcgaaaagagagatcaccatagcactcattatagagcctccgaagaggaacccgagtacggggaagaaatcaagggataccccggagtgcaagcgcccgaggatctcgaatgggaacgataccgtggaagggggtcagaagaatatagagctcccaggcctcagtccgaggaaagctgggacgaggaggataagagaaattacccctctctggagttagataaaatggcccacggatacggggaggagtcggaggaagagcgaggcctggaaccaggtaagggcagacaccaccgtggacgaggtggcgagcccagagcatatttcatgagcgacacaagagaagaaaaaaggttcctgggggaaggtcatcacagagtgcaggagaaccagatggataaggccaggcgacatccacagggcgcatggaaagaacttgataggaattacctgaattatggagaggaaggggcccccggcaaatggcaacaacagggcgacctccaagatacaaaggaaaatcgagaggaggcgcgttttcaggataaacaatactcctctcaccacaccgcagagaaaaggaaacggctgggggagctttttaatccctattacgaccccttgcagtggaaaagctctcacttcgaacggcgggacaatatgaacgataatttcttggaaggcgaagaggaaaacgagttgaccctcaatgaaaagaatttttttcccgaatacaattacgactggtgggagaagaagcctttttcggaagatgtgaactgggggtatgagaagagaaatctcgcaagagttcccaaactggatcttaagcgccagtatgaccgagtggctcagctcgaccaactactgcactaccgcaagaaatcagcagagtttcctgatttttacgattcggaggaaccggtcagcacccatcaggaggcggagaacgaaaaggatcgggcggaccagactgttctaacagaagatgaaaaaaaggagctggaaaacttagcagcaatggacctcgagctgcagaaaattgctgaaaagttttctcagagagggtag

SEQ ID NO: 121341 - DNA, 870 bp, Artificial Sequence
  derived and/or modified sequence
atgcccgtggacaaccggaaccacaacgagggcatggtgacccggtgtataatagaagtgctgagtaacgctttgtccaagagcagcgcgccacctatcactccagagtgccgccaggtgctgaaaacatcacggaaggacgtcaaggataaagaaactactgagaatgaaaacaccaagtttgaggtgcggctgctgcgtgatcctgctgatgcatctgaagctcacgaaagctcctccagaggtgaggcaggggccccaggcgaggaagatatccaaggccctaccaaagccgacaccgagaagtgggcggagggcggtggtcacagcagagaaagagcggatgagccccagtggtctttatatccgagtgactctcaggtgagcgaggaggttaaaacgaggcatagtgagaagtcacagcgcgaggatgaagaagaagaagagggagagaactaccaaaagggggagcgtggggaggatagctcagaggagaagcacctagaggaacccggcgaaacgcagaatgcttttcttaacgagcggaaacaggcaagcgccatcaagaaagaagagctggtcgcgaggtctgaaacacacgctgccggacactctcaggagaagactcatagtagagaaaagtccagccaagagtccggagaagaaactggctctcaggaaaaccacccccaggagtctaagggacagccgcgctcccaggaagaaagcgaggagggtgaagaggatgcgacgtcagaggtagataaacggcgcacacgccctcgacatcaccacggccgatcccgtcccgatcgttcctcccagggcggcagcctccccagcgaggagaaagggcatccccaggaatag

SEQ ID NO: 121342 - DNA, 2034 bp, Artificial Sequence
  derived and/or modified sequence
atgcagcctacgctgttgctgtcgctcttgggggctgttggcttagccgctgtgaacagcatgccagttgacaacaggaatcacaacgaggggatggtgacccgctgtatcatcgaggtcctgagcaatgccctttctaagagtagcgctcctcctatcacccctgagtgtagacaggtgcttaaaacaagccgaaaggacgttaaagataaggaaacgaccgaaaacgagaacacaaaattcgaagttaggctgttgagagatccagccgacgctagcgaggctcatgagtccagtagccgtggcgaagccggtgcccctggcgaagaagatattcaggggccaacaaaggccgatactgagaaatgggcagaggggggagggcactctcgcgaacgtgccgatgaacctcagtggtccttatacccaagcgacagccaagtaagcgaggaggtgaaaacaagacactccgaaaagtctcaacgggaagacgaggaagaagaagagggggaaaattaccagaaaggcgaacgcggtgaggatagtagcgaggagaaacatctcgaggagcctggcgagacccagaacgcattcctgaacgaacgaaagcaagcaagcgcgataaagaaggaagaactggtcgcacgctccgaaactcacgccgctggacattctcaggaaaaaactcactctcgtgaaaagtcttcacaggagagcggggaggagactggctcgcaggagaatcacccacaggaatcgaagggacagcctcgcagccaggaggaaagtgaggagggagaagaagatgccacctcggaagtggacaaacggaggacccgacccagacaccatcatggcaggtccagacccgatagaagcagccagggaggctccttgccttctgaggaaaagggacacccacaggaagagtccgaagaatccaatgtaagcatggcaagtcttggggaaaaacgggatcatcactccactcactatcgcgcatctgaggaggaacctgagtacggtgaggagattaagggttatccaggcgtccaggcacccgaggaccttgaatgggaaaggtaccgcggtcggggaagcgaagagtatagagcccctagaccccagtcggaagagagttgggacgaggaggacaagaggaactacccgagtttggagctggacaagatggcccacgggtacggcgaggagtcagaggaggagagaggcctggagcccggtaaaggcaggcaccataggggcagaggcggagaaccgagggcttatttcatgtcagatactcgggaggagaagagattcctgggcgaggggcatcacagagtacaggaaaaccagatggacaaggcgaggcgtcacccccaaggagcctggaaggaactggataggaactatttgaactacggagaggaaggggctcccggaaaatggcagcagcagggagatctccaggacaccaaagagaatcgtgaagaagccagatttcaggataaacaatattccagccaccataccgctgagaaaagaaaacgactgggggaactttttaacccctactacgacccactgcagtggaaaagttcccattttgagaggcgcgacaacatgaacgacaatttcctggagggagaagaggagaatgaactcactttaaacgaaaaaaacttcttcccagagtacaattatgactggtgggagaaaaagccgttttccgaggatgttaactgggggtacgagaagagaaatttagctcgagttcccaagttggatcttaagcgccagtatgaccgggtggcccagttggaccagcttctgcactacagaaaaaagtctgcagaattccccgatttctatgattccgaagagcctgtcagtacccatcaggaagcagaaaacgaaaaggaccgggctgaccagacagtactcacagaggatgaaaagaaggagttagagaacctggccgcaatggacctggagttgcaaaaaatcgccgagaagtttagccagcggggatag

SEQ ID NO: 121343 - DNA, 870 bp, Artificial Sequence
  derived and/or modified sequence
atgcccgtcgacaacagaaatcacaatgaaggcatggtgactcgttgtatcatagaggtgctgagcaatgcgctgagtaaatcttccgcgcctcccatcacaccggagtgccgacaggtgctaaaaacttctcgtaaagacgtcaaagacaaggagacgactgagaatgaaaatacaaaattcgaggtgcgtctcctgcgagaccccgcagacgctagtgaggctcacgagagctcaagtaggggggaggcaggcgctcccggtgaggaggacatccagggcccaacaaaggccgatacagaaaaatgggctgagggagggggacattccagggaacgcgctgacgaaccccagtggtcactgtatccaagcgattcccaggtgagcgaggaggttaagactcgtcacagtgagaagtcccagcgtgaggacgaagaggaggaagaaggagagaattatcaaaaaggtgaaagaggagaggactcctccgaggagaagcatcttgaggaaccgggagaaacccagaacgcgttcctgaacgagaggaaacaggcaagcgcgatcaaaaaagaggagctggtggctcgcagcgaaacacacgccgcaggccactcgcaggaaaaaacccatagtagggagaaatcttctcaggaatctggtgaggagaccggatcacaggaaaaccacccccaggagtctaagggacaaccacgttcccaagaagagtctgaggagggtgaagaggatgccacaagcgaggtcgataaaagaaggaccaggcctcgtcaccaccacggcagatctagaccggatcgttcttcccaggggggtagtttaccttctgaagaaaaaggccacccacaggaatag

SEQ ID NO: 121344 - DNA, 2550 bp, Artificial Sequence
  derived and/or modified sequence
ccgctcctggctgcccgctcctcccggccctgcggcccccgcctgccctttaaaagagcggggcctgcgccggccgcgccacaccgcggggaccaggaggcacgctggttttccggggccgctccatcgcgccttcctcctgcgcctcgcttctccggtccagccgccatcttcctttccgcacaggggccgccgagcggggccatgcagccaacgctgcttctcagcctcctgggagccgtggggctggcggctgtcaattccatgccagtggataacaggaaccacaatgaaggaatggtgactcgctgcatcattgaggtcctctcaaatgccttgtcgaagtccagcgctccacccatcacccctgagtgccgccaagtcctgaagacgagtagaaaagacgtcaaagacaaagagacaactgaaaatgaaaacacaaagtttgaagtaagattgttaagagacccagctgatgcctcggaagcccacgagtcctccagcaggggagaggcaggagccccaggggaggaggacatccaaggcccaacaaaggcagacacagagaaatgggcagagggaggcgggcacagccgagagcgagcggatgagccccagtggagcctctatccctccgacagccaagtctctgaagaagtgaagacacgccattctgagaagagccagagagaggatgaggaggaggaggagggagagaactatcaaaaaggggagcgaggggaagatagcagtgaagagaaacaccttgaagagccaggagagacacaaaacgcttttctcaatgaaagaaagcaggcttcagctataaaaaaagaggagttagtggccagatcggaaacacatgctgccgggcattctcaggagaagacacatagccgagagaagagtagccaggagagtggagaggagacagggagccaggagaatcacccccaggagtctaaaggccaaccccgaagccaggaagaatctgaggaaggtgaggaagatgccacctctgaggtggacaaacgacgcacgaggcccagacaccaccacgggaggagcaggcccgacaggtcctctcaaggagggagtcttccctctgaggaaaagggacacccccaggaggaatctgaggagtcaaacgtcagcatggccagtttaggggaaaagagggaccaccattcaacccactacagggcttcagaggaagaacctgaatatggagaagaaataaagggttatccaggcgtccaggcccctgaggacctggagtgggagcgctataggggcagaggaagtgaagaatacagggctccaagacctcagagtgaggagagttgggatgaggaggacaagagaaactaccccagcttagagcttgataagatggcacatggatatggtgaagaaagtgaggaagagaggggccttgagccgggaaagggacgccatcacagaggcaggggaggggagccacgtgcctatttcatgtctgacaccagagaagagaaaaggttcttgggtgaaggacaccaccgtgtccaagaaaaccagatggacaaggcaaggaggcatccacaaggtgcgtggaaagagctggacagaaattatctcaactacggtgaggaaggagccccagggaagtggcagcagcagggagacctgcaggacactaaagaaaacagggaggaagctaggtttcaagataaacaatatagctcccatcacacagctgaaaagaggaagagattaggggaactgttcaacccatactacgaccctctccagtggaagagcagccattttgaaagaagagacaacatgaatgacaattttctcgagggtgaggaggaaaatgagctgaccttgaacgagaagaatttcttcccagaatacaactatgactggtgggagaaaaagcccttctctgaggatgtgaactgggggtatgagaagagaaacctcgccagggtccccaagctggacctgaaaaggcaatatgacagggtggcccaactggaccagctccttcactacaggaagaagtcagctgagtttccagacttctatgattctgaggagccggtgagcacccaccaggaggcagaaaatgaaaaggacagggctgaccagacagtcctgacagaggacgagaaaaaagaactcgaaaacttggctgcaatggatttggaactacagaagatagctgagaaattcagccaaaggggctgactgtcattggagcggtgggcactgttaagaagcagccatcacatgatctgtttttcaccacttcactgaaagacaccatttatctacccaagggcagaaagtagaacttactattcattaaatgtttgacacaattggaattgtctttaatttctgtcagaatgctattgaaaatgtgaattgcatgacttgtagcatattcttttctgcaaaatagacatattaacatgcttatgacaatgactgtgctactgtctttggaaaaatgtttgtctcagttggaaataataaaagattcacctgagaccaaaa

SEQ ID NO: 121345 - DNA, 1129 bp, Artificial Sequence
  derived and/or modified sequence
cacgctggttttccggggccgctccatcgcgccttcctcctgcgcctcgcttctccggtccagccgccatcttcctttccgcacaggggccgccgagcggggccatgcagccaacgctgcttctcagcctcctgggagccgtggggctggcggtcatttatttgcagaagatattacagatttccagcggaaagagaaagtgctgaaatgggtgtgttctcaagtagccatttggaggatgaaagaacactgtcaattccatgccagtggataacaggaaccacaatgaaggaatggtgactcgctgcatcattgaggtcctctcaaatgccttgtcgaagtccagcgctccacccatcacccctgagtgccgccaagtcctgaagacgagtagaaaagacgtcaaagacaaagagacaactgaaaatgaaaacacaaagtttgaagtaagattgttaagagacccagctgatgcctcggaagcccacgagtcctccagcaggggagaggcaggagccccaggggaggaggacatccaaggcccaacaaaggcagacacagagaaatgggcagagggaggcgggcacagccgagagcgagcggatgagccccagtggagcctctatccctccgacagccaagtctctgaagaagtgaagacacgccattctgagaagagccagagagaggatgaggaggaggaggagggagagaactatcaaaaaggggagcgaggggaagatagcagtgaagagaaacaccttgaagagccaggagagacacaaaacgcttttctcaatgaaagaaagcaggcttcagctataaaaaaagaggagttagtggccagatcggaaacacatgctgccgggcattctcaggagaagacacatagccgagagaagagtagccaggagagtggagaggagacagggagccaggagaatcacccccaggagtctaaaggccaaccccgaagccaggaagaatctgaggaaggtgaggaagatgccacctctgaggtggacaaacgacgcacgaggcccagacaccaccacgggaggagcaggcccgacaggtcctctcaaggagggagtcttccctctgaggaaaagggacacccccaggagga

SEQ ID NO: 121346 - DNA, 2034 bp, Artificial Sequence
  derived and/or modified sequence
atgcagcccaccctgctgctgagcctgctgggcgccgtgggcctggccgccgtgaacagcatgcccgtggacaacagaaaccacaacgagggcatggtgaccagatgcatcatcgaggtgctgagcaacgccctgagcaagagcagcgccccccccatcacccccgagtgcagacaggtgctgaagaccagcagaaaggacgtgaaggacaaggagaccaccgagaacgagaacaccaagttcgaggtgagactgctgagagaccccgccgacgccagcgaggcccacgagagcagcagcagaggcgaggccggcgcccccggcgaggaggacatccagggccccaccaaggccgacaccgagaagtgggccgagggcggcggccacagcagagagagagccgacgagccccagtggagcctgtaccccagcgacagccaggtgagcgaggaggtgaagaccagacacagcgagaagagccagagagaggacgaggaggaggaggagggcgagaactaccagaagggcgagagaggcgaggacagcagcgaggagaagcacctggaggagcccggcgagacccagaacgccttcctgaacgagagaaagcaggccagcgccatcaagaaggaggagctggtggccagaagcgagacccacgccgccggccacagccaggagaagacccacagcagagagaagagcagccaggagagcggcgaggagaccggcagccaggagaaccacccccaggagagcaagggccagcccagaagccaggaggagagcgaggagggcgaggaggacgccaccagcgaggtggacaagagaagaaccagacccagacaccaccacggcagaagcagacccgacagaagcagccagggcggcagcctgcccagcgaggagaagggccacccccaggaggagagcgaggagagcaacgtgagcatggccagcctgggcgagaagagagaccaccacagcacccactacagagccagcgaggaggagcccgagtacggcgaggagatcaagggctaccccggcgtgcaggcccccgaggacctggagtgggagagatacagaggcagaggcagcgaggagtacagagcccccagaccccagagcgaggagagctgggacgaggaggacaagagaaactaccccagcctggagctggacaagatggcccacggctacggcgaggagagcgaggaggagagaggcctggagcccggcaagggcagacaccacagaggcagaggcggcgagcccagagcctacttcatgagcgacaccagagaggagaagagattcctgggcgagggccaccacagagtgcaggagaaccagatggacaaggccagaagacacccccagggcgcctggaaggagctggacagaaactacctgaactacggcgaggagggcgcccccggcaagtggcagcagcagggcgacctgcaggacaccaaggagaacagagaggaggccagattccaggacaagcagtacagcagccaccacaccgccgagaagagaaagagactgggcgagctgttcaacccctactacgaccccctgcagtggaagagcagccacttcgagagaagagacaacatgaacgacaacttcctggagggcgaggaggagaacgagctgaccctgaacgagaagaacttcttccccgagtacaactacgactggtgggagaagaagcccttcagcgaggacgtgaactggggctacgagaagagaaacctggccagagtgcccaagctggacctgaagagacagtacgacagagtggcccagctggaccagctgctgcactacagaaagaagagcgccgagttccccgacttctacgacagcgaggagcccgtgagcacccaccaggaggccgagaacgagaaggacagagccgaccagaccgtgctgaccgaggacgagaagaaggagctggagaacctggccgccatggacctggagctgcagaagatcgccgagaagttcagccagagaggctag

SEQ ID NO: 121347 - DNA, 870 bp, Artificial Sequence
  derived and/or modified sequence
atgcccgtggacaacagaaaccacaacgagggcatggtgaccagatgcatcatcgaggtgctgagcaacgccctgagcaagagcagcgccccccccatcacccccgagtgcagacaggtgctgaagaccagcagaaaggacgtgaaggacaaggagaccaccgagaacgagaacaccaagttcgaggtgagactgctgagagaccccgccgacgccagcgaggcccacgagagcagcagcagaggcgaggccggcgcccccggcgaggaggacatccagggccccaccaaggccgacaccgagaagtgggccgagggcggcggccacagcagagagagagccgacgagccccagtggagcctgtaccccagcgacagccaggtgagcgaggaggtgaagaccagacacagcgagaagagccagagagaggacgaggaggaggaggagggcgagaactaccagaagggcgagagaggcgaggacagcagcgaggagaagcacctggaggagcccggcgagacccagaacgccttcctgaacgagagaaagcaggccagcgccatcaagaaggaggagctggtggccagaagcgagacccacgccgccggccacagccaggagaagacccacagcagagagaagagcagccaggagagcggcgaggagaccggcagccaggagaaccacccccaggagagcaagggccagcccagaagccaggaggagagcgaggagggcgaggaggacgccaccagcgaggtggacaagagaagaaccagacccagacaccaccacggcagaagcagacccgacagaagcagccagggcggcagcctgcccagcgaggagaagggccacccccaggagtag

SEQ ID NO: 121348 - protein, 656 aa, Artificial Sequence
  derived and/or modified sequence
MADNLPTEFDVVIIGTGLPESILAAACSRSGQRVLHIDSRSYYGGNWASFSFSGLLSWLKEYQQNNDIGEESTVVWQDLIHETEEAITLRKKDETIQHTEAFCYASQDMEDNVEEIGALQKNPSLGVSNTFTEVLDSALPEESQLSYFNSDEMPAKHTQKSDTEISLEVTDVEESVEKEKYCGDKTCMHTVSDKDGDKDESKSTVEDKADEPIRNRITYSQIVKEGRRFNIDLVSKLLYSQGLLIDLLIKSDVSRYVEFKNVTRILAFREGKVEQVPCSRADVFNSKELTMVEKRMLMKFLTFCLEYEQHPDEYQAFRQCSFSEYLKTKKLTPNLQHFVLHSIAMTSESSCTTIDGLNATKNFLQCLGRFGNTPFLFPLYGQGEIPQGFCRMCAVFGGIYCLRHKVQCFVVDKESGRCKAIIDHFGQRINAKYFIVEDSYLSEETCSNVQYKQISRAVLITDQSILKTDLDQQTSILIVPPAEPGACAVRVTELCSSTMTCMKDTYLVHLTCSSSKTAREDLESVVKKLFTPYTETEINEEELTKPRLLWALYFNMRDSSGISRSSYNGLPSNVYVCSGPDCGLGNEHAVKQAETLFQEIFPTEEFCPPPPNPEDIIFDGDDKQPEAPGTNNVVMAKLESSEESKNLESPEKHLQN

SEQ ID NO: 121349 - DNA, 1971 bp, Artificial Sequence
  derived and/or modified sequence
atggcagacaatttgcctacggaattcgacgtggttatcatcgggaccggcctccctgagtcaattctcgctgctgcctgctcacggtctggtcagagggtgctgcacatcgattccaggtcgtactacggcgggaactgggcatccttcagcttctccgggctgctgtcatggctgaaagaataccagcagaataatgatattggtgaggagagcacagtggtgtggcaggatctgatccacgagacagaggaagccattaccttgaggaagaaagacgagacaatccagcatacagaagctttttgctacgcatcccaggacatggaggacaacgtcgaggaaataggcgctttgcaaaagaatccatccctcggtgttagtaatacgtttaccgaggtgcttgatagcgctttacccgaagagagccaactttcatactttaatagcgatgagatgccagctaaacacacacaaaagagcgataccgaaatatcactggaagtcaccgatgtggaggaatccgttgaaaaggaaaagtattgtggtgacaaaacgtgtatgcacacagttagtgataaggatggcgacaaggatgagagtaaaagcaccgtggaagacaaggctgacgagcccattaggaaccgaatcacatactcccagatcgtgaaggaggggcgaagattcaatatcgacctggtatcaaaactcctatactctcagggcctgctaattgatcttctgattaaatctgatgtgtcaaggtacgtggaattcaagaatgtgacacgcatcttggccttccgagagggcaaggtcgagcaagtgccctgctccagagcggatgtattcaactctaaggagctcactatggttgagaaaagaatgctgatgaaatttctgacattctgtctggaatatgagcagcacccagatgaataccaggccttccgtcagtgcagcttctcggaatatcttaagaccaagaagttgacccccaatctgcagcattttgtcctgcattctatcgcaatgacctcagagagcagctgcacgacaatagacggtctgaatgcaactaagaatttcctgcagtgcctgggtagatttggcaacacaccattcctgttcccactgtacggacagggagaaatcccacaaggcttttgcagaatgtgtgcagtctttggcggtatttactgcctccgccataaggtccagtgctttgtagtagacaaggagagcggaagatgcaaagctatcatcgaccacttcggacagcggattaatgccaaatattttattgtcgaggattcctatctctcagaagaaacatgctccaacgtgcagtataagcagatctctcgcgctgtactgattactgatcagagtatcctgaagacagaccttgaccagcagacctcgatcctcattgtgcctcctgccgagccgggtgcttgcgctgtacgggtcacagagctgtgctcatcgacaatgacctgtatgaaggatacttacctggtgcacctgacttgttcctctagtaagactgcacgagaggatttagaatctgtggtcaagaagctgttcactccatacactgagacggagatcaatgaagaggaattgaccaagccaaggctcctctgggctctttatttcaacatgagggactcttccggaatctctcgcagcagctataatggactgccttcaaacgtgtacgtgtgttccggccccgattgcgggctgggaaatgaacacgccgtcaagcaggccgaaaccctcttccaggaaatttttccaaccgaagagttctgccccccacctcctaatccagaagatatcatcttcgacggagacgataaacagccggaggcccctggaactaacaacgtggtgatggccaaactcgagtctagcgaagagtcaaaaaacctggagagccccgagaaacacctccagaactag

SEQ ID NO: 121350 - DNA, 1971 bp, Artificial Sequence
  derived and/or modified sequence
atggctgacaacctgcccacagaatttgatgtggtgatcatcggcaccggcctgcctgagagcatcctggccgccgcctgcagccgcagcggccagagggtgctgcacatcgacagccgcagctactatggaggcaactgggccagcttctccttcagcggcctgctgtcctggctgaaggagtaccagcagaacaatgacatcggggaggagagcacagtggtgtggcaggacctgattcatgaaacagaggaggccatcaccctgaggaagaaggatgagaccatccagcacacagaggccttctgctacgccagccaggacatggaggacaacgtggaggagatcggggccctgcagaagaaccccagcctgggcgtgagcaacaccttcacagaggtgctggacagcgccctgcctgaggagagccagctgagctacttcaacagtgatgagatgcctgccaagcacacccagaagagtgacacagagatcagcctggaggtgacagatgtggaggagagcgtggagaaggagaagtactgtggggacaagacctgcatgcacacagtgtctgacaaggatggagacaaggatgagagcaagagcacagtggaggacaaggcagatgagcccatccggaaccgcatcacctacagccagatcgtgaaggagggccgccgcttcaacatcgacctggtgtccaagctgctgtacagccagggcctgctgattgacctgctgatcaagagtgatgtgagccgctacgtggagttcaagaatgtgacccgcatcctggccttccgggagggcaaggtggagcaggtgccctgcagcagagcagatgtgttcaacagcaaggagctgaccatggtggagaagaggatgctgatgaagttcctgaccttctgcctggagtatgagcagcacccagatgagtaccaggccttccggcagtgcagcttcagcgagtacctgaagaccaagaagctgacccccaacctgcagcactttgtgctgcacagcatcgccatgaccagcgagagcagctgcaccaccattgatggcctgaatgccaccaagaacttcctgcagtgcctgggccgcttcggcaacacccccttcctgttccccctgtatggccagggcgagatcccccagggcttctgcaggatgtgtgctgtgtttggaggcatctactgcctgcggcacaaggtgcagtgctttgtggtggacaaggagagcggccgctgcaaggccatcatcgaccacttcggccagaggatcaatgccaagtacttcatcgtggaggacagctacctgtctgaggagacctgcagcaatgtgcagtacaagcagatcagcagagctgtgctgatcacagaccagagcatcctgaagacagacctggaccagcagaccagcatcctgattgtgcccccagctgagcccggggcctgtgctgtgcgggtgacagagctgtgcagcagcaccatgacctgcatgaaggacacctacctggtgcacctgacctgcagcagcagcaagacagcccgggaggacctggagagcgtggtgaagaagctgttcaccccctacacagaaacagagatcaatgaggaggagctgaccaagccccggctgctgtgggccctgtacttcaacatgagggacagcagcggcatcagccgcagcagctacaacggcctgcccagcaatgtgtatgtgtgcagcggccctgactgtggcctgggcaatgagcacgctgtgaagcaggccgagaccctcttccaggagatcttccccacagaggagttctgccccccaccacccaaccctgaggacatcatctttgatggagatgacaagcagcctgaggcccctggcaccaacaacgtggtgatggccaagctggagagcagcgaggagagcaagaacctggagagccctgagaagcacctgcagaactag

SEQ ID NO: 121351 - DNA, 1971 bp, Artificial Sequence
  derived and/or modified sequence
atggccgacaacctgcccaccgagttcgacgtggtgatcatcggcactggcctccctgagagcatacttgctgccgcttgtagtcgttcagggcagagagtgctgcacattgacagtcgaagctattatggcgggaactgggccagtttctcatttagcgggttgctatcatggttaaaagagtatcagcagaataatgatattggcgaggagtctacagtcgtgtggcaggacctgatacatgaaacagaggaggctataactttgcgaaaaaaggatgaaaccatccagcacactgaggcgttctgctatgcatcccaggacatggaggacaacgtggaggaaatcggggcgttgcagaagaaccctagtctgggcgtgtctaacacctttaccgaagtgctggacagcgctctgcccgaggagtcccaactgagttatttcaattccgatgaaatgcccgcgaagcacacgcagaagtcagacaccgagatctccctcgaggtgactgacgtcgaggagagtgttgaaaaggagaaatattgcggcgacaagacatgtatgcacaccgtttctgacaaggatggggacaaggatgaatctaaaagtacagttgaagacaaagccgacgaaccgattagaaaccgaatcacttactctcagatagtgaaggaaggtcgccggttcaatattgacctggtcagtaaattgctttactcccaaggacttctcatcgatttgctgattaagtctgatgtgtccaggtacgtggagtttaagaacgttacccgaatcctggccttccgagaagggaaggttgagcaggtgccctgctcacgagctgatgtcttcaactccaaggaactcacaatggtggagaagcgtatgctcatgaagttcctgaccttctgtttggaatacgagcaacaccctgatgagtaccaagcttttcggcagtgttccttttctgagtatctgaagacgaagaaactaacaccaaaccttcaacacttcgtgttgcactcaatcgccatgacgtccgagtcatcctgcaccacgatcgacgggctgaacgcaacaaaaaacttcctccagtgtctgggccggtttggaaatacccctttcctctttcctctctatggacagggagaaatccctcagggtttctgcagaatgtgcgcagtctttggcggcatatattgtctgcgccacaaggtacagtgtttcgtggtagacaaagagagtggtcgttgcaaggccattattgaccactttggccagcggattaacgctaagtatttcattgtggaggacagctacctgtctgaagaaacatgttccaacgttcagtataaacaaatttcccgagcggtcctgatcacggatcagtcaatcctcaaaaccgatttagaccagcaaacttcaatattgatcgtgcctcctgctgagccaggagcatgcgcagtgcgagtgaccgagctttgttcttccactatgacctgtatgaaagatacatatctggtgcacctcacctgctcttcatctaagaccgctagagaggacctagagtctgtggtgaaaaagctgtttacaccttacaccgaaaccgagatcaacgaagaggagctgacaaagccccgcctgctgtgggcactgtattttaatatgagagattctagcggtatctctcgcagcagctacaacggtcttccctcgaacgtgtacgtctgctcagggcccgattgcggcctgggcaatgaacacgcagtaaagcaggccgaaacactctttcaagaaatatttccaacagaagagttctgcccccctccaccaaaccccgaggacatcatttttgacggagatgacaaacagcccgaggctcccggcacgaataatgtggtgatggctaaactcgagtccagcgaggaaagcaagaacctggagagccccgagaaacatttacagaattag

SEQ ID NO: 121352 - DNA, 1971 bp, Artificial Sequence
  derived and/or modified sequence
atggcagataatctcccaacagagtttgacgtcgtgataatcggaacaggcctaccggaaagtatcctggcagccgcatgtagtagatccggccagagagtgctccatattgattcgaggtcttattacgggggtaattgggccagcttctctttttccggactgctaagttggctgaaagaataccagcaaaacaacgatatcggagaggaaagcactgttgtctggcaagacctaatccacgaaaccgaagaagccatcaccctgcgaaagaaggacgagaccattcagcatacagaagcattttgttatgcctcccaagatatggaggataacgttgaggaaattggggctctccaaaagaatcctagtttgggagtctcaaacaccttcactgaggtgcttgactcggcattacccgaggagtctcagctgagctatttcaattctgacgagatgccagcaaaacacacccagaaatcagacaccgagattagcctggaggtgacggacgtggaggagagtgttgagaaggaaaagtactgcggggacaaaacgtgcatgcatacggtgagcgataaggacggggataaggatgaatcaaaaagcactgtggaggacaaggctgatgagcctatccggaaccgtattacttacagccagatcgtaaaagagggtagacgttttaatattgacctagtatcaaagcttctatacagtcaggggttgttgatcgacctcctcatcaaaagcgatgtcagtagatacgttgaattcaagaacgtgaccagaattctggcgtttagagaggggaaggtggaacaggtgccgtgcagtcgcgctgatgtgttcaatagcaaggaactgaccatggtcgagaaacgaatgctgatgaagttcctgaccttttgtctggagtacgaacagcatcccgacgaatatcaagctttccgccagtgctctttttcagagtaccttaagactaaaaaattgaccccaaacctgcagcacttcgtacttcacagcatcgcaatgacttccgagagcagctgcaccacaatcgacgggctaaacgctacaaaaaactttcttcagtgtctaggcagattcggaaataccccttttctctttcccctgtatggccaaggagagatcccacagggattctgcagaatgtgtgccgtgtttggaggaatctactgtcttcgccacaaggttcagtgctttgtcgtcgataaagagtcaggtaggtgtaaagccatcatcgaccattttggtcaaagaatcaatgcaaaatatttcatcgtggaggactcataccttagcgaggaaacctgtagtaacgtacagtacaaacaaatctcccgtgccgtgctgatcacggatcagtctatcctgaagactgacctcgaccaacagaccagtatcctgattgtgccaccggcagagccgggtgcctgtgccgtccgagtgaccgagctttgctctagcactatgacatgtatgaaggatacttatttggtccatctcacttgtagcagttccaaaacagcacgagaggatcttgaaagcgttgtcaagaagctgttcactccctacaccgaaactgagatcaatgaggaggagctgacgaagccgaggctgctgtgggccctctactttaatatgcgggactcttccggcatctctaggtcttcttacaacgggcttccgagtaatgtctatgtttgctccggcccagattgcggattgggcaatgagcatgccgtaaagcaggccgagaccctctttcaggaaatctttccaactgaagaattttgtccacccccaccgaaccctgaggacatcatcttcgacggggatgataaacagcccgaggccccagggacaaataacgtcgtcatggccaaacttgagagctcggaggagtccaaaaatctggaatcccccgaaaaacatttgcaaaactag

SEQ ID NO: 121353 - DNA, 7078 bp, Artificial Sequence
  derived and/or modified sequence
ataagaaaaaaaatattttaaaagggtaaccgttaaacagctaggacctgcaacttcagtgcttctgggataactggaacatcagaaggacagattttattacagcataatcacacctcatttctttcatcagcagttgtcaccagacgctgttacttcctaaaatggcggacaatcttcccacagagtttgatgtggttataatagggacaggtttgcccgaatccatccttgcagctgcatgttcaagaagtggtcagagggttctgcatattgattcaagaagctactatggaggaaactgggctagtttcagcttttcaggattgctatcctggttgaaggagtatcagcaaaacaatgacattggggaagaaagtactgttgtatggcaggacctgatccatgaaacagaagaagccatcactcttcgcaagaaggatgaaactattcaacacacagaagctttttgctacgccagtcaggatatggaggacaacgttgaagagattggtgctctgcagaaaaatccttctttgggggtgtctaataccttcactgaagttctggattctgcattacctgaagaaagccagttatcgtattttaatagcgacgaaatgcctgcaaaacacactcagaaaagtgatacagagatttcactagaagtaactgatgtagaggaatcagtggagaaggaaaagtattgtggagataaaacttgtatgcacacagtttcagataaagatggagataaagatgaaagcaaatctacagtagaagataaggccgatgaaccaattagaaataggattacttactctcaaatagttaaagaaggcaggaggtttaatattgatttggtgtcaaaactgctgtattctcaaggattgctaattgatcttttaatcaaatcagatgttagtcgttatgtagaatttaaaaatgtcactaggattcttgcatttcgggaaggaaaggtagaacaagttccttgttccagagcagatgtctttaatagcaaggaactcaccatggttgaaaagaggatgctaatgaaatttctcacattttgtttagagtatgaacaacatcctgatgaataccaagctttcaggcagtgttcattttcagaatacttaaaaactaaaaaactaactcccaaccttcaacattttgtactgcactcaattgcaatgacatcagaatcatcttgcactacaatagatggtcttaacgcaactaaaaacttccttcagtgtctcggacggtttggcaacaccccctttttatttcccttgtatggccaaggagaaattccccagggtttctgtaggatgtgtgcagtttttggtggaatctattgtcttcgtcataaagtacaatgctttgtagtcgacaaagaatctggacgatgtaaagcaattatagatcactttggtcaaagaataaatgctaaatattttattgtggaagacagttacctttctgaggaaacatgctcaaatgtgcagtataagcagatctctagggcagtactcattacagatcagtctatactaaagacagatttagatcagcagacttccattctgatagttcctccagcagagccaggagcttgtgctgtacgggtcacagaattatgttcttcaaccatgacatgcatgaaggacacctatctggtacatttgacatgttcatcttctaaaacagcaagagaagacttagaatcagtggtgaagaaattattcactccgtatactgaaacagaaataaacgaggaagaacttacaaagccaagactcttgtgggctctttattttaatatgagagattcctcgggaatcagcagaagctcgtataatggcttgccttccaatgtttatgtctgctctgggcctgactgtggcctgggaaatgagcatgctgtcaagcaagctgaaacacttttccaggagatctttccaactgaagaattctgccctccacctccaaatccagaagacattatctttgatggtgatgataagcagccagaggctcctggaaccaataatgtagtaatggccaaactagaatcctctgaggaaagcaaaaacctagaaagcccagagaagcaccttcaaaattagaaaagagcaatctcgaaatgctgttttggacctccttcatggcatcagaattttctcatttaaaggacagtttcccatatgagtaattagaagtggttatatatgatgaatgctatgcagatgttgtctttaactctcagacattcagcattgaatatctttgttaacctatcaatgagtgatttattgattattgaacattttgtttagaatgggctatatgacccagaatcttaaaacagagttagctttattttagtattgggtatatatgtaagggttccatattagcaactcagcttaaaggtaatgtatttgctaatgatcttcagattttatctttgtctacagaacaattagtaatacccaagtaatattttaattacttttgcagctgttacagttgctgcggcctgttcgaatagtgaaacatacacaaatggtaaattatgtggatcttttgcatataatataaatgtatagacatggtggtaggaatagcaactaatacaaatgccaatatgataataaaatacatttgtctataatcgtttaaagattagctttgcatgatcctttatgcactgtgaaggtctgaagtttataatactcacttgacccttgtaactgatgaggcaatgatgccaccacagtattctaatttacaaaaagaattggagttcaattagtggttgtaaagctcattttggggaggttgattgcaaaggaaatttgaaagataagatttattcttatttaatacttcagaaaatttctgcagagccctgccctggcacttaaaatagcttccaataagtaacttagaccaaaaggaaaaatgaagtgccccaggagaagatacttcagaagggctgttctgaaattcctaaggaggaattcttaggaattcctaaggagaaacagagtgaggcctttttaacctgagattacagatacttataaaaccctctataaatagattacccaaggtttttcagtgagaatgaaacataccaccttgttggctctaccactttaattaatatcactataacataactgataggaatgaatcaaaggaggatttaccatgccctttcggttgtgtcccacttaacaaattgtgaagtaacaattttctgtaatctctcttgcctcttagctgttatccagagtatagaaactttttttctcccagagccacccaacgtcataaaactggtagtactctaatggtgaaaacctgtggagctgtcagaagacatgaacttgcttttcctctagtccagtttccattcttcagtcagagtatgatgatccctgtgacagtttttgctctgaaatagtatttatcatgtgtttggtacctagtattatgctttctcatgacagtttctcaacaatcctgtgaggcaaattcgcatgtaccctctgtattagtgtgttctcatgctgttgataaagacacacctgagatggtaatttgtaaagaaaaaggtttaatggactcacagttccatgtggctggggaggcctcacaatcatggtggaaggtgaaaggcacgtcttacatggcggtggacaagagagaatgagaactaagtgaaaagggaaacccttttaaaaccatcagatatcgtgagacttatttactaccatgagaacagtatgggggaaacaactccatgattcagttatctcccaccaggttcctcccacaacacgtgggaattataggagctacaattcaagatgagatttgagtgggaacacagccaaaccatatcaccttcaaagaagaaataagagaattattagtaatttgctcagaatctggtatgtggaagagccaacatggggacccagccttttgtgattctaaaacctttgatctttctactaacattcactgttagagagtgtaggcgctgcaggagaaagagaaagtgcccacgaaaattagtctagcattgccgggggtaaaaagcacacactggtcctgcagcttattgaatcagagaaatgtgaagataagatgaactaaacaaacatattttagagcatggatctcgaagcagaatttggctaaattttaacaaaatgttcttcagtaacacatctcatgatctgaagattgtgttacaaaaaatattatcaggccaaaatttgttcggaatacactaatttttgctcctctatatgtgaggaaaatgagactagacagatttaagtaattgacaacttacttaaagtagcaaagtcatggattgtattgacttttaaaaatatagtaaaagtcatatttaaactttatcctaaagtttaaatctaacagaacaactgaaatacttgaaatagacctataaaatagtaattaaaatgagaaatacataagatgataaataaaatgaaggtgaaggtattccagatctaccgaaaagattttcagtatcacagattattcataagaaattgagaaaaggaacaatcagaagttgcaaaagatggtatagccgaatataatggaaataggaaaaattagtcgaaaataaaggttgatttagaaatgaagaaaatgaatatatttcttaatacaaaataagtgggaaatgagaagttataccaataaaaagcatttaaaaatttaggggatattgtaacccagtataattttctgacaggttggactttgaccctaatggacttactggtgaactttttcaaatgtttaaataatgtctatccatgtatcatgaaggacagtatgcttcaaattgtcttttgaggcagacatgttctcagtactaaaagacatttttagaaggattttattctcaacagatgcaaaatgcaaaataaaatattggcaaacaatacagcaacaaataatttactatcactcaggattataaggctggtgttaagcagaacagccattaaatcagcatcaaaagaacaaatagtaaaatccaaagtattaattacagataacttttcaaaaattcatcattcacccttgatttaattatttctctggcaatgatttaatagacttctcggagtctgttaagtacttaaaccaagaactaccattattcctactgggaaaacataaacatttctcaagtggaaagtaaacagtgttggcactatttttatatatggttaaagagacctgtcattgcaataaaagccagcattcacaaaatgaggaagataaggaaagtagcataaatattttctattaacatggctttacaactgctaaaacttatagtataaaaatgtactaacaaagactaattcaagaagttgcaggatacacaatttttaaaaatctcatttctacatcttagcagtgacaaactgcaatttaaaaagtgtgtttggttattaatatatatgagacttttaaagaaagttatataactacatagagataaattaagaaagatgcctaaatagaagcaagtttaaagagctatatttttaaacatgaacaaactcccatgggagccatgccagtgtagtggaaaagtagtacatggggagatggggagtttttttgaaaaccagaattacagttctcatttcactacttaccagttgtatactcttgggaaagtcactcctagtatctatttcaccatctacagaagagaaatacttcacagaattattgtggggattaagttagataatgtgttttaaaatataaagctacatccaaagaaatgccaatatgtgacattagtatgaaatttactacagttccatttaacattccaactggttgctgtgtggaatatggcataattgtaataaattatttaggaaagcaagcaaagatgtaagtttttttaatttagggggaaaaaatgggagccttgctctccaaatccttaaaacatgctattaagcaacctttctgaatattctgtggtgccaagtagaaagtttaactgaaattaataagccaatggaaagaaagaaatattaataactgctggtggaaagactagctagatgtcagtgtggaaagattagatccactttacatgtgatattccaaatgaattaaaatgttaagtataaaaagaaaaatactacaagtctcacaccaatagtggtataaaggaacttcatggcaattggcaaggtagatcaactaagagaaaaagttttaaatgtgtagtaaataggaaaaagacaaaacaagatggaatttaaaagaagctatttgcattacacatggatgcactcagtttttgtaaaactatatgcatatccataagggtttgtactcttaggcaaatttataaagcgatcgtgtataaatgatataaaaaatcaatttgaatggtattcaaatttcctaatattaaaaatgcaactttgacttagttcatgctattgtattagcaaaactgttttaattgcatgtgtccttatagcagcagcattgtgtattagtagccttttaagagaactgtgtagaagactataaaaagggctttataactgatcttttgacatactcactttgagtggcatatgcccaggaaaatatttaaaagaaagaaaagctatttgtacaaagttttctagcagttccactcagataactttaagggggaaaaaagcccaacgattggaaatggttaagtaaattttggtgtattgctagtgctatcacagaatgttatatagccattcaataatattgatatatgtcaaattgtatgcaaaaaagtgagattcaaaaatgttaataagaacataaattgtgtttactgatacatgtgaaaatttaggtctacattgaaaagaatcagaagataacatgtaattcagtttaacattaggggttctttatttttcttctgttaaatattgatgtatgcaataaaaaataaaagattaattggtaaagtggtttactg

SEQ ID NO: 121354 - DNA, 1971 bp, Artificial Sequence
  derived and/or modified sequence
atggccgacaacctgcccaccgagttcgacgtggtgatcatcggcaccggcctgcccgagagcatcctggccgccgcctgcagcagaagcggccagagagtgctgcacatcgacagcagaagctactacggcggcaactgggccagcttcagcttcagcggcctgctgagctggctgaaggagtaccagcagaacaacgacatcggcgaggagagcaccgtggtgtggcaggacctgatccacgagaccgaggaggccatcaccctgagaaagaaggacgagaccatccagcacaccgaggccttctgctacgccagccaggacatggaggacaacgtggaggagatcggcgccctgcagaagaaccccagcctgggcgtgagcaacaccttcaccgaggtgctggacagcgccctgcccgaggagagccagctgagctacttcaacagcgacgagatgcccgccaagcacacccagaagagcgacaccgagatcagcctggaggtgaccgacgtggaggagagcgtggagaaggagaagtactgcggcgacaagacctgcatgcacaccgtgagcgacaaggacggcgacaaggacgagagcaagagcaccgtggaggacaaggccgacgagcccatcagaaacagaatcacctacagccagatcgtgaaggagggcagaagattcaacatcgacctggtgagcaagctgctgtacagccagggcctgctgatcgacctgctgatcaagagcgacgtgagcagatacgtggagttcaagaacgtgaccagaatcctggccttcagagagggcaaggtggagcaggtgccctgcagcagagccgacgtgttcaacagcaaggagctgaccatggtggagaagagaatgctgatgaagttcctgaccttctgcctggagtacgagcagcaccccgacgagtaccaggccttcagacagtgcagcttcagcgagtacctgaagaccaagaagctgacccccaacctgcagcacttcgtgctgcacagcatcgccatgaccagcgagagcagctgcaccaccatcgacggcctgaacgccaccaagaacttcctgcagtgcctgggcagattcggcaacacccccttcctgttccccctgtacggccagggcgagatcccccagggcttctgcagaatgtgcgccgtgttcggcggcatctactgcctgagacacaaggtgcagtgcttcgtggtggacaaggagagcggcagatgcaaggccatcatcgaccacttcggccagagaatcaacgccaagtacttcatcgtggaggacagctacctgagcgaggagacctgcagcaacgtgcagtacaagcagatcagcagagccgtgctgatcaccgaccagagcatcctgaagaccgacctggaccagcagaccagcatcctgatcgtgccccccgccgagcccggcgcctgcgccgtgagagtgaccgagctgtgcagcagcaccatgacctgcatgaaggacacctacctggtgcacctgacctgcagcagcagcaagaccgccagagaggacctggagagcgtggtgaagaagctgttcaccccctacaccgagaccgagatcaacgaggaggagctgaccaagcccagactgctgtgggccctgtacttcaacatgagagacagcagcggcatcagcagaagcagctacaacggcctgcccagcaacgtgtacgtgtgcagcggccccgactgcggcctgggcaacgagcacgccgtgaagcaggccgagaccctgttccaggagatcttccccaccgaggagttctgcccccccccccccaaccccgaggacatcatcttcgacggcgacgacaagcagcccgaggcccccggcaccaacaacgtggtgatggccaagctggagagcagcgaggagagcaagaacctggagagccccgagaagcacctgcagaactag

SEQ ID NO: 121355 - protein, 459 aa, Artificial Sequence
  derived and/or modified sequence
MALTLFDTDEYRPPVWKSYLYQLQQEAPHPRRITCTCEVENRPKYYGREFHGMISREAADQLLIVAEGSYLIRESQRQPGTYTLALRFGSQTRNFRLYYDGKHFVGEKRFESIHDLVTDGLITLYIETKAAEYIAKMTINPIYEHVGYTTLNREPAYKKHMPVLKETHDERDSTGQDGVSEKRLTSLVRRATLKENEQIPKYEKIHNFKVHTFRGPHWCEYCANFMWGLIAQGVKCADCGLNVHKQCSKMVPNDCKPDLKHVKKVYSCDLTTLVKAHTTKRPMVVDMCIREIESRGLNSEGLYRVSGFSDLIEDVKMAFDRDGEKADISVNMYEDINIITGALKLYFRDLPIPLITYDAYPKFIESAKIMDPDEQLETLHEALKLLPPAHCETLRYLMAHLKRVTLHEKENLMNAENLGIVFGPTLMRSPELDAMAALNDIRYQRLVVELLIKNEDILF

SEQ ID NO: 121356 - DNA, 1380 bp, Artificial Sequence
  derived and/or modified sequence
atggccttgacactgttcgacacggacgaataccgaccccctgtgtggaaaagctacctgtaccaactacagcaggaagcaccgcaccctaggcgaattacttgtacatgtgaggtcgagaatcggcccaaatattacggtagagagttccacggaatgatatctcgtgaggctgcggaccagctgctgatcgtggcagaaggttcttacctaatcagagagagtcagcgccaaccagggacctacaccctggccctgcgctttggcagccaaaccagaaactttaggctgtactatgacgggaaacatttcgtaggggagaaaaggtttgagtccattcacgatctcgtgaccgatggactcataaccctgtatattgaaacgaaggctgctgaatacatcgcgaaaatgactatcaatccaatttatgaacacgttgggtacaccacactgaacagggaaccggcctacaagaagcacatgcccgtgctaaaagaaacccatgacgaacgtgactctacagggcaggacggagtttctgagaagaggctcacatccctcgttcgtcgggcaaccttaaaagaaaacgaacaaatccccaagtacgaaaaaatacacaactttaaagtccacactttcaggggccctcactggtgcgagtactgcgctaactttatgtggggtctgattgcccagggcgtgaagtgcgccgactgcggtttgaatgtgcacaagcagtgtagtaaaatggttccaaacgactgtaagcctgacctgaagcatgtaaagaaagtatattcttgtgatctgactacactagtaaaagcccacacgacaaagcgcccaatggtagtcgacatgtgtatcagggaaatcgagagtagaggcctgaactcagaggggctgtacagggtgagtggatttagcgacctcatcgaagacgtcaagatggctttcgacagagatggcgaaaaggcagatatcagcgtgaatatgtacgaggacatcaacataataactggggccctcaaactctacttccgggacctccccatccctctgatcacctacgacgcgtatccaaaatttattgagtctgcgaagataatggaccctgatgagcagttggagactcttcatgaggctctgaaactcttgcctccagctcattgcgagacccttcgctacctgatggcccatttgaagagggtcactctccatgaaaaagaaaatctgatgaacgctgagaatcttggcatcgtgtttggtcccacccttatgagaagtcccgagttggacgccatggcagctttgaacgatattagatatcagcgactagtcgtcgagctattgattaaaaacgaggacatcttgttttag

SEQ ID NO: 121357 - DNA, 1380 bp, Artificial Sequence
  derived and/or modified sequence
atggccctgaccctgtttgacacagatgagtacagacctcctgtgtggaagagctacctgtaccagctgcagcaggaggccccccacccccggcgcatcacctgcacctgtgaggtggagaaccggcccaagtactacggccgggagttccacggcatgatcagccgggaggccgctgaccagctgctgattgtggccgagggcagctacctgatccgggagagccagaggcagcccggcacctacaccctggccctgcgcttcggcagccagaccaggaacttccggctgtactatgatggcaagcactttgtgggggagaagagatttgagagcatccatgacctggtgacagatggcctcatcaccctgtacatcgagaccaaggctgctgagtacatcgccaagatgaccatcaaccccatctatgaacatgtgggctacaccaccctgaaccgggagcccgcctacaagaagcacatgcctgtgctgaaggagacccatgatgagcgggacagcacaggccaggatggagtgtctgagaagaggctgaccagcctggtgagaagagccaccctgaaggaaaatgagcagatccccaagtatgagaagatccacaacttcaaggtgcacaccttccggggcccccactggtgtgagtactgtgccaacttcatgtggggcctcatcgcccagggcgtgaagtgtgccgactgtggcctgaatgtgcacaagcagtgcagcaagatggtgcccaatgactgcaagccagacctgaagcacgtgaagaaggtgtacagctgtgacctgaccaccctggtgaaggcccacaccaccaagaggcccatggtggtggacatgtgcatccgggagattgagagccggggcctgaacagcgagggcctgtacagagtgtctggcttcagtgacctgattgaagatgtgaagatggcctttgacagagatggagagaaggctgacatctctgtgaacatgtatgaggacatcaacatcatcaccggggccctgaagctgtacttccgggacctgcccatccccctcatcacctatgatgcctaccccaagttcatcgagagcgccaagatcatggaccctgatgagcagctggagaccctgcacgaggccctgaagctgctgcccccagcccactgtgagaccctgcgctacctgatggcccacctgaagagggtgaccctgcacgagaaggagaacctgatgaatgctgagaacctgggcatcgtgtttggccccaccctgatgaggagccctgagctggatgccatggccgccctgaatgacatccgctaccagaggctggtggtggagctgctgatcaagaatgaagacatcctcttctag

SEQ ID NO: 121358 - DNA, 1380 bp, Artificial Sequence
  derived and/or modified sequence
atggccctgaccctgttcgacaccgacgagtaccggccccccgtgtggaaatcttacctttaccagcttcagcaggaagccccacacccacgcaggatcacttgcacatgtgaggtagagaacagaccgaagtactacggaagagagtttcacggaatgatatctcgggaggcggctgatcagctgttaattgtcgccgagggctcctacctgatccgtgaatcccaacggcaacccggaacctacaccctggccctgcgcttcggatcacagacaaggaactttcggctgtactacgatgggaagcactttgtcggcgagaagcgctttgaaagtattcacgatctagtcactgacggtcttataacactgtacattgaaacaaaggccgctgagtacatcgctaagatgaccataaaccccatctacgaacatgtcggttatactactctcaatagggaacccgcctacaaaaaacatatgcctgtcctgaaagagacccacgacgagagagattcgactggacaggacggtgttagcgagaagcgtcttacaagtctggtgaggcgggccactttaaaagaaaacgaacagatcccaaaatatgaaaaaatacataactttaaagtgcatacttttaggggtccccactggtgtgaatactgtgccaatttcatgtgggggctcatagcccagggagtaaagtgcgccgactgtggcttgaatgtgcataagcagtgttctaagatggtgcctaacgactgtaagcctgacttgaagcacgtgaagaaagtgtattcttgtgacctgacaaccctggtgaaggcccacaccaccaaaagacccatggtagtggatatgtgcattagggaaatagaatcaagagggctgaactcagaaggactgtaccgcgtgtctggatttagtgacctaatcgaagatgtgaaaatggcttttgacagggacggtgagaaggccgacatcagcgtgaatatgtacgaagatatcaacataatcaccggagctttgaagctgtatttcagggatcttccaatacctctcattacctatgacgcctatcccaagttcatagagtccgcgaaaattatggaccccgatgagcaattggaaacgctccatgaagctttgaagctcctcccacccgcccattgtgagaccttacgctacttgatggctcatttaaagcgcgtcacactgcacgagaaggagaatctaatgaatgcggaaaaccttggaattgtgtttggtcccactctcatgcgatccccggaattggatgccatggcagccctgaatgatattagatatcaaagacttgtggtagagcttctcatcaagaatgaggacattctgttttag

SEQ ID NO: 121359 - DNA, 1380 bp, Artificial Sequence
  derived and/or modified sequence
atggcgctcacgctgtttgacaccgatgaatatagacctcctgtttggaagtcctacctgtaccagttacagcaggaggccccacatcctcgtcgcattacttgtacgtgtgaggtagaaaatcgtcccaaatactacggtcgagagtttcacgggatgatttcccgagaggccgctgaccaacttctgattgtcgctgaaggaagctatctcatccgagagagccaacgccaacccggaacctacactttggcacttaggttcggcagccagacaagaaacttccgcctgtactatgacggaaaacatttcgtgggggagaagcgcttcgaatctattcacgacctggtgactgatggcttaattacactctacattgaaaccaaggccgcagaatatattgcaaaaatgaccataaatcccatatatgaacatgtaggttacaccactctgaatcgagagcccgcttacaagaagcatatgcccgttttgaaggaaacacacgatgagagggacagtacaggtcaggatggcgtttccgagaagagactgactagtctggtccgccgagccaccctgaaggagaacgaacagatcccaaagtatgaaaagattcacaattttaaggtgcataccttccgcggtcctcactggtgtgagtactgcgcgaactttatgtggggtcttatcgctcagggggtaaagtgtgccgactgcgggctgaatgtacataaacagtgctccaaaatggtgccgaacgattgcaagcccgacctgaaacacgttaaaaaagtgtactcttgtgacctgacaactctcgtcaaagctcacaccactaaacgcccaatggttgtggatatgtgtatcagggagattgagtccaggggcttaaacagcgaagggctgtatagggtgtcgggttttagcgacctaatcgaggacgtgaagatggccttcgatcgggatggggagaaagctgacatctcagtaaatatgtacgaagacatcaacattattaccggtgcgttgaaactctatttccgcgatttacccatccccctaatcacatacgacgcttacccaaagttcatcgagtccgccaaaatcatggaccccgacgaacagctggagacccttcatgaagccctcaaattactcccaccggctcactgtgaaactctgagatacctgatggcccatctcaaaagggtcacccttcacgagaaggaaaatcttatgaacgccgagaacctgggaattgtgttcggtcctaccctcatgcggagccctgagctggatgcaatggcagctctgaacgacatcagataccagagactggtggtagaattgctcattaaaaatgaagacattctgttttag

SEQ ID NO: 121360 - DNA, 2447 bp, Artificial Sequence
  derived and/or modified sequence
gccaagcctcctgcctcgcaggtacctcctcccgcgcgcacgctccgcgcctgatggcagcgacaagtgccggctcgcggagagctagcggggctccctgggcccggtgcgcccgacaataacgcgtgaataactttttcttgcagcggtcccccgcgtcccggcctgcagcctccccgggcgccggcgcccccagcacgccccatcgggcaccccactctctccgaggtgtgggtgcggcgggctgatgaggtgatccctagcccgcctgggaggagcgcctggactcgcgggcggcggcgagcgcctttacaatggccctgaccctgtttgatacagatgaatatagacctcctgtttggaaatcttacttatatcagctacaacaggaagcccctcatcctcgaagaattacctgtacttgcgaggtggaaaacagaccaaagtattatggaagagagtttcatggcatgatctccagagaagcagccgaccagctcttgattgtggctgaggggagctacctcatccgggagagccagcggcagccagggacctacactttggctttaagatttggaagtcaaaccagaaacttcaggctctactacgatggcaagcactttgttggggagaaacgctttgagtccatccacgatctggtgactgatggcttgattactctctatattgaaaccaaggcagcagaatacattgccaagatgacgataaacccaatttatgagcacgtaggatacacaaccttaaacagagagccagcatacaaaaaacatatgccagtcctgaaagagacacatgatgagagagattctacaggccaggatggggtgtcagagaaaaggttgacatcacttgttagaagagcaactctgaaagaaaacgagcaaattccaaaatatgaaaagattcacaatttcaaggtgcatacattcagagggccacactggtgtgaatactgtgccaactttatgtggggtctcattgctcagggagtgaaatgtgcagattgtggtttgaatgttcataagcagtgttccaagatggtcccaaatgactgtaagccagacttgaagcatgtcaaaaaggtgtacagctgtgaccttacgacgctcgtgaaagcacataccactaagcggccaatggtggtagacatgtgcatcagggagattgagtctagaggtcttaattctgaaggactataccgagtatcaggatttagtgacctaattgaagatgtcaagatggctttcgacagagatggtgagaaggcagatatttctgtgaacatgtatgaagatatcaacattatcactggtgcacttaaactgtacttcagggatttgccaattccactcattacatatgatgcctaccctaagtttatagaatctgccaaaattatggatccggatgagcaattggaaacccttcatgaagcactgaaactactgccacctgctcactgcgaaaccctccggtacctcatggcacatctaaagagagtgaccctccacgaaaaggagaatcttatgaatgcagagaaccttggaatcgtctttggacccacccttatgagatctccagaactagacgccatggctgcattgaatgatatacggtatcagagactggtggtggagctgcttatcaaaaacgaagacattttattttaaatttttaatttgaggggaaaagaaatgttttacagatgaaggaatgttttatagtaatttaatttgctcctgtagctgcattatttcttgattagaggtttgggcatataaccagattaaagtgaaggaactttctgttgtttttgtagcaccgctcagctgtcttgtaaaacagtgaacacacgctttctggttctagtaatcctgggtgtttatcacgttcagagaaactcaagctattgcatgattagccccctatctggcaaggaaaccccatacagaagaaacaacaaacctgcgcctgcaccgcctctgcgtcctgggtagtctgtgcttgtaatccagcatgtttcacagagtaagcctgttgtgactttgcttttggggtctatgtcattggtttctgatgcttgtacaaacacgcacacacaaatggataaaacagcacctctggctgttacattaccataaaccatatcacatgcctacattttacaaatgatttctggtttctcttagttcttctctaacatagtactttctttccagcaaaagcaaaatgtgttttcagatttgttactttaataaaggttatccataccaataaaaagtgtacaacacagcattttctgttaaattattattggttttcagttgtaatttggtattttttctggcatgcgtttattaatttattaaattggcttttagaaataaaaaatattgatagcttacttttttctcataagaata

SEQ ID NO: 121361 - DNA, 1380 bp, Artificial Sequence
  derived and/or modified sequence
atggccctgaccctgttcgacaccgacgagtacagaccccccgtgtggaagagctacctgtaccagctgcagcaggaggccccccaccccagaagaatcacctgcacctgcgaggtggagaacagacccaagtactacggcagagagttccacggcatgatcagcagagaggccgccgaccagctgctgatcgtggccgagggcagctacctgatcagagagagccagagacagcccggcacctacaccctggccctgagattcggcagccagaccagaaacttcagactgtactacgacggcaagcacttcgtgggcgagaagagattcgagagcatccacgacctggtgaccgacggcctgatcaccctgtacatcgagaccaaggccgccgagtacatcgccaagatgaccatcaaccccatctacgagcacgtgggctacaccaccctgaacagagagcccgcctacaagaagcacatgcccgtgctgaaggagacccacgacgagagagacagcaccggccaggacggcgtgagcgagaagagactgaccagcctggtgagaagagccaccctgaaggagaacgagcagatccccaagtacgagaagatccacaacttcaaggtgcacaccttcagaggcccccactggtgcgagtactgcgccaacttcatgtggggcctgatcgcccagggcgtgaagtgcgccgactgcggcctgaacgtgcacaagcagtgcagcaagatggtgcccaacgactgcaagcccgacctgaagcacgtgaagaaggtgtacagctgcgacctgaccaccctggtgaaggcccacaccaccaagagacccatggtggtggacatgtgcatcagagagatcgagagcagaggcctgaacagcgagggcctgtacagagtgagcggcttcagcgacctgatcgaggacgtgaagatggccttcgacagagacggcgagaaggccgacatcagcgtgaacatgtacgaggacatcaacatcatcaccggcgccctgaagctgtacttcagagacctgcccatccccctgatcacctacgacgcctaccccaagttcatcgagagcgccaagatcatggaccccgacgagcagctggagaccctgcacgaggccctgaagctgctgccccccgcccactgcgagaccctgagatacctgatggcccacctgaagagagtgaccctgcacgagaaggagaacctgatgaacgccgagaacctgggcatcgtgttcggccccaccctgatgagaagccccgagctggacgccatggccgccctgaacgacatcagataccagagactggtggtggagctgctgatcaagaacgaggacatcctgttctag

SEQ ID NO: 121362 - protein, 381 aa, Artificial Sequence
  derived and/or modified sequence
MPFSNSHNALKLRFPAEDEFPDLSAHNNHMAKVLTPELYAELRAKSTPSGFTLDDVIQTGVDNPGHPYIMTVGCVAGDEESYEVFKDLFDPIIEDRHGGYKPSDEHKTDLNPDNLQGGDDLDPNYVLSSRVRTGRSIRGFCLPPHCSRGERRAIEKLAVEALSSLDGDLAGRYYALKSMTEAEQQQLIDDHFLFDKPVSPLLLASGMARDWPDARGIWHNDNKTFLVWVNEEDHLRVISMQKGGNMKEVFTRFCTGLTQIETLFKSKDYEFMWNPHLGYILTCPSNLGTGLRAGVHIKLPNLGKHEKFSEVLKRLRLQKRGTGGVDTAAVGGVFDVSNADRLGFSEVELVQMVVDGVKLLIEMEQRLEQGQAIDDLMPAQK

SEQ ID NO: 121363 - protein, 346 aa, Artificial Sequence
  derived and/or modified sequence
MPFSNSHNALKLRFPAEDEFPDLSAHNNHMAKVLTPELYAELRAKSTPSGFTLDDVIQTGVDNPGHPYIMTVGCVAGDEESYEVFKDLFDPIIEDRHGGYKPSDEHKTDLNPPRGAPRIEKLAVEALSSLDGDLAGRYYALKSMTEAEQQQLIDDHFLFDKPVSPLLLASGMARDWPDARGIWHNDNKTFLVWVNEEDHLRVISMQKGGNMKEVFTRFCTGLTQIETLFKSKDYEFMWNPHLGYILTCPSNLGTGLRAGVHIKLPNLGKHEKFSEVLKRLRLQKRGTGGVDTAAVGGVFDVSNADRLGFSEVELVQMVVDGVKLLIEMEQRLEQGQAIDDLMPAQK

SEQ ID NO: 121364 - protein, 217 aa, Artificial Sequence
  derived and/or modified sequence
MPFSNSHNALKLRFPAEDEFPDLSAHNNHMAKVLTPELYAELRAKSTPSGFTLDDVIQTGVDNPGHPYIMTVGCVAGDEESYEVFKDLFDPIIEDRHGGYKPSDEHKTDLNPDNLQGGDDLDPNYVLSSRVRTGRSIRGFCLPPHCSRGERRAIEKLAVEALSSLDGDLAGRYYALKSMTEAEQQQLIDDHFLFDKPVSPLLLASGMARDWPDARGI

SEQ ID NO: 121365 - DNA, 1146 bp, Artificial Sequence
  derived and/or modified sequence
atgcctttttccaactcccacaacgccctgaagttgagattccctgcagaagacgaattccccgacttgtccgctcacaataaccacatggccaaggtcctgacgcccgaactgtacgctgaacttagggccaagtcaacgcccagtgggttcaccctggatgacgtgatccagactggcgtggacaatcccggacatccctacattatgaccgtaggctgtgtcgccggagatgaggagtcttatgaggtttttaaagatctctttgatcctataattgaggacagacatggaggatataaaccgtcggacgagcacaaaaccgacctgaatccagataatctgcaggggggggatgatctagaccctaactatgtgctgtcaagccgtgtcagaacaggacggagtattaggggattctgtctgccacctcactgtagtagaggtgagcgacgcgcaatcgagaagttagctgtagaggctctgtcaagccttgacggagaccttgctgggagatactacgcactcaagagcatgaccgaagccgagcagcaacagctgatcgacgatcatttcctgttcgacaagccagtctctccgctgctactggcatctggaatggccagagattggcccgacgccagaggaatctggcacaacgacaataaaactttcctggtttgggtgaacgaggaagatcatctccgagttatttcaatgcagaagggtggaaacatgaaggaggtgttcactcgattttgcaccggattgacacagatcgaaacactgtttaagtctaaagactacgagttcatgtggaatccccatttaggatatatcctgacatgcccgtctaacctggggacaggcctccgtgcaggggtccatatcaaactcccaaatctgggtaagcacgagaaattttcagaggtactgaaaagacttcgacttcagaaacgggggacagggggcgtcgacactgccgccgtggggggggtgttcgacgtgtccaacgccgatagactggggttcagtgaggtggaactcgtgcagatggttgtggacggggtgaaactgcttattgaaatggagcaaaggctcgagcagggccaagccatagacgatctcatgcccgcccaaaaatag

SEQ ID NO: 121366 - DNA, 1041 bp, Artificial Sequence
  derived and/or modified sequence
atgcccttttccaactctcacaacgcactgaagctgaggttcccagcagaggacgagttccccgacttatccgcgcataacaatcacatggcaaaggtgctcacgccagagttatacgccgagctccgcgcaaaaagcaccccatctggtttcacactcgatgacgtgattcagacaggtgttgacaacccggggcacccctacattatgacggtcggatgtgtagcaggcgacgaggaatcctacgaggtatttaaagacctcttcgatcccatcatcgaggatcgccatggcggttacaagccttcagacgagcacaagactgacctcaatcccccccgcggcgctccccgtattgagaagttggctgtcgaagctctatccagcctggatggagacctggcaggacgctactatgctctgaagagtatgacagaagccgagcagcagcaactcatcgatgaccatttcctgtttgacaagcctgtttcacccctcctcctggcatccggcatggcccgggattggccagacgcgcgcggtatatggcacaacgacaacaagacctttctcgtgtgggtgaacgaagaggatcatctgagagtcatctccatgcagaaagggggtaacatgaaggaggtgttcacaagattctgcaccgggctgacccagatcgagacactctttaagagcaaggactacgagttcatgtggaatccacatcttggctacatactgacctgcccctccaatttgggcacagggcttagggccggtgtccacattaaacttcccaatttaggcaaacacgaaaaattttcagaggtgctcaaaaggcttaggctgcaaaaacgggggactggtggggtcgacaccgctgctgtcggtggggtgttcgacgtgtccaatgccgacagactagggttctccgaagtggagctcgtgcagatggtggttgacggcgttaagctgctcatcgagatggagcagcggctagaacagggccaggctatagatgacctgatgcctgcccagaagtag

SEQ ID NO: 121367 - DNA, 654 bp, Artificial Sequence
  derived and/or modified sequence
atgcccttttctaattctcataacgcgcttaagctccgctttccagccgaagacgagttcccagacctgagcgcacataacaaccacatggccaaagtcctcacaccggaactatatgctgaactgcgcgctaagagtaccccgtctggatttactctagacgatgttattcaaactggcgtagacaaccctggccatccatacattatgacagtgggctgcgttgctggagatgaggaaagttacgaggtgtttaaggacttatttgaccccattattgaagacagacacggtggatataaaccctccgacgaacacaaaactgacttgaacccagataatcttcagggtggggatgatctcgacccaaactacgtactgagctcacgcgtaagaacgggcaggtccattcgcggattttgcctaccccctcattgcagtcgtggggagcgcagggcgattgagaaactcgctgtggaggccctatcttcactggacggggacctggcagggcggtattacgccctgaagtcaatgaccgaagctgagcaacagcagctcatcgacgatcacttcctgtttgataaaccagttagcccactgctgctcgctagcggaatggcccgtgattggcctgacgcaagagggatctag

SEQ ID NO: 121368 - DNA, 1146 bp, Artificial Sequence
  derived and/or modified sequence
atgcccttcagcaacagccacaatgccctgaagctgcgcttcccagcagaagatgagttcccagacctgagcgcccacaacaaccacatggccaaggtgctgaccccagagctgtatgcagagctgcgggccaagagcaccccatctggcttcaccctggatgatgtgatccagacaggagtggacaaccctggccacccctacatcatgacagtgggctgtgtggccggagatgaggagagctatgaggtgttcaaggacctgtttgaccccatcatcgaggacagacatggaggctacaagcccagtgatgagcacaagacagacctgaacccagacaacctgcagggcggagatgacctggaccccaactacgtgctgagcagccgggtgaggacaggccgcagcatccggggcttctgcctgcccccccactgcagcagaggagagcggcgggccatcgagaagctggccgtggaggccctgagcagcctggatggagacctggccggccgctactatgccctgaagtccatgacagaggccgagcagcagcagctgattgatgaccacttcctgtttgacaagcctgtgagccccctgctgctggccagcggcatggcccgggactggccagatgcccggggcatctggcacaatgacaacaagaccttcctggtgtgggtgaatgaggaggaccacctgcgggtcatctccatgcagaagggcggcaacatgaaggaggtgttcacccgcttctgcaccggcctgacccagatcgagaccctcttcaagagcaaggactatgagttcatgtggaacccccacctgggctacatcctgacctgccccagcaacctgggcaccggcctgcgggccggcgtgcacatcaagctgcccaacctgggcaagcatgagaagttcagcgaggtgctgaagaggctgcggctgcagaagaggggcaccggcggcgtggacacagctgctgtgggcggcgtgtttgatgtgtccaatgctgaccggctgggcttcagcgaggtggagctggtgcagatggtggtggatggagtgaagctgctgattgagatggagcagaggctggagcagggccaggccattgatgacctgatgcctgcccagaagtag

SEQ ID NO: 121369 - DNA, 1041 bp, Artificial Sequence
  derived and/or modified sequence
atgcccttcagcaacagccacaatgccctgaagctgcgcttcccagcagaagatgagttcccagacctgagcgcccacaacaaccacatggccaaggtgctgaccccagagctgtatgcagagctgcgggccaagagcaccccatctggcttcaccctggatgatgtgatccagacaggagtggacaaccctggccacccctacatcatgacagtgggctgtgtggccggagatgaggagagctatgaggtgttcaaggacctgtttgaccccatcatcgaggacagacatggaggctacaagcccagtgatgagcacaagacagacctgaacccccccaggggggcccccagaattgagaagctggccgtggaggccctgagcagcctggatggagacctggccggccgctactatgccctgaagtccatgacagaagctgagcagcagcagctgattgatgaccacttcctgtttgacaagcctgtgagccccctgctgctggccagcggcatggcccgggactggccagatgcccggggcatctggcacaatgacaacaagaccttcctggtgtgggtgaatgaggaggaccacctgcgggtcatctccatgcagaagggcggcaacatgaaggaggtgttcacccgcttctgcaccggcctgacccagatcgagaccctcttcaagagcaaggactatgagttcatgtggaacccccacctgggctacatcctgacctgccccagcaacctgggcaccggcctgcgggccggcgtgcacatcaagctgcccaacctgggcaagcatgagaagttcagcgaggtgctgaagaggctgcggctgcagaagaggggcactggaggagtggacacagctgctgtgggcggcgtgtttgatgtgtccaatgctgaccggctgggcttcagcgaggtggagctggtgcagatggtggtggatggagtgaagctgctgattgagatggagcagaggctggagcagggccaggccattgatgacctgatgcctgcccagaagtag

SEQ ID NO: 121370 - DNA, 654 bp, Artificial Sequence
  derived and/or modified sequence
atgcccttcagcaacagccacaatgccctgaagctgcgcttcccagcagaagatgagttcccagacctgagcgcccacaacaaccacatggccaaggtgctgaccccagagctgtatgcagagctgcgggccaagagcaccccatctggcttcaccctggatgatgtgatccagacaggagtggacaaccctggccacccctacatcatgacagtgggctgtgtggccggagatgaggagagctatgaggtgttcaaggacctgtttgaccccatcatcgaggacagacatggaggctacaagcccagtgatgagcacaagacagacctgaacccagacaacctgcagggcggagatgacctggaccccaactacgtgctgagcagccgggtgaggacaggccgcagcatccggggcttctgcctgcccccccactgcagcagaggagagcggcgggccatcgagaagctggccgtggaggccctgagcagcctggatggagacctggccggccgctactatgccctgaagtccatgacagaggccgagcagcagcagctgattgatgaccacttcctgtttgacaagcctgtgagccccctgctgctggccagcggcatggcccgggactggccagatgcccggggcatctag

SEQ ID NO: 121371 - DNA, 1146 bp, Artificial Sequence
  derived and/or modified sequence
atgcccttcagcaacagccacaacgccctgaagctgcggttccccgctgaggacgaatttccagatctgagcgcccacaataatcacatggccaaagtccttactcccgaactgtatgcagagctccgcgccaagtcaacgccttccggtttcaccttagatgacgtgatccagactggcgtggacaaccccggccatccctatattatgaccgtcggctgtgtcgccggcgatgaagagtcgtacgaggtgtttaaagatctctttgaccccataatcgaagacagacatggaggctacaagccaagcgacgaacacaagacggatctgaacccagataacctgcaggggggggacgacttggacccaaactatgtgctaagcagtcgcgttcggactgggagatccattcgcggattctgcttgccccctcactgttcacgaggcgagaggcgcgccatagaaaaactcgccgttgaggccctgtcctctttggacggggatttagcagggcggtattacgcccttaagtctatgaccgaggccgaacagcagcaattaatcgacgaccattttctatttgataagcccgtgtccccccttctcttggcgtccggcatggccagagactggccagacgcccgcgggatctggcacaatgacaataagacgttcctggtgtgggttaacgaggaagatcatttgagagtcatctccatgcagaaaggagggaacatgaaagaggtcttcacccgtttctgtacaggcctcacacagatagagactctgttcaaatcaaaagactacgaatttatgtggaaccctcatctcggttatattcttacttgcccatctaacctgggtaccggattaagggccggggtgcacatcaagctacctaacctcggtaagcatgaaaagtttagcgaggtgctgaaaagactcagactccagaagcggggcactggcggagtcgacaccgcagcagtgggcggagtatttgacgtgagcaatgcagacaggctgggcttctctgaggttgaactggtgcaaatggtggtggatggcgttaagctgctgatagaaatggagcagcggctggaacaggggcaggccatcgatgacttgatgcccgcacagaagtag

SEQ ID NO: 121372 - DNA, 1041 bp, Artificial Sequence
  derived and/or modified sequence
atgcccttcagcaacagccacaacgccctgaagctgcggttccccgcagaggacgaatttccggacctaagcgcccacaataaccatatggctaaggtcctgaccccagagctgtatgccgaactgagagctaagagtaccccaagcggctttacgctggatgatgttatccaaacgggagtggacaatccggggcacccatacatcatgactgtcggatgtgttgccggcgacgaggaaagctacgaggtctttaaggatctcttcgaccctatcattgaagacagacacggaggatataaaccttctgatgagcacaagactgatctcaatccacctagaggagctcctagaattgagaagctggctgtggaggccctttcaagcctcgatggggacctggcgggaaggtattacgccttaaaaagtatgacggaggccgagcaacagcagctgattgacgaccactttttgttcgacaagccagttagccccctgctgctcgcatctggaatggccagagattggccggacgcaagaggaatttggcataacgacaacaaaacatttctcgtgtgggtgaatgaggaagaccatctccgggtgatttcgatgcagaaaggaggcaacatgaaggaagtgttcaccaggttttgcaccggtctgacacagattgagacacttttcaagagcaaagattatgaattcatgtggaacccccatttaggatacatcctgacttgcccttctaacttgggtactggactccgggcgggggtgcacattaagctgccaaatctgggcaagcatgagaagttcagcgaggtgctcaagcgccttaggttacagaaaaggggcaccgggggggtcgatacagccgccgtcggaggtgtgtttgacgtgtctaacgctgacaggctgggtttctctgaggtcgaactcgttcagatggtggtggatggagtcaaactactgatcgaaatggagcaacgcctggagcaaggccaagcaatcgatgacctcatgcctgctcagaaatag

SEQ ID NO: 121373 - DNA, 654 bp, Artificial Sequence
  derived and/or modified sequence
atgcccttcagcaacagccacaacgccctgaagctgcggttccccgcagaagatgaatttcctgacttgtcagcccataataaccacatggcgaaggtcttaacccccgagttgtacgccgagctacgggctaaatccactccaagcggatttacactggacgacgtgatccagacaggcgtcgacaaccccggacacccatatatcatgaccgtcggatgtgtggcaggcgacgaagaaagctatgaagtgttcaaggacctcttcgaccccataatcgaggaccggcatggaggctacaagccgagcgatgagcataagactgatctaaaccccgacaacctgcagggcggcgatgatctagaccccaattatgttctgagttctcgcgtacgaaccggtaggagcatcaggggtttctgtctgccaccacactgcagccgcggcgaacgccgcgcaattgagaaacttgccgtggaagctctaagctcattggatggcgacctggcaggtaggtactacgcactgaagtccatgactgaagcagaacagcaacagcttattgatgaccactttctgtttgataagccagtctcccctctcctcctggccagtgggatggccagggactggccagatgctagagggatttag

SEQ ID NO: 121374 - DNA, 1146 bp, Artificial Sequence
  derived and/or modified sequence
atgcccttttccaactcacacaatgccctgaaactgaggttcccagccgaggacgagtttcccgatctgagtgctcacaacaaccacatggcaaaggtccttactcccgaactctacgctgagctcagggctaaatcaaccccttccggatttaccctggacgacgtgatccagacaggagtggacaatcctggtcatccatatattatgacggttggatgcgtcgccggagatgaagagagttacgaagtatttaaggatctgttcgatccaatcatcgaagatcgacacggcggatataagccgtctgatgagcacaagaccgatcttaatcccgacaacctacaggggggagatgacctggaccccaattatgtactgtcatcccgcgtgagaaccggtcggagcataaggggcttttgcctacctccgcattgcagccgtggcgagcgtagagctatagagaagcttgccgtggaagctcttagtagtctagacggggacttggccggacgttattacgccttaaagtcaatgactgaggcagagcagcaacagcttatcgatgaccactttctgtttgataaacctgtgagtcctctgttattggctagcggcatggcgagggattggcccgacgccagaggaatctggcataacgataacaagaccttcctggtatgggtgaatgaagaggaccacctccgtgtcatttccatgcaaaaaggcggaaacatgaaggaagtgtttacacgattttgcacgggattgacccagattgagacacttttcaagtcaaaggactacgagttcatgtggaacccgcatctaggatatattttaacttgccccagcaacctgggcacgggactccgagctggtgtgcatattaaactgcccaacctgggaaagcatgagaagttctccgaagtattgaagcgcttacgcctgcaaaagagaggaacagggggtgtggataccgcggctgtgggcggtgtgtttgatgtgagtaacgccgatcgactgggattttctgaggtggagctggtccagatggtggtggacggcgtcaaactcctgatcgaaatggagcagaggctggagcagggacaggccatcgatgatctgatgccagcccagaaatag

SEQ ID NO: 121375 - DNA, 1041 bp, Artificial Sequence
  derived and/or modified sequence
atgcccttcagtaactctcacaacgccctcaaattgcgcttcccagccgaagatgaatttcccgacctgtcagcgcataacaaccacatggcgaaagtactgacacctgagctctatgcagagctgcgtgcaaaaagcactccgtcgggctttacattagacgacgtgattcaaaccggagttgacaatccagggcacccatacatcatgacggttggatgtgtggctggcgatgaagaatcttatgaagtgttcaaggacctgttcgaccctattattgaagacaggcacggaggctataaaccatctgacgagcacaaaacagacttgaaccctcctcgaggagctccaagaatcgaaaagcttgccgttgaggcactgtcctccctggacggagacctggccggaagatactatgcccttaagtccatgacagaagcggagcagcagcagttgattgatgaccattttctgttcgacaaaccagtgtcccccctacttcttgcctcaggaatggctagggactggcctgatgcacgcggaatctggcacaatgataacaaaactttcctagtgtgggtaaacgaggaggatcatctgagggtgatcagcatgcagaagggaggcaacatgaaagaggtgttcacccggttctgtaccggtctcacccagattgaaaccctgtttaagtccaaggactacgaatttatgtggaacccccatctaggctatatattaacttgtccttcgaacctgggtacgggcctgcgggctggtgttcatattaagcttcccaacctgggcaaacatgagaagttttccgaggtgctgaaacggctgagactccagaagaggggaaccgggggagttgatacggctgcagtaggaggagtttttgacgtcagcaatgctgaccggctaggttttagtgaggtcgagctggtgcagatggtggtcgatggggtgaagctattaattgaaatggaacagcgcttagagcagggtcaggctatagacgatctgatgccagcccagaagtag

SEQ ID NO: 121376 - DNA, 654 bp, Artificial Sequence
  derived and/or modified sequence
atgccatttagcaacagtcacaacgcccttaaactccggtttccagctgaagatgagtttcccgatctctccgcccataacaaccacatggccaaggttctcactcctgagttgtacgccgaacttcgcgctaaaagcaccccaagtggtttcacactcgatgatgtaatccagactggtgttgacaaccctggacacccctacattatgacagttggatgtgtggcaggagacgaggagtcctatgaggttttcaaagacctcttcgaccccattattgaggatcggcacggaggctataagccttcagacgaacacaaaacggacttgaacccagacaacttgcagggcggtgatgacctggaccctaactatgtgctttcctcacgagttaggacgggacgaagtatccggggattctgtctgcccccacactgctctcgaggggagaggcgggcaattgagaaattggcagtcgaagccctgtcctccctcgatggcgatctcgctggccgttactacgctctgaagtctatgaccgaggcagagcagcagcaattgatcgacgaccattttttgtttgataaacctgtcagcccgctgctcttggcaagcggcatggcacgcgattggccggacgccagaggcatctag

SEQ ID NO: 121377 - DNA, 1709 bp, Artificial Sequence
  derived and/or modified sequence
agtttcccgcccagaggcaagggcgtgcgaggggatccagatatccaaggacctgaggtttcggcctcgaggtcttgggcgggggactgggcaggctgcgcggggtcccagcgaggggacagctcgggtgggcggccagggtgttgggggctgcgggcggcggacaaagcggcggcaccaccccgcggcgcgggccaatggaatgaatgggctataaatagccgccaatgggcggcccgcgttgtgccccttaagagccgcgggagcgcggagcggccgctgttcgcctgcgtcgctccgggagctgccgacggacggagcgcccccgcccccgcccggccgcccgcccgccgccgccatgcccttctccaacagccacaacgcactgaagctgcgcttcccggccgaggacgagttccccgacctgagcgcccacaacaaccacatggccaaggtgctgacccccgagctgtacgcggagctgcgcgccaagagcacgccgagcggcttcacgctggacgacgtcatccagacaggcgtggacaacccgggccacccgtacatcatgaccgtgggctgcgtggcgggcgacgaggagtcctacgaagtgttcaaggatctcttcgaccccatcatcgaggaccggcacggcggctacaagcccagcgatgagcacaagaccgacctcaaccccgacaacctgcagggcggcgacgacctggaccccaactacgtgctgagctcgcgggtgcgcacgggccgcagcatccgtggcttctgcctccccccgcactgcagccgcggggagcgccgcgccatcgagaagctcgcggtggaagccctgtccagcctggacggcgacctggcgggccgatactacgcgctcaagagcatgacggaggcggagcagcagcagctcatcgacgaccacttcctcttcgacaagcccgtgtcgcccctgctgctggcctcgggcatggcccgcgactggcccgacgcccgcggtatctggcacaatgacaataagaccttcctggtgtgggtcaacgaggaggaccacctgcgggtcatctccatgcagaaggggggcaacatgaaggaggtgttcacccgcttctgcaccggcctcacccagattgaaactctcttcaagtctaaggactatgagttcatgtggaaccctcacctgggctacatcctcacctgcccatccaacctgggcaccgggctgcgggcaggtgtgcatatcaagctgcccaacctgggcaagcatgagaagttctcggaggtgcttaagcggctgcgacttcagaagcgaggcacaggcggtgtggacacggctgcggtgggcggggtcttcgacgtctccaacgctgaccgcctgggcttctcagaggtggagctggtgcagatggtggtggacggagtgaagctgctcatcgagatggagcagcggctggagcagggccaggccatcgacgacctcatgcctgcccagaaatgaagcccggcccacacccgacaccagccctgctgcttcctaacttattgcctgggcagtgcccaccatgcacccctgatgttcgccgtctggcgagcccttagccttgctgtagagacttccgtcacccttggtagagtttatttttttgatggctaagatactgctgatgctgaaataaactagggttttggcctgcctgcgtctg

SEQ ID NO: 121378 - DNA, 1318 bp, Artificial Sequence
  derived and/or modified sequence
gctgttcgcctgcgtcgctccgggagctgccgacggacggagcgcccccgcccccgcccggccgcccgcccgccgccgccatgcccttctccaacagccacaacgcactgaagctgcgcttcccggccgaggacgagttccccgacctgagcgcccacaacaaccacatggccaaggtgctgacccccgagctgtacgcggagctgcgcgccaagagcacgccgagcggcttcacgctggacgacgtcatccagacaggcgtggacaacccgggccacccgtacatcatgaccgtgggctgcgtggcgggcgacgaggagtcctacgaagtgttcaaggatctcttcgaccccatcatcgaggaccggcacggcggctacaagcccagcgatgagcacaagaccgacctcaaccccccgcggggagcgccgcgcatcgagaagctcgcggtggaagccctgtccagcctggacggcgacctggcgggccgatactacgcgctcaagagcatgacggaggcggagcagcagcagctcatcgacgaccacttcctcttcgacaagcccgtgtcgcccctgctgctggcctcgggcatggcccgcgactggcccgacgcccgcggtatctggcacaatgacaataagaccttcctggtgtgggtcaacgaggaggaccacctgcgggtcatctccatgcagaaggggggcaacatgaaggaggtgttcacccgcttctgcaccggcctcacccagattgaaactctcttcaagtctaaggactatgagttcatgtggaaccctcacctgggctacatcctcacctgcccatccaacctgggcaccgggctgcgggcaggtgtgcatatcaagctgcccaacctgggcaagcatgagaagttctcggaggtgcttaagcggctgcgacttcagaagcgaggcacaggcggtgtggacacggctgcggtgggcggggtcttcgacgtctccaacgctgaccgcctgggcttctcagaggtggagctggtgcagatggtggtggacggagtgaagctgctcatcgagatggagcagcggctggagcagggccaggccatcgacgacctcatgcctgcccagaaatgaagcccggcccacacccgacaccagccctgctgcttcctaacttattgcctgggcagtgcccaccatgcacccctgatgttcgccgtctggcgagcccttagccttgctgtagagacttccgtcacccttggtagagtttatttttttgatggctaagatactgctgatgctgaaataaactagggttttggcctgcc

SEQ ID NO: 121379 - DNA, 856 bp, Artificial Sequence
  derived and/or modified sequence
gcctggagcgcgcgccggaccggccgggggtccccggcgatgatggcgctccccgcgcgcgctgcggaccccgctgaccttggccgcgtcccggggggcgccggggggcccggcggcgggggcctgagtggtacgcgggagcccgggaaccccggcgtgccggtcccctctgaccccgcgtctccccgcagcccgccgccgccatgcccttctccaacagccacaacgcactgaagctgcgcttcccggccgaggacgagttccccgacctgagcgcccacaacaaccacatggccaaggtgctgacccccgagctgtacgcggagctgcgcgccaagagcacgccgagcggcttcacgctggacgacgtcatccagacaggcgtggacaacccgggccacccgtacatcatgaccgtgggctgcgtggcgggcgacgaggagtcctacgaagtgttcaaggatctcttcgaccccatcatcgaggaccggcacggcggctacaagcccagcgatgagcacaagaccgacctcaaccccgacaacctgcagggcggcgacgacctggaccccaactacgtgctgagctcgcgggtgcgcacgggccgcagcatccgtggcttctgcctccccccgcactgcagccgcggggagcgccgcgccatcgagaagctcgcggtggaagccctgtccagcctggacggcgacctggcgggccgatactacgcgctcaagagcatgacggaggcggagcagcagcagctcatcgacgaccacttcctcttcgacaagcccgtgtcgcccctgctgctggcctcgggcatggcccgcgactggcccgacgcccgcggtatctg

SEQ ID NO: 121380 - DNA, 1146 bp, Artificial Sequence
  derived and/or modified sequence
atgcccttcagcaacagccacaacgccctgaagctgagattccccgccgaggacgagttccccgacctgagcgcccacaacaaccacatggccaaggtgctgacccccgagctgtacgccgagctgagagccaagagcacccccagcggcttcaccctggacgacgtgatccagaccggcgtggacaaccccggccacccctacatcatgaccgtgggctgcgtggccggcgacgaggagagctacgaggtgttcaaggacctgttcgaccccatcatcgaggacagacacggcggctacaagcccagcgacgagcacaagaccgacctgaaccccgacaacctgcagggcggcgacgacctggaccccaactacgtgctgagcagcagagtgagaaccggcagaagcatcagaggcttctgcctgcccccccactgcagcagaggcgagagaagagccatcgagaagctggccgtggaggccctgagcagcctggacggcgacctggccggcagatactacgccctgaagagcatgaccgaggccgagcagcagcagctgatcgacgaccacttcctgttcgacaagcccgtgagccccctgctgctggccagcggcatggccagagactggcccgacgccagaggcatctggcacaacgacaacaagaccttcctggtgtgggtgaacgaggaggaccacctgagagtgatcagcatgcagaagggcggcaacatgaaggaggtgttcaccagattctgcaccggcctgacccagatcgagaccctgttcaagagcaaggactacgagttcatgtggaacccccacctgggctacatcctgacctgccccagcaacctgggcaccggcctgagagccggcgtgcacatcaagctgcccaacctgggcaagcacgagaagttcagcgaggtgctgaagagactgagactgcagaagagaggcaccggcggcgtggacaccgccgccgtgggcggcgtgttcgacgtgagcaacgccgacagactgggcttcagcgaggtggagctggtgcagatggtggtggacggcgtgaagctgctgatcgagatggagcagagactggagcagggccaggccatcgacgacctgatgcccgcccagaagtag

SEQ ID NO: 121381 - DNA, 1041 bp, Artificial Sequence
  derived and/or modified sequence
atgcccttcagcaacagccacaacgccctgaagctgagattccccgccgaggacgagttccccgacctgagcgcccacaacaaccacatggccaaggtgctgacccccgagctgtacgccgagctgagagccaagagcacccccagcggcttcaccctggacgacgtgatccagaccggcgtggacaaccccggccacccctacatcatgaccgtgggctgcgtggccggcgacgaggagagctacgaggtgttcaaggacctgttcgaccccatcatcgaggacagacacggcggctacaagcccagcgacgagcacaagaccgacctgaacccccccagaggcgcccccagaatcgagaagctggccgtggaggccctgagcagcctggacggcgacctggccggcagatactacgccctgaagagcatgaccgaggccgagcagcagcagctgatcgacgaccacttcctgttcgacaagcccgtgagccccctgctgctggccagcggcatggccagagactggcccgacgccagaggcatctggcacaacgacaacaagaccttcctggtgtgggtgaacgaggaggaccacctgagagtgatcagcatgcagaagggcggcaacatgaaggaggtgttcaccagattctgcaccggcctgacccagatcgagaccctgttcaagagcaaggactacgagttcatgtggaacccccacctgggctacatcctgacctgccccagcaacctgggcaccggcctgagagccggcgtgcacatcaagctgcccaacctgggcaagcacgagaagttcagcgaggtgctgaagagactgagactgcagaagagaggcaccggcggcgtggacaccgccgccgtgggcggcgtgttcgacgtgagcaacgccgacagactgggcttcagcgaggtggagctggtgcagatggtggtggacggcgtgaagctgctgatcgagatggagcagagactggagcagggccaggccatcgacgacctgatgcccgcccagaagtag

SEQ ID NO: 121382 - DNA, 654 bp, Artificial Sequence
  derived and/or modified sequence
atgcccttcagcaacagccacaacgccctgaagctgagattccccgccgaggacgagttccccgacctgagcgcccacaacaaccacatggccaaggtgctgacccccgagctgtacgccgagctgagagccaagagcacccccagcggcttcaccctggacgacgtgatccagaccggcgtggacaaccccggccacccctacatcatgaccgtgggctgcgtggccggcgacgaggagagctacgaggtgttcaaggacctgttcgaccccatcatcgaggacagacacggcggctacaagcccagcgacgagcacaagaccgacctgaaccccgacaacctgcagggcggcgacgacctggaccccaactacgtgctgagcagcagagtgagaaccggcagaagcatcagaggcttctgcctgcccccccactgcagcagaggcgagagaagagccatcgagaagctggccgtggaggccctgagcagcctggacggcgacctggccggcagatactacgccctgaagagcatgaccgaggccgagcagcagcagctgatcgacgaccacttcctgttcgacaagcccgtgagccccctgctgctggccagcggcatggccagagactggcccgacgccagaggcatctag

SEQ ID NO: 121383 - protein, 381 aa, Artificial Sequence
  derived and/or modified sequence
MPFGNTHNKFKLNYKPEEEYPDLSKHNNHMAKVLTLELYKKLRDKETPSGFTVDDVIQTGVDNPGHPFIMTVGCVAGDEESYEVFKELFDPIISDRHGGYKPTDKHKTDLNHENLKGGDDLDPNYVLSSRVRTGRSIKGYTLPPHCSRGERRAVEKLSVEALNSLTGEFKGKYYPLKSMTEKEQQQLIDDHFLFDKPVSPLLLASGMARDWPDARGIWHNDNKSFLVWVNEEDHLRVISMEKGGNMKEVFRRFCVGLQKIEEIFKKAGHPFMWNQHLGYVLTCPSNLGTGLRGGVHVKLAHLSKHPKFEEILTRLRLQKRGTGGVDTAAVGSVFDVSNADRLGSSEVEQVQLVVDGVKLMVEMEKKLEKGQSIDDMIPAQK

SEQ ID NO: 121384 - DNA, 1146 bp, Artificial Sequence
  derived and/or modified sequence
atgcccttcggaaatacccataacaaatttaaactgaactacaaaccagaagaggagtaccctgacctgagcaaacacaacaaccacatggctaaggtgctaacacttgagctgtacaaaaagctgagggacaaagagacacccagcgggttcaccgtggacgatgttatccaaaccggtgttgacaatccgggtcacccatttataatgactgtgggctgcgtcgctggagacgaggaatcctatgaggtgtttaaggaactgtttgatcccatcatttcagacagacatgggggctataagccaacagacaaacacaagacagacctcaatcacgagaacctgaagggaggagacgatcttgatcctaactatgttctgagttctagagtgagaaccggccgcagcataaagggttacacactcccacctcattgttcacgaggggaaaggagagctgtggagaagctatcagttgaagcactgaactccttgaccggcgaattcaaagggaaatattacccattaaagtccatgacagagaaagagcagcagcagctcatagatgaccatttcctgtttgacaagcccgtgtcccctctactcttagcttctgggatggcacgcgattggcccgacgcacgcgggatctggcataacgataacaaatcatttctagtgtgggtcaatgaagaagatcatctcagggtaatttctatggagaaggggggcaatatgaaagaggtatttaggaggttctgcgtcggtctgcagaagattgaagagatcttcaagaaagcaggtcatcccttcatgtggaatcagcacctcggatacgtcctgacttgtccaagcaacctggggaccggactccgcggtggggtccatgtgaagctcgctcatctgtcaaaacatcctaagtttgaggaaatccttaccaggctcagattacagaaaagaggcaccggaggagtcgacaccgcggcagtggggagcgtattcgacgtaagcaatgctgaccgactgggatctagcgaggtcgagcaggttcaattggtagtcgatggcgtgaaactgatggtggaaatggaaaaaaaactcgaaaagggacagagtatagatgatatgattcccgcacagaaatag

SEQ ID NO: 121385 - DNA, 1146 bp, Artificial Sequence
  derived and/or modified sequence
atgccctttggaaacacccacaacaagttcaagctgaactacaagccagaggaggagtacccagacctgagcaagcacaacaaccacatggccaaggtgctgaccctggagctgtacaagaagctgcgggacaaggagaccccatctggcttcaccgtggatgatgtgatccagacaggagtggacaaccctggccaccccttcatcatgacagtgggctgtgtggccggagatgaggagagctatgaggtgttcaaggagctgtttgaccccatcatcagtgacagacatggaggctacaagcccacagacaagcacaagacagacctgaaccacgagaacctgaagggaggagatgacctggaccccaactacgtgctgagcagccgggtgaggacaggccgcagcatcaagggctacaccctgcccccccactgcagcagaggagagaggagagctgtggagaagctgtctgtggaggccctgaacagcctgaccggggagttcaagggcaagtactaccccctgaagtccatgacagagaaggagcagcagcagctgattgatgaccacttcctgtttgacaagcctgtgagccccctgctgctggccagcggcatggcccgggactggccagatgcccggggcatctggcacaatgacaacaagagcttcctggtgtgggtgaatgaggaggaccacctgcgggtcatctccatggagaagggcggcaacatgaaggaggtgttccgccgcttctgtgtgggcctgcagaagattgaggagatcttcaagaaggccggccaccccttcatgtggaaccagcacctgggctacgtgctgacctgccccagcaacctgggcaccggcctgcggggcggcgtgcacgtgaagctggcccacctgagcaagcaccccaagtttgaggagatcctgacccggctgcggctgcagaagaggggcaccggcggcgtggacacagctgctgtgggctctgtgtttgatgtgtccaatgctgaccggctgggcagcagcgaggtggagcaggtgcagctggtggtggatggagtgaagctgatggtggagatggagaagaagctggagaagggccagagcattgatgacatgatcccagcccagaagtag

SEQ ID NO: 121386 - DNA, 1146 bp, Artificial Sequence
  derived and/or modified sequence
atgcccttcggcaacacccacaacaagttcaagctgaactacaagccagaagaggaatatcccgatctctctaagcataacaaccacatggccaaggttcttactctggagttgtacaagaagctgcgagataaagagacaccttctgggttcacggtggacgacgtcattcaaactggtgtggataatccgggtcatccgttcataatgacagtcggatgcgtggctggggacgaagagagttatgaggtctttaaagagctatttgatcctatcatctccgatcgccatgggggttacaaacctactgataaacacaagaccgatttgaatcacgaaaacttaaagggtggcgacgacctggacccgaactatgtcttatcctccagagtgcggacaggaaggagtatcaaaggatatacgttgccaccccattgtagccggggcgagcgcagggccgttgaaaaactatcagttgaggcgctgaattctttgacaggagagtttaaaggtaagtattacccccttaaatctatgactgaaaaagagcagcagcagttaatcgacgaccatttcctctttgataagccggtgagccctctcctcctggcttcaggcatggccagggactggccagacgctcgaggaatctggcataacgataacaagagcttcctggtttgggtgaacgaagaagaccatcttcgggtgatcagcatggagaaaggcgggaacatgaaagaagtgtttaggcggttctgcgtcggcctccagaagatcgaggagatttttaagaaggccggtcacccttttatgtggaaccagcacttaggttatgtcctcacctgcccctccaacctgggaacaggcctgcgggggggtgtgcacgtgaagttggcccatctcagtaagcatccgaaattcgaagagatactgaccaggctgcggctgcaaaagcgaggcacgggtggtgtggacacagcagccgtgggctcagtcttcgatgtgtcaaacgctgacagattaggctcctcagaagtggaacaagtccagctggtggtcgacggtgtaaagttgatggtggagatggagaaaaaactcgaaaaaggtcagagtattgacgatatgatccctgctcagaagtag

SEQ ID NO: 121387 - DNA, 1146 bp, Artificial Sequence
  derived and/or modified sequence
atgcccttcggaaacactcacaataagtttaagctcaattacaaaccggaagaagaataccctgatctctccaagcataataatcatatggctaaggtcctgaccctcgaactctacaagaaactccgcgataaagagacaccttccggctttacagttgacgacgtcatacagacaggggtggacaatccagggcacccattcatcatgacggtggggtgtgtcgccggtgacgaagagtcctacgaggtctttaaggagctgtttgacccaattatcagcgaccgccacggaggttacaagcccactgacaaacataagacagacctgaatcatgagaaccttaaaggcggagatgatctggatccaaattatgtattaagctcccgggtcaggacagggaggtccattaaaggctacaccctaccacctcactgcagcaggggggagcgcagggctgttgagaaattatctgttgaggcgctcaatagcttaaccggcgagtttaagggtaagtattatcctctgaaaagtatgaccgagaaagagcaacagcagctgattgacgatcattttttgtttgacaaaccggtgagtcccctcttgttggctagcggcatggccagagattggcccgacgctagaggtatctggcataacgataacaagagctttctagtctgggtgaacgaggaggatcatctccgtgtgatctcaatggagaagggagggaatatgaaggaagtgtttcgcagattctgtgtaggactccaaaagatcgaggagatcttcaagaaggcgggtcatccatttatgtggaatcaacacctgggatacgtcctgacgtgcccctccaatctagggacaggtcttagagggggtgttcacgttaaacttgcccatttatctaaacaccctaaattcgaggaaattctcaccaggctcagactgcaaaaacgaggcacaggaggagtggatactgccgctgttggctcagtttttgacgtctcgaatgctgatagactgggctcctccgaggtggaacaagtgcaattggtcgttgacggtgtgaaattgatggtcgaaatggagaaaaagcttgagaaaggccagtctattgatgacatgatccccgcacaaaaatag

SEQ ID NO: 121388 - DNA, 1146 bp, Artificial Sequence
  derived and/or modified sequence
atgcccttcggcaacacccacaacaagttcaagctgaactacaagcccgaggaggagtaccccgacctgagcaagcacaacaaccacatggccaaggtgctgaccctggagctgtacaagaagctgagagacaaggagacccccagcggcttcaccgtggacgacgtgatccagaccggcgtggacaaccccggccaccccttcatcatgaccgtgggctgcgtggccggcgacgaggagagctacgaggtgttcaaggagctgttcgaccccatcatcagcgacagacacggcggctacaagcccaccgacaagcacaagaccgacctgaaccacgagaacctgaagggcggcgacgacctggaccccaactacgtgctgagcagcagagtgagaaccggcagaagcatcaagggctacaccctgcccccccactgcagcagaggcgagagaagagccgtggagaagctgagcgtggaggccctgaacagcctgaccggcgagttcaagggcaagtactaccccctgaagagcatgaccgagaaggagcagcagcagctgatcgacgaccacttcctgttcgacaagcccgtgagccccctgctgctggccagcggcatggccagagactggcccgacgccagaggcatctggcacaacgacaacaagagcttcctggtgtgggtgaacgaggaggaccacctgagagtgatcagcatggagaagggcggcaacatgaaggaggtgttcagaagattctgcgtgggcctgcagaagatcgaggagatcttcaagaaggccggccaccccttcatgtggaaccagcacctgggctacgtgctgacctgccccagcaacctgggcaccggcctgagaggcggcgtgcacgtgaagctggcccacctgagcaagcaccccaagttcgaggagatcctgaccagactgagactgcagaagagaggcaccggcggcgtggacaccgccgccgtgggcagcgtgttcgacgtgagcaacgccgacagactgggcagcagcgaggtggagcaggtgcagctggtggtggacggcgtgaagctgatggtggagatggagaagaagctggagaagggccagagcatcgacgacatgatccccgcccagaagtag

SEQ ID NO: 121389 - DNA, 1655 bp, Artificial Sequence
  derived and/or modified sequence
tcagctgccctccagaactcctccctggggacaacccctcccagccaatagcacagcctaggtccccctatataaggccacggctgctggcccttcctttgggtcagtgtcacctccaggatacagacagccccccttcagcccagcccagccaggtctcctacaccgccaccatgccattcggtaacacccacaacaagttcaagctgaattacaagcctgaggaggagtaccccgacctcagcaaacataacaaccacatggccaaggtactgacccttgaactctacaagaagctgcgggacaaggagactccatctggcttcactgtagacgatgtcatccagacaggagtggacaacccaggtcaccccttcatcatgaccgtgggctgcgtggctggtgatgaggagtcctacgaagttttcaaggaactctttgaccccatcatctcggatcgccacgggggctacaaacccactgacaagcacaagactgacctcaaccatgaaaacctcaagggtggagacgacctggaccctaactacgtgctcagcagccgcgtccgcactggccgcagcatcaagggctacacgttgcccccacactgctcccgtggcgagcgccgggcggtggagaagctctctgtggaagctctcaacagcctgacgggcgagttcaaagggaagtactaccctctgaagagcatgacggagaaggagcagcagcagctcatcgatgaccacttcctgttcgacaagcccgtgtccccgctgctgctggcctcaggcatggcccgcgactggcccgacgcccgtggcatctggcacaatgacaacaagagcttcctggtgtgggtgaacgaggaggatcacctccgggtcatctccatggagaaggggggcaacatgaaggaggttttccgccgcttctgcgtagggctgcagaagattgaggagatctttaagaaagctggccaccccttcatgtggaaccagcacctgggctacgtgctcacctgcccatccaacctgggcactgggctgcgtggaggcgtgcatgtgaagctggcgcacctgagcaagcaccccaagttcgaggagatcctcacccgcctgcgtctgcagaagaggggtacaggtggcgtggacacagctgccgtgggctcagtatttgacgtgtccaacgctgatcggctgggctcgtccgaagtagaacaggtgcagctggtggtggatggtgtgaagctcatggtggaaatggagaagaagttggagaaaggccagtccattgacgacatgatccccgcccagaagtaggcgcctgcccacctgccaccgactgctggaacccagccagtgggagggcctggcccaccagagtcctgctccctcactcctcgccccgccccctgtcccagagtcccacctgggggctctctccacccttctcagagttccagtttcaaccagagttccaaccaatgggctccatcctctggattctggccaatgaaatatctccctggcagggtcctcttcttttcccagagctccaccccaaccaggagctctagttaatggagagctcccagcacactcggagcttgtgctttgtctccacgcaaagcgataaataaaagcattggtggcctt

SEQ ID NO: 121390 - protein, 79 aa, Artificial Sequence [sequence omitted]

SEQ ID NO: 121391 - protein, 67 aa, Artificial Sequence
  derived and/or modified sequence
MSHKQIYYSDKYDDEEFEYRHVMLPKDIAKLVPKTHLMSESEWRNLGVQQSQGWVHYMIHEPGQCTG

SEQ ID NO: 121392 - protein, 63 aa, Artificial Sequence
  derived and/or modified sequence
MRTRHVMLPKDIAKLVPKTHLMSESEWRNLGVQQSQGWVHYMIHEPEPHILLFRRPLPKKPKK

SEQ ID NO: 121393 - DNA, 240 bp, Artificial Sequence
  derived and/or modified sequence
atgtcccacaaacagatatactactccgacaagtatgacgatgaggaatttgaataccgtcatgtcatgttgcctaaagatattgccaagctagtgccaaagactcacctcatgtccgaatcagagtggcgtaacctcggagtccagcagtcccaaggatgggttcactatatgattcacgagcctgagccccacatcctgcttttcaggagacctctccccaagaagcccaaaaagtag

SEQ ID NO: 121394 - DNA, 204 bp, Artificial Sequence
  derived and/or modified sequence
atgtcacacaagcaaatctattactcagacaagtatgatgatgaggaattcgagtacaggcacgtaatgctccctaaggacattgccaaattagtgccaaaaacacacctaatgtccgagagcgagtggagaaatctgggagtacagcagtcacagggctgggtgcactatatgatccacgagcctggtcagtgtacgggctag

SEQ ID NO: 121395 - DNA, 192 bp, Artificial Sequence
  derived and/or modified sequence
atgaggacgcgccacgtcatgctgcccaaagacatagccaaactcgtgcccaaaacccacctgatgtctgagtctgagtggagaaacctgggtgtccagcagtcgcagggatgggtgcactatatgattcacgaacccgaaccccacattttgttgttccggaggcctcttcctaagaaacctaagaagtag

SEQ ID NO: 121396 - DNA, 240 bp, Artificial Sequence
  derived and/or modified sequence
atgagccacaagcagatctactacagcgacaagtatgatgatgaggagtttgagtacagacatgtgatgctgcccaaggacatcgccaagctggtgcccaagacccacctgatgtctgagagcgagtggaggaacctgggcgtgcagcagagccagggctgggtgcactacatgatccacgagcctgagccccacatcctgctcttccggcggcccctgcccaagaagcccaagaagtag

SEQ ID NO: 121397 - DNA, 204 bp, Artificial Sequence
  derived and/or modified sequence
atgagccacaagcagatctactacagcgacaagtatgatgatgaggagtttgagtacagacatgtgatgctgcccaaggacatcgccaagctggtgcccaagacccacctgatgtctgagagcgagtggaggaacctgggcgtgcagcagagccagggctgggtgcactacatgatccacgagcccggccagtgcaccggctag

SEQ ID NO: 121398 - DNA, 192 bp, Artificial Sequence
  derived and/or modified sequence
atgaggaccaggcatgtgatgctgcccaaggacatcgccaagctggtgcccaagacccacctgatgtctgagagcgagtggaggaacctgggcgtgcagcagagccagggctgggtgcactacatgatccacgagcctgagccccacatcctgctcttccggcggcccctgcccaagaagcccaagaagtag

SEQ ID NO: 121399 - DNA, 240 bp, Artificial Sequence
  derived and/or modified sequence
atgagccacaagcagatctactacagcgacaagtacgacgacgaggaatttgagtaccgacacgtgatgctgcctaaagatattgccaagctggtccctaaaacccacctgatgagtgagtcagaatggcggaacctgggcgtgcaacagtcacaagggtgggtacactacatgattcatgaacccgagccccacattttgctctttaggcggcccttacccaaaaaacccaaaaagtag

SEQ ID NO: 121400 - DNA, 204 bp, Artificial Sequence
  derived and/or modified sequence
atgagccacaagcagatctactacagcgacaagtacgacgacgaggaattcgaatatcgccacgtgatgctgccgaaggatattgctaaactggtgcctaagactcacttgatgagcgaatccgagtggcggaacctaggcgtacagcaatcgcagggctgggtccattatatgatccatgaacccgggcagtgcacagggtag

SEQ ID NO: 121401 - DNA, 192 bp, Artificial Sequence
  derived and/or modified sequence
atgcggacccggcacgtgatgctgcccaaggacatcgccaagctggtgccaaagacccatctgatgtccgagagcgagtggcgcaacctcggagtgcagcagtcccagggttgggtgcactacatgattcacgaacccgagcctcacatcttactgttccggcggcctctgcctaagaaacctaagaagtag

SEQ ID NO: 121402 - DNA, 240 bp, Artificial Sequence
  derived and/or modified sequence
atgagccataaacagatttattactccgacaaatacgacgacgaggaatttgaatacaggcacgtgatgctccccaaggatatcgctaaacttgtgccgaagactcatttgatgtcagagtcagaatggcggaacttgggcgtgcagcagtcccagggatgggttcattatatgatccacgaacctgagccacacatcctgctttttcggagaccgctgcctaaaaaacctaagaagtag

SEQ ID NO: 121403 - DNA, 204 bp, Artificial Sequence
  derived and/or modified sequence
atgtctcacaagcagatatactacagcgataagtacgatgacgaggaatttgagtaccgtcatgtcatgttgcccaaagacattgcaaaactggtgccaaaaactcacctgatgtcggagagcgaatggaggaacttaggtgttcagcagagccagggctgggtgcactacatgatccacgaaccgggtcagtgcaccggctag

SEQ ID NO: 121404 - DNA, 192 bp, Artificial Sequence
  derived and/or modified sequence
atgcgcacacggcatgtaatgcttccaaaagatattgcaaaacttgtgcctaaaacccatctgatgtcagaatccgaatggagaaatctcggggtgcagcagtcacaaggatgggtgcactatatgatacacgaaccggagccgcacattctgcttttccgcagacctctcccaaaaaaacccaaaaaatag

SEQ ID NO: 121405 - DNA, 759 bp, Artificial Sequence
  derived and/or modified sequence
cttggaggttggcggcgcggggctgaaggctagcaaaccgagcgatcatgtcgcacaaacaaatttactattcggacaaatacgacgacgaggagtttgagtatcgacatgtcatgctgcccaaggacatagccaagctggtccctaaaacccatctgatgtctgaatctgaatggaggaatcttggcgttcagcagagtcagggatgggtccattatatgatccatgaaccagaacctcacatcttgctgttccggcgcccactacccaagaaaccaaagaaatgaagctggcaagctacttttcagcctcaagctttacacagctgtccttacttcctaacatctttctgataacattattatgttgccttcttgtttctcactttgatatttaaaagatgttcaatacactgtttgaatgtgctggtaactgctttgcttcttgagtagagccaccaccaccatagcccagccagatgagtgctctgtggacccacagcctaagctgagtgtgaccccagaagccacgatgtgctctgtatccagaacacacttggcagatggaggaagcatctgagtttgagaccatggctgttacagggatcatgtaaacttgctgtttttgttttttcctgccgggtgttgtatgtgtggtgacttgcggatttatgtttcagtgtactggaaactttccattttattcaagaaatctgttcatgttaaaagccttgattaaagaggaagtttttataatcta

SEQ ID NO: 121406 - DNA, 820 bp, Artificial Sequence
  derived and/or modified sequence
gtgctgttgggagttgcttggaggttggcggcgcggggctgaaggctagcaaaccgagcgatcatgtcgcacaaacaaatttactattcggacaaatacgacgacgaggagtttgagtatcgacatgtcatgctgcccaaggacatagccaagctggtccctaaaacccatctgatgtctgaatctgaatggaggaatcttggcgttcagcagagtcagggatgggtccattatatgatccatgaaccaggtcagtgcactggctaaaaacaaccatatagaactgctacactgagagaatgaaagaataagattgtataacccaaatagggagataggaaatggtttactggttccttccccctccagtcgtgggggatttttttaaaaaaaaactagtgaccaaaaataagactaaaatatctgggaagttcagagacaacctgtcactgaaaaacctcctgtaatctttcattcaatcagagggtattctttttaaggccacatatagcctgatcatagcccctgcctcattctccatcgaaaacattcttggatgtgttctaaataagcaaaggaaagtatatttattgataagacaccagacacccagctgccaggcaaaactaataagggacaccctggggctgtataaacatagcaaaagaactgatattaacaattctgtacttggcagacagtccagacttctgggtctgcttctaaggccatatgcttaagtctttatttagttataaagatctgagtgggtgatagctggggaggtggtagtggaatacactataggttgtacatagaa

SEQ ID NO: 121407 - DNA, 912 bp, Artificial Sequence
  derived and/or modified sequence
tgaaagcgaggccaaagtgggtgggagcgcgtgctgttgggagttgcttggaggttggcggcgcggggctgaaggctagcaaaccgagcgatcatgtcgcacaaacaaatttactattcggacaaatacgacgacgaggagtttgagtatcggttagtgctggcgcgggagcaatagcgagggtcgtgagctttggccgctgagggcacaaggaattagtaacaggaactgaggcgatagaattggcgcatgcgtacgagacatgtcatgctgcccaaggacatagccaagctggtccctaaaacccatctgatgtctgaatctgaatggaggaatcttggcgttcagcagagtcagggatgggtccattatatgatccatgaaccagaacctcacatcttgctgttccggcgcccactacccaagaaaccaaagaaatgaagctggcaagctacttttcagcctcaagctttacacagctgtccttacttcctaacatctttctgataacattattatgttgccttcttgtttctcactttgatatttaaaagatgttcaatacactgtttgaatgtgctggtaactgctttgcttcttgagtagagccaccaccaccatagcccagccagatgagtgctctgtggacccacagcctaagctgagtgtgaccccagaagccacgatgtgctctgtatccagaacacacttggcagatggaggaagcatctgagtttgagaccatggctgttacagggatcatgtaaacttgctgtttttgttttttcctgccgggtgttgtatgtgtggtgacttgcggatttatgtttcagtgtactggaaactttccattttattcaagaaatctgttcatgttaaaagccttgattaaagaggaagtttttataatct

SEQ ID NO: 121408 - DNA, 240 bp, Artificial Sequence
  derived and/or modified sequence
atgagccacaagcagatctactacagcgacaagtacgacgacgaggagttcgagtacagacacgtgatgctgcccaaggacatcgccaagctggtgcccaagacccacctgatgagcgagagcgagtggagaaacctgggcgtgcagcagagccagggctgggtgcactacatgatccacgagcccgagccccacatcctgctgttcagaagacccctgcccaagaagcccaagaagtag

SEQ ID NO: 121409 - DNA, 204 bp, Artificial Sequence
  derived and/or modified sequence
atgagccacaagcagatctactacagcgacaagtacgacgacgaggagttcgagtacagacacgtgatgctgcccaaggacatcgccaagctggtgcccaagacccacctgatgagcgagagcgagtggagaaacctgggcgtgcagcagagccagggctgggtgcactacatgatccacgagcccggccagtgcaccggctag

SEQ ID NO: 121410 - DNA, 192 bp, Artificial Sequence
  derived and/or modified sequence
atgagaaccagacacgtgatgctgcccaaggacatcgccaagctggtgcccaagacccacctgatgagcgagagcgagtggagaaacctgggcgtgcagcagagccagggctgggtgcactacatgatccacgagcccgagccccacatcctgctgttcagaagacccctgcccaagaagcccaagaagtag

SEQ ID NO: 121411 - protein, 79 aa, Artificial Sequence
  derived and/or modified sequence
MAHKQIYYSDKYFDEHYEYRHVMLPRELSKQVPKTHLMSEEEWRRLGVQQSLGWVHYMIHEPEPHILLFRRPLPKDQQK

SEQ ID NO: 121412 - DNA, 240 bp, Artificial Sequence
  derived and/or modified sequence
atggcacacaagcagatctactactcagataagtacttcgatgagcattacgagtatcgacatgtaatgcttccgcgggagctatccaagcaggtccccaaaacccaccttatgtccgaagaagagtggcggcgtctgggggtgcagcagtcactcggttgggtgcattacatgatacacgaacctgagccccacatcctgctcttccggcgtccgctccctaaggaccagcaaaagtag

SEQ ID NO: 121413 - DNA, 240 bp, Artificial Sequence
  derived and/or modified sequence
atggcccacaagcagatctactacagcgacaagtactttgatgagcactatgagtacagacatgtgatgctgccccgggagctgagcaagcaggtgcccaagacccacctgatgtctgaggaggagtggaggcggctgggcgtgcagcagagcctgggctgggtgcactacatgatccacgagcctgagccccacatcctgctcttccggcggcccctgcccaaggaccagcagaagtag

SEQ ID NO: 121414 - DNA, 240 bp, Artificial Sequence
  derived and/or modified sequence
atggcccacaagcagatctactacagcgacaagtacttcgacgagcattacgagtaccgccacgttatgctccccagagagctgagcaagcaggtgcctaaaacacacctgatgtcagaggaagaatggcgaagacttggcgtgcagcagtcattgggttgggtacattacatgatacacgaaccagagcctcatattcttttgtttagacggccccttcccaaggatcagcaaaagtag

SEQ ID NO: 121415 - DNA, 240 bp, Artificial Sequence
  derived and/or modified sequence
atggctcacaaacagatctattatagtgacaaatatttcgacgaacactacgagtacaggcacgttatgttgcctagagaattgtcaaagcaggtgcctaagactcatttaatgtctgaggaagagtggcggaggctcggagtgcagcagagtctcggttgggtgcattacatgattcacgaacccgagccccatatcttactgttccgtcggccactgcctaaagatcagcagaagtag

SEQ ID NO: 121416 - DNA, 613 bp, Artificial Sequence
  derived and/or modified sequence
agtctccggcgagttgttgcctgggctggacgtggttttgtctgctgcgcccgctcttcgcgctctcgtttcattttctgcagcgcgccagcaggatggcccacaagcagatctactactcggacaagtacttcgacgaacactacgagtaccggcatgttatgttacccagagaactttccaaacaagtacctaaaactcatctgatgtctgaagaggagtggaggagacttggtgtccaacagagtctaggctgggttcattacatgattcatgagccagaaccacatattcttctctttagacgacctcttccaaaagatcaacaaaaatgaagtttatctggggatcgtcaaatctttttcaaatttaatgtatatgtgtatataaggtagtattcagtgaatacttgagaaatgtacaaatctttcatccatacctgtgcatgagctgtattcttcacagcaacagagctcagttaaatgcaactgcaagtaggttactgtaagatgtttaagataaaagttcttccagtcagtttttctcttaagtgcctgtttgagtttactgaaacagtttacttttgttcaataaagtttgtatgttgcattta

SEQ ID NO: 121417 - DNA, 240 bp, Artificial Sequence
  derived and/or modified sequence
atggcccacaagcagatctactacagcgacaagtacttcgacgagcactacgagtacagacacgtgatgctgcccagagagctgagcaagcaggtgcccaagacccacctgatgagcgaggaggagtggagaagactgggcgtgcagcagagcctgggctgggtgcactacatgatccacgagcccgagccccacatcctgctgttcagaagacccctgcccaaggaccagcagaagtag

SEQ ID NO: 121418 - protein, 142 aa, Artificial Sequence
  derived and/or modified sequence
MSLLPVPYTEAASLSTGSTVTIKGRPLACFLNEPYLQVDFHTEMKEESDIVFHFQVCFGRRVVMNSREYGAWKQQVESKNMPFQDGQEFELSISVLPDKYQVMVNGQSSYTFDHRIKPEAVKMVQVWRDISLTKFNVSYLKR

SEQ ID NO: 121419 - DNA, 429 bp, Artificial Sequence
  derived and/or modified sequence
atgagccttttacccgtcccctacacagaagccgcttcattgtctacaggctccacagtcactatcaagggccggcccctggcctgtttcttaaacgaaccatacctgcaggtcgacttccacaccgaaatgaaggaggaaagcgacatcgtttttcactttcaggtttgtttcgggaggagagtagtgatgaatagccgggagtacggcgcttggaaacagcaagtggaatccaaaaacatgccctttcaggacggacaggagtttgagctgagcatttccgtcctgcctgataagtatcaggttatggtgaatggccagtccagctacacattcgaccatcggatcaaaccagaagccgtgaagatggtccaggtctggagagatatcagtctgaccaaattcaatgttagctatctgaaacggtag

SEQ ID NO: 121420 - DNA, 429 bp, Artificial Sequence
  derived and/or modified sequence
atgagcctgctgcctgtgccctacacagaagctgccagcctgagcacaggcagcacagtgaccatcaagggccggcccctggcctgcttcctgaatgagccctacctgcaggtggacttccacacagagatgaaggaggagagtgacatcgtgttccacttccaggtgtgcttcggccggcgggtggtgatgaacagccgggagtatggagcctggaagcagcaggtggagagcaagaacatgcccttccaggacggccaggagtttgagctgagcatctctgtgctgcctgacaagtaccaggtgatggtgaatggccagagcagctacacctttgaccaccgcatcaagccagaggccgtgaagatggtgcaggtgtggagggacatcagcctgaccaagttcaacgtgtcctacctgaagaggtag

SEQ ID NO: 121421 - DNA, 429 bp, Artificial Sequence
  derived and/or modified sequence
atgagcctgctgcccgtgccctacaccgaggccgccagcctgagcaccggcagtacggtcaccataaaaggacgccctctggcttgtttccttaacgagccttatctgcaagtagacttccacacggagatgaaagaagagtctgacatagtgtttcatttccaggtgtgttttgggcgtcgcgttgtgatgaactctcgcgagtacggagcctggaaacagcaggttgagagcaagaatatgccattccaggacgggcaggagttcgagctttccatatccgttcttcccgacaagtatcaggtcatggtaaatggacagtcatcctatacctttgatcatcgaattaaacccgaggccgtgaaaatggtgcaggtgtggcgggacatcagtctgactaaattcaatgtgtcctatctgaagcgatag

SEQ ID NO: 121422 - DNA, 429 bp, Artificial Sequence
  derived and/or modified sequence
atgagcctgttgccggtcccatataccgaagccgcttccctgtccaccggatctacggtcacaataaagggcagacccctagcatgttttctgaacgagccatacctacaggtggatttccacacagagatgaaggaggaatcagatattgtgttccacttccaggtttgttttggcaggagagtggtgatgaactcaagggagtatggcgcttggaagcagcaggtagagagcaagaacatgcctttccaagatggccaagagttcgagctatccattagtgttctgccagacaaatatcaggtcatggtaaacggccagagtagctacacatttgaccataggatcaagcctgaggcagtaaaaatggtccaagtgtggcgcgatatctcactgaccaagttcaatgtgtcctatctcaagcggtag

SEQ ID NO: 121423 - DNA, 629 bp, Artificial Sequence
  derived and/or modified sequence
atttaaattctgcagctcagagattcacacagaagtctggacacaattcagaagagccacccagaaggagacaacaatgtccctgctacccgtgccatacacagaggctgcctctttgtctactggttctactgtgacaatcaaagggcgaccacttgcctgtttcttgaatgaaccatatctgcaggtggatttccacactgagatgaaggaggaatcagacattgtcttccatttccaagtgtgctttggtcgtcgtgtggtcatgaacagccgtgagtatggggcctggaagcagcaggtggaatccaagaatatgccctttcaggatggccaagaatttgaactgagcatctcagtgctgccagataagtaccaggtaatggtcaatggccaatcctcttacacctttgaccatagaatcaagcctgaggctgtgaagatggtgcaagtgtggagagatatctccctgaccaaatttaatgtcagctatttaaagagataaccagacttcatgttgccaaggaatccctgtctctacgtgaacttgggattccaaagccagctaacagcatgatcttttctcacttcaatccttactcctgctcattaaaacttaatcaaacttc

SEQ ID NO: 121424 - DNA, 429 bp, Artificial Sequence
  derived and/or modified sequence
atgagcctgctgcccgtgccctacaccgaggccgccagcctgagcaccggcagcaccgtgaccatcaagggcagacccctggcctgcttcctgaacgagccctacctgcaggtggacttccacaccgagatgaaggaggagagcgacatcgtgttccacttccaggtgtgcttcggcagaagagtggtgatgaacagcagagagtacggcgcctggaagcagcaggtggagagcaagaacatgcccttccaggacggccaggagttcgagctgagcatcagcgtgctgcccgacaagtaccaggtgatggtgaacggccagagcagctacaccttcgaccacagaatcaagcccgaggccgtgaagatggtgcaggtgtggagagacatcagcctgaccaagttcaacgtgagctacctgaagagatag

SEQ ID NO: 121425 - protein, 801 aa, Artificial Sequence
  derived and/or modified sequence
MVTLQLGESHYVVQAGLQLLGSSNPPALASQVAEITGTHYTMTNGGSINSSTHLLDLLDEPIPGVGTYDDFHTIDWVREKCKDRERHRRINSKKKESAWEMTKSLYDAWSGWLVVTLTGLASGALAGLIDIAADWMTDLKEGICLSALWYNHEQCCWGSNETTFEERDKCPQWKTWAELIIGQAEGPGSYIMNYIMYIFWALSFAFLAVSLVKVFAPYACGSGIPEIKTILSGFIIRGYLGKWTLMIKTITLVLAVASGLSLGKEGPLVHVACCCGNIFSYLFPKYSTNEAKKREVLSAASAAGVSVAFGAPIGGVLFSLEEVSYYFPLKTLWRSFFAALVAAFVLRSINPFGNSRLVLFYVEYHTPWYLFELFPFILLGVFGGLWGAFFIRANIAWCRRRKSTKFGKYPVLEVIIVAAITAVIAFPNPYTRLNTSELIKELFTDCGPLESSSLCDYRNDMNASKIVDDIPDRPAGIGVYSAIWQLCLALIFKIIMTVFTFGIKVPSGLFIPSMAIGAIAGRIVGIAVEQLAYYHHDWFIFKEWCEVGADCITPGLYAMVGAAACLGGVTRMTVSLVVIVFELTGGLEYIVPLMAAVMTSKWVGDAFGREGIYEAHIRLNGYPFLDAKEEFTHTTLAADVMRPRRNDPPLAVLTQDNMTVDDIENMINETSYNGFPVIMSKESQRLVGFALRRDLTIAIESARKKQEGIVGSSRVCFAQHTPSLPAESPRPLKLRSILDMSPFTVTDHTPMEIVVDIFRKLGLRQCLVTHNGRLLGIITKKDILRHMAQTANQDPASIMFN

SEQ ID NO: 121426 - protein, 173 aa, Artificial Sequence
  derived and/or modified sequence
MESEQLFHRGYYRNSYNSITSASSDEELLDGAGVIMDFQTSEDDNLLDGDTAVGTHYTMTNGGSINSSTHLLDLLDEPIPGVGTYDDFHTIDWVREKCKDRERHRRINSKKKESAWEMTKSLYDAWSGWLVVTLTGLASGALAGLIDIAADWMTDLKEGICLSALWYNHEQCC

SEQ ID NO: 121427 - protein, 139 aa, Artificial Sequence
  derived and/or modified sequence
MESEQLFHRGYYRNSYNSITSASSDEELLDGAGVIMDFQTSEDDNLLDGDTAVGTHYTMTNGGSINSSTHLLDLLDEPIPGVGTYDDFHTIDWVREKCKDRERHRRINSKKKESAWEMTKSLYDAWSGWLVVTLTGLAS

SEQ ID NO: 121428 - protein, 818 aa, Artificial Sequence
  derived and/or modified sequence
MESEQLFHRGYYRNSYNSITSASSDEELLDGAGVIMDFQTSEDDNLLDGDTAVGTHYTMTNGGSINSSTHLLDLLDEPIPGVGTYDDFHTIDWVREKCKDRERHRRINSKKKESAWEMTKSLYDAWSGWLVVTLTGLASGALAGLIDIAADWMTDLKEGICLSALWYNHEQCCWGSNETTFEERDKCPQWKTWAELIIGQAEGPGSYIMNYIMYIFWALSFAFLAVSLVKVFAPYACGSGIPEIKTILSGFIIRGYLGKWTLMIKTITLVLAVASGLSLGKEGPLVHVACCCGNIFSYLFPKYSTNEAKKREVLSAASAAGVSVAFGAPIGGVLFSLEEVSYYFPLKTLWRSFFAALVAAFVLRSINPFGNSRLVLFYVEYHTPWYLFELFPFILLGVFGGLWGAFFIRANIAWCRRRKSTKFGKYPVLEVIIVAAITAVIAFPNPYTRLNTSELIKELFTDCGPLESSSLCDYRNDMNASKIVDDIPDRPAGIGVYSAIWQLCLALIFKIIMTVFTFGIKVPSGLFIPSMAIGAIAGRIVGIAVEQLAYYHHDWFIFKEWCEVGADCITPGLYAMVGAAACLGGVTRMTVSLVVIVFELTGGLEYIVPLMAAVMTSKWVGDAFGREGIYEAHIRLNGYPFLDAKEEFTHTTLAADVMRPRRNDPPLAVLTQDNMTVDDIENMINETSYNGFPVIMSKESQRLVGFALRRDLTIAIESARKKQEGIVGSSRVCFAQHTPSLPAESPRPLKLRSILDMSPFTVTDHTPMEIVVDIFRKLGLRQCLVTHNGRLLGIITKKDILRHMAQTANQDPASIMFN

SEQ ID NO: 121429 - protein, 191 aa, Artificial Sequence
  derived and/or modified sequence
MESEQLFHRGYYRNSYNSITSASSDEELLDGAGVIMDFQTSEDDNLLDGDTAVGTHYTMTNGGSINSSTHLLDLLDEPIPGVGTYDDFHTIDWVREKCKDRERHRRINSKKKESAWEMTKSLYDAWSGWLVVTLTGLASGALAGLIDIAADWMTDLKEGICLSALWYNHEQCCWGSNETTFEKKKKKKKKA

SEQ ID NO: 121430 - DNA, 2457 bp, Artificial Sequence
  derived and/or modified sequence
atggagtcggaacagttgttccaccgcggctactatcggaattcatataacagtattaccagtgcctctagtgatgaagagctgctggatggagccggcgtgatcatggatttccagacaagcgaggatgataacctacttgacggcgatacagctgtgggtacccattacactatgacgaacggcgggtccatcaactcttccacccacctccttgatctgctggatgagccgatccccggcgtgggtacatatgatgactttcacacaattgactgggtcagggagaaatgcaaagatagggagaggcacaggcggatcaatagcaagaagaaagagagtgcctgggagatgaccaagagcctgtatgacgcctggagcggatggctcgtggttactctaaccggcctggcctcgggcgcattggccgggctgatcgatattgccgccgattggatgaccgacctgaaggagggtatctgtttatccgcgctgtggtacaaccatgaacagtgctgctgggggagcaacgaaaccaccttcgaggagagagataagtgtccacagtggaagacctgggcagagctcatcatcggccaagcggaaggacctggttcgtacatcatgaattacattatgtatatattctgggctctttctttcgcttttcttgcggtgagcctcgttaaagtatttgccccatatgcgtgcggctcgggaattcccgagatcaagaccattctttcaggctttattatcagggggtacctcgggaagtggaccctcatgatcaagacaattaccctggtactcgccgtcgctagcgggctgtctcttggcaaggagggacctctggttcatgtggcatgctgttgtggaaacatcttttcctatctatttccaaaatacagcaccaatgaagccaagaagcgggaagtcttgagcgcggcttcagctgccggggtgtcagtagcctttggcgcgcccattggaggagtactttttagcctggaagaggtcagttactatttccctctgaaaactctctggcggtctttctttgcggccctggtagcggccttcgtgcttcgctccataaatcctttcgggaacagcagacttgtgcttttctacgtggagtaccacactccctggtatttgtttgagttatttccttttatcctgttgggagtgttcggtggactatggggggcattctttattcgggctaatattgcttggtgtaggcgacggaaatcaaccaaattcggtaagtatcccgtactcgaagtaattatcgttgcagcgataacagcagtgatcgccttccctaacccttatacccgtttaaataccagcgaactcatcaaagagctatttacggactgcgggcccctcgaatcctctagcttgtgcgactatcgaaacgatatgaacgcgagcaagatagttgacgacattcctgaccgccccgctgggattggcgtttattccgcgatctggcagctgtgcttagctctgatcttcaaaatcatcatgacggtcttcactttcggcataaaggttccctcaggtctcttcattcctagcatggcaatcggggctattgccggaagaatagtgggcattgcagtggaacagctggcttactatcaccacgattggtttatctttaaggagtggtgtgaagttggcgcagattgtattacccctggactgtatgccatggtgggcgccgccgcatgtctcggaggagtgacgagaatgaccgtatccctggtcgtgatagtttttgagctgaccggcgggctggagtatatcgtgccccttatggctgctgtgatgactagcaaatgggttggggatgcttttggaagagagggcatctatgaagctcacatacggctgaatggctacccatttctggacgccaaggaagagtttacccacaccaccctggccgcggatgtgatgaggccaaggaggaacgacccccctctggccgtcttgactcaggataatatgacagttgacgatatcgaaaacatgattaacgaaaccagttacaacggatttccagttatcatgtctaaggaatctcagagattagtcgggtttgccctgagacgcgacttgacgattgctattgaatccgcaagaaagaaacaggagggaatagtgggatctagccgcgtgtgcttcgcacagcataccccgagcttgcctgccgaatcaccccgccccctgaagctgagatctattctcgacatgtcgccattcaccgttaccgaccacacccctatggaaattgttgtcgatatctttcggaagctggggctgagacagtgtttggtcactcacaacggacggttgttagggatcatcaccaagaaggatatactgaggcatatggcccagactgccaaccaggaccctgcttccattatgtttaactag

SEQ ID NO: 121431 - DNA, 2457 bp, Artificial Sequence
  derived and/or modified sequence
atggagagcgagcagctgttccaccggggctactacagaaattcctacaacagcatcaccagcgccagcagtgatgaggagctgctggatggagctggggtcatcatggacttccagaccagtgaagatgacaacctgctggatggagacacagctgtgggcacccactacaccatgaccaatggaggcagcatcaacagcagcacccacctgctggacctgctggatgagcccatccctggggtgggcacctatgatgacttccacaccatcgactgggtgcgggagaagtgcaaggaccgggagcggcaccggcgcatcaacagcaagaagaaggagagcgcctgggagatgaccaagagcctgtatgatgcctggagcggctggctggtggtgaccctgaccggcctggccagcggggccctggccggcctgattgatattgctgctgactggatgacagacctgaaggagggcatctgcctgagcgccctgtggtacaaccacgagcagtgctgctggggcagcaatgagaccacctttgaggagcgggacaagtgcccccagtggaagacctgggccgagctgatcatcggccaggccgagggccctggcagctacatcatgaactacatcatgtacatcttctgggccctgagctttgccttcctggccgtgtccctggtgaaggtgtttgccccctatgcctgtggcagcggcatccctgagatcaagaccatcctgagcggcttcatcatccggggctacctgggcaagtggaccctgatgatcaagaccatcaccctggtgctggccgtggccagcggcctgagcctgggcaaggagggccccctggtgcacgtggcctgctgctgcggcaacatcttctcctacctgttccccaagtacagcaccaatgaggccaagaagcgggaggtgctgtctgctgccagcgctgctggggtgtctgtggccttcggggcccccatcggcggcgtgctcttcagcctggaggaggtgtcctactacttccccctgaagaccctgtggaggagcttctttgctgccctggtggccgcctttgtgctgcggagcatcaacccctttggaaacagccggctggtgctcttctacgtggagtaccacaccccctggtacctgtttgagctgttccccttcatcctgctgggcgtgtttggaggcctgtggggcgccttcttcatccgggccaacatcgcctggtgcagaagaaggaagagcaccaagtttgggaagtaccctgtgctggaggtgatcatcgtggccgccatcacagctgtgattgccttccccaacccctacacccggctgaacaccagcgagctgatcaaggagctgttcacagactgtggccccctggagagcagcagcctgtgtgactacagaaatgacatgaatgccagcaagatcgtggatgacatcccagacaggcctgctggcatcggcgtgtacagcgccatctggcagctgtgcctggccctgatcttcaagatcatcatgaccgtcttcaccttcggcatcaaggtgcccagcggcctcttcatccccagcatggccatcggggccatcgccggccgcatcgtgggcattgctgtggagcagctggcctactaccaccacgactggttcatcttcaaggagtggtgtgaggtgggcgctgactgcatcaccccaggcctgtatgccatggtgggcgccgccgcctgcctgggcggcgtgaccaggatgacagtgtccctggtggtgattgtgtttgagctgactggaggcctggagtacatcgtgcccctgatggctgctgtgatgaccagcaagtgggtgggagatgccttcggccgggagggcatctatgaggcccacatccggctgaatggctaccccttcctggatgccaaggaggagttcacccacaccaccctggccgcagatgtgatgaggcccaggagaaatgacccccccctggccgtgctgacccaggacaacatgacagtggatgacatcgagaacatgatcaatgagaccagctacaacggcttccctgtgatcatgagcaaggagagccagaggctggtgggctttgccctgcggcgggacctgaccatcgccatcgagagcgccaggaagaagcaggagggcatcgtgggcagcagccgggtgtgctttgcccagcacacccccagcctgcctgctgagagcccccggcccctgaagctgcggagcatcctggacatgagccccttcaccgtgacagaccacacccccatggagatcgtggtggacatcttcaggaagctgggcctgcggcagtgcctggtgacccacaacggccgcctgctgggcatcatcaccaagaaggacatcctgcggcacatggcccagacagccaaccaggaccctgccagcatcatgttcaactag

SEQ ID NO: 121432 - DNA, 2457 bp, Artificial Sequence
  derived and/or modified sequence
atggagagcgagcagctgttccaccggggctactaccggaacagctataactcaataacatctgccagctccgatgaggagctcctcgacggggcaggagtgataatggattttcagacctccgaagacgataatctgctcgacggagacacggctgtgggaacacattatactatgaccaatgggggaagtattaacagttcaacacacttactcgatctgctcgacgaacccattccaggtgttggcacctatgacgacttccacaccattgactgggtgcgcgagaaatgtaaagatagggaaaggcacagaaggatcaactctaagaagaaagagtcggcatgggagatgacgaagtcactgtatgatgcctggtctggatggttagtggttacccttaccggtctggcatcaggagctttggcggggctgattgacatcgccgcagactggatgacggatctgaaagagggcatctgcttgtccgcattgtggtataaccacgagcagtgctgctggggatccaacgaaaccaccttcgaagaaagggacaagtgcccgcagtggaagacgtgggcagagttgatcattggccaggccgaaggaccgggctcttacatcatgaactacattatgtatattttctgggcactgtcctttgctttcctggctgtgtcattagtcaaggtattcgcaccgtacgcctgtggctccgggatcccagagatcaaaaccatcttaagcggattcatcatacgtggctacctcggaaagtggacgcttatgatcaagacaataacgctagttttagctgtggccagtggactaagtctgggaaaggaaggacctctcgtccacgtggcgtgctgctgcggaaatatattctcctacctctttccaaaatactcaaccaacgaagccaaaaagagggaggtactgtctgcggccagtgctgccggagtgtctgtggcgtttggcgcaccaatcggtggggtactgtttagtttggaggaggtttcctactattttcccttaaaaactctgtggcggtccttttttgcagctctggtggcagctttcgttctgagaagcatcaaccctttcggaaatagccgcctggtgctgttctacgtggagtatcataccccatggtacctgttcgaactctttccattcatccttcttggggtgttcggcggcctatggggagctttcttcatcagagcaaacatcgcttggtgccgacggcgaaagtccactaaattcggaaaataccctgtacttgaggtcattatcgtggctgccattactgccgtgatcgcgtttccaaacccctacacaaggttaaacaccagcgagctcattaaggaactgtttaccgactgcggtcccctggaatctagtagtctctgtgattaccgcaacgatatgaacgcttccaaaattgtcgacgatatccccgacagaccggccggcataggtgtatattcagcgatctggcaactctgtctcgccctgatcttcaaaatcatcatgactgtgtttacatttggcatcaaagtacctagcggcttgttcatcccttctatggcaatcggcgccatcgcaggccgcatcgtggggatcgccgttgagcagctggcctactaccatcacgactggtttatatttaaggaatggtgcgaagtgggtgcagattgtatcacccctggattgtatgctatggtcggagctgcagcctgcctgggcggtgtgactagaatgaccgtgtcgttagtggtgatagtatttgagctgactggaggattagaatacatcgttccattgatggcagctgttatgacctctaagtgggtaggtgatgcctttggacgggaagggatttacgaagcccacattcgacttaacggatatccctttcttgacgcaaaggaagagtttacacacacaactctggctgccgatgtgatgagacctcggcgaaatgatccaccactggccgttctgacccaggataacatgaccgttgatgatattgagaacatgattaatgagacatcctacaacggattccctgttattatgtctaaagagtctcaacgtctggtggggttcgccctgaggagagatctgactattgcaatcgaatctgccaggaagaaacaggaaggaattgtcggcagttcacgggtgtgcttcgcgcagcacactccaagcttgcccgccgaatcccccaggcctctgaaacttaggtctatattggacatgtctccattcaccgtcaccgatcacacacccatggagattgtggtggacatcttcagaaaactgggtctccggcaatgtctggtcacccataacggacgtttgctgggcatcatcacaaaaaaagacatactgagacatatggcacagacagccaaccaggaccctgccagtatcatgtttaattag

SEQ ID NO: 121433 - DNA, 2457 bp, Artificial Sequence
  derived and/or modified sequence
atggagtctgagcagttattccaccgaggttactaccgaaattcatacaacagcatcaccagcgcctccagtgatgaagaactgcttgacggggcaggtgttatcatggactttcagacatctgaagatgataacctgctagatggcgataccgctgtcgggacccattataccatgacaaacggcggatccatcaactcaagcacacacctgctggatcttctcgatgaaccaatcccgggagtcggtacttacgacgacttccataccatagactgggtccgggagaaatgtaaagatcgcgaaagacatcggcgtatcaatagcaagaaaaaggaatccgcctgggaaatgacaaagtcgctgtatgatgcgtggtctggctggctagttgtgacactcactggtctggccagtggtgctctggcgggtctgattgatatcgccgcagattggatgacagatctcaaggaaggaatatgcctttcagcactctggtataaccacgagcagtgctgctggggcagcaacgagactacctttgaggagcgagacaaatgcccgcagtggaaaacctgggctgagcttattatcgggcaggccgagggccctggatcttacatcatgaattacatcatgtacattttctgggctctatcattcgccttcctggctgtgtcactggtgaaagtatttgcgccttacgcctgcggctccggcattcccgagatcaaaaccatattaagcggattcataataaggggctatctcggaaagtggactttgatgattaaaacgattaccttggtcctggcagtggcatcaggcctcagcctggggaaagaggggcctctcgtgcacgtggcctgctgttgcgggaacatcttcagttatctgttcccaaaatacagtacaaacgaggctaagaagcgggaggtgctttcggctgcctccgcagcaggagtgtcagtggctttcggggcacctataggcggagtgttatttagcctggaggaagtgagctattattttccactgaagactctctggagatctttttttgcagcactggtcgccgcattcgtcctgcgaagcatcaacccttttggaaattctcgactcgtgttattttacgtcgaatatcatactccgtggtacctctttgagctttttccttttattcttttgggggtttttggcggactgtggggggctttcttcatccgggcaaacattgcctggtgccgaaggcgcaaaagtacaaaatttggcaagtatcccgttctggaggtgataatcgtcgccgcaatcacagctgtcatcgcctttccaaacccctataccaggctcaacaccagtgagctgattaaagagctgtttacagactgtgggccactcgagtcctcatccctgtgcgattacaggaacgacatgaatgcaagtaagatagtggatgacatacccgacagaccagctggcatcggcgtgtatagcgcaatatggcagctgtgcctggccctgatttttaagatcattatgaccgtgtttacctttggaattaaagtgccttctggtttattcatacctagcatggccattggcgctatcgccggaagaattgtcggaattgccgtcgaacagctggcctattatcaccatgattggtttatcttcaaagagtggtgcgaggtgggggctgattgcataacccccggactgtacgcaatggtaggagccgctgcctgtttggggggagtcaccagaatgacagtttctctggtggtgatcgtattcgagttgaccggagggttggaatatatcgtccccctgatggcagccgttatgaccagcaagtgggtgggtgatgcattcgggagagagggcatctacgaggcccacatcagattaaacggttaccccttcctcgatgccaaggaagaattcacacacaccactctggcagcagacgttatgagacctcgcagaaacgaccctcccttggctgtgctcacccaggataacatgaccgtggatgacattgagaatatgatcaatgagacatcatacaatggtttccccgtcataatgtccaaggagagtcagagactcgttggcttcgcgctgaggcgggaccttacgattgcgattgagtcagccagaaaaaagcaggaaggaatcgtggggtcctctcgagtctgcttcgcacaacataccccctctttacctgctgaaagtccaagaccactcaaactgcggtccattttagacatgtcacctttcactgttaccgatcacacccccatggaaattgtggtagacatttttaggaagctgggcctccgtcagtgtctggtgactcacaacggccgtctgttaggaatcatcaccaaaaaggacatattgcgtcatatggctcaaactgcaaatcaagatcccgctagcatcatgtttaactag

SEQ ID NO: 121434 - DNA, 6692 bp, Artificial Sequence
  derived and/or modified sequence
gtgacgtcacgcgtcgacgctggggcgtacctttcgggctcctgactcctgccgcttctcttccccttccgtgggtcagggccggtccggtccggaacctgcagcccctttcccagtgttctagttcgcccgtgacccggaataatgagcaaggagggtgtggtgggttgaaagccatcctactttactcccgagttagagcatggattcagttttagtcttaagggggaagtgagattggagatttttatttttaattttgggcagaagcaggttgactctagggatctccagagcgagaggatttaacttcatgttgctcccgtgtttgaaggaggacaataaaagtcccaccgggcaaaattttcgtaacctctgcggtagaaaacgtcaggtatcttttaaatcgcgatagttttcgctgtgtcaggctttcttcggtggagctccgagggtagctaggttctaggtttgaaacagatgcagaatccaaaggcagcgcaaaaaacagccaccgattttgctatgtctctgagctgcgagataatcagacagctaaatggagtctgagcagctgttccatagaggctactatagaaacagctacaacagtataacaagtgcaagtagtgatgaggaacttttagatggagcaggtgttattatggactttcaaacatctgaagatgacaatttattagatggtgacactgcagttggaactcattatacaatgacaaatggaggcagcattaacagttctacacatttactggatcttttggatgaaccaattccaggtgttggtacatatgatgatttccatactattgattgggtgcgagaaaaatgtaaagacagagaaaggcatagacggatcaacagcaaaaagaaagaatcagcatgggaaatgacaaaaagtttgtatgatgcgtggtcaggatggctagtagtaacactaacaggattggcatcaggggcactggccggattaatagacattgctgccgattggatgactgacctaaaggagggcatttgccttagtgcgttgtggtacaaccacgaacagtgctgttggggatctaatgaaacaacatttgaagagagggataaatgtccacagtggaaaacatgggcagaattaatcataggtcaagcagagggtcctggttcttatatcatgaactacataatgtacatcttctgggccttgagttttgcctttcttgcagtttccctggtaaaggtatttgctccatatgcctgtggctctggaattccagagattaaaactattttaagtggattcatcatcagaggttacttgggaaaatggactttaatgattaaaaccatcacattagtcctggctgtggcatcaggtttgagtttaggaaaagaaggtcccctggtacatgttgcctgttgctgcggaaatatcttttcctacctctttccaaagtatagcacaaacgaagctaaaaaaagggaggtgctatcagctgcctcagctgcaggggtttctgtagcttttggtgcaccaattggaggagttctttttagcctggaagaggttagctattattttcctctcaaaactttatggagatcattttttgctgctttagtggctgcatttgttttgaggtccatcaatccatttggtaacagccgtctggtccttttttatgtggagtatcatacaccatggtacctttttgaactgtttccttttattcttctaggggtatttggagggctttggggagcctttttcattagggcaaatattgcctggtgtcgtcgacgcaagtccacgaaatttggaaagtatcccgttctggaagtcattattgttgcagccattactgctgtgatagccttccctaatccatacactaggctaaacaccagtgaactgatcaaagagctttttacagactgtggtcccctggaatcctcttctctttgtgactacagaaatgacatgaatgccagtaaaattgtcgatgacattcctgatcgtccagcaggcattggagtatattcagctatatggcagttatgcctggcactcatatttaaaatcataatgacagtattcacttttggcatcaaggttccatcaggcttgttcatccccagcatggccattggagcgatcgcaggaaggattgtggggattgcggtggagcagcttgcctactatcaccacgactggtttatctttaaggagtggtgtgaggtcggggctgattgcattacacctggcctttatgccatggttggtgctgctgcatgcttaggtggtgtgacaagaatgactgtctccctggtggttattgtttttgagcttactggaggcttggaatatattgttccccttatggctgcagtcatgaccagtaaatgggttggagatgcctttggcagggaaggcatttatgaagcacacatccgattaaatggataccctttcttggatgcaaaagaagaattcactcataccaccctggctgctgacgttatgagacctcgaaggaatgatcctcccttagctgtcctgacacaggacaatatgacagtggatgatatagaaaacatgattaatgaaaccagctacaatggatttcctgtcataatgtcaaaagaatctcagagattagtgggatttgccctcagaagagacctgacaattgcaatagaaagtgccaggaaaaaacaagaaggtatcgttggcagttctcgggtgtgttttgcacagcacaccccatctcttccagcagaaagtcctcggccattgaagcttcgaagcattcttgacatgagcccttttacagtgacagaccacaccccaatggagatcgtggtggatattttccgaaagctgggactgaggcagtgccttgtaactcacaatgggcgcctccttggcattataacaaaaaaagatatcctccggcatatggcccagacggcaaaccaagaccccgcttcaataatgttcaactgaatctcacagatgaggagagagaagaaacggaagaggaagtttatttgttgaatagcacaactctttaacctgagggagtcatctacttttttttcctcctttacaaaaaaagaaaggaaatataaaagccgggtttttgcaacatggtttgcaaataatgctggtggaatggaggagttgtttggggagggaaaggagagagaaggaaaggagtgaggtatttcccgtctaacagaaagcagcgtatcaactcctattgttctgcactggatgcattcagctgaggatgtgcctgatagtgcaggcttgcgcctcaacagagatgacagcagagtcctcgagcacctggcctgttgctccaacattgcaaagacacattatcagtccctatttctagagggattactttgaattgagccatctataaaactgcaaggtcttgcccttttttttaatcaaaactgttctgtttaattcatgaattgtatagttaagcattacctttctacattccagaagagcctttatttctctctctctctctctctctctctctctctctactgagctgtaacaaagcctctttaaatcggtgtatccttttgaagcagtcctttctcatattgagatgtactgtgattttactgaggtttcatcacaagaagggagtgtttcttgtgccattaaccatgtagtttgtaccatcactaaatgcttggaacagtacacatgcaccacaacaaaggctcatcaaacaggtaaagtctcgaaggaagcgagaacgaaatctctcattgtgtgccgtgtggctcaaaaccgaaaacaatgaagcttggttttaaaggataaagttttcttttttgttttcctctcagactttatggataatgtgaccgggtcttatgcaaattttctatttctaaaactactactatgatatacaagtgctgttgagcataattaaataaaatgctgctgctttgacagtaaagagaaggaagtattctgattagctgtatctggtattaattgcatgttaaaacactggaatttttaaaattgaaattagatcagtcattcttttcttttctcaagatatctcatggctgacactgaagaagaaatgtaattcataacttgcactaaatgtatattttttttcttaaaaatttaccattcttatttatatttttatggattaaaatttataaaatacagatcagttaatattgcacttaagtaattttacctttttaatgtgatttttatagaataattcagacttacaaatacagagatatgaacaaagtttacagtgggaacaaaggtttaaaaaaaggttgtggttctctctctgtgatccagtgtgcacataaacctttctctgatctttcactgccatcctctggattatgtcttctgacctgtccattttgacccattaactggaaagttgaaaaactacattaactggaaagttgaaaaactacattactttggagaataaaaccgaaagttcgtgtataccttcttaaaaaaaaaatcaaaccaaaaatgtgaaaacaatagaattgcaaagatagcagttaaaattttaatctgaaaataacctttgaatctcgggctaggttacgtccatatttgaagtggtcagtgatggtttgaacattttttgcaggatgagtgaaaatgcactggattatatttgggatttttgtttttggaattgtctgttttaatcacagccttaattcacaattggcaaaggcagtttactcaaaggactgggctaaatattctgtaattatgcatttttgataggaaaatgaaatttttgcaaacagacattttctttttttttggctggagtgcagtggggcatggtcttggctcactgcagcgttgaccacctgggctcaagtgatactcccgcctcagccacccaagtagctggcactacgggcacacgccaccatgcccagctaatttttttgtatttttagtagagatggggttttgccatgctgcccaggctggtctcaactcctcagctcaagcaatctgcctgcgtgagcctcccaaagtggtggaattacaggcgtgggccactgcgcctggcccagacagacattttctgaaacacaactggcaatgagctgtttttacattttgaaagtgattcttcacttcctagttcttaattatagtatacctattaagatctgtaagatcctgaagacataagatcatgaagccatataagaatgaggattgaaagttgagcaaaattttcgggattttgggaaacattcttagctgtgctatctgcctaaaattattccttattacttctctcctttgacagacttcaagttttcttcatagccctttcaaagttttttgagccatccagagtaaaatcatttctaaatgatagttctgtatatctccaactcgtcttaagtgtatttgcctgtgtgcaacgtattgctagactatgaactcctcagcatggctgctggataacttaattgtcctgagttaatagccttcaaaggacaaatcggtttctttgcagatagcttcgtaaaacttcacatggagtttattttatcatatttcccttttttatttctgctcctcctttaattgcccatcttgcttcagagactgacatttcagggtggatattaattaaagcattaattttgttttttggtatatttctatccctagtatttctatcttactgctaaaatacaggaaaagtgccgtatttttaatgcatttagtggttttctttggtgttatctgttccatttttctttttcatacattgaagtgtgtctccttttcaaccaaaataatgaaatagtggagaccatgaaattgttgtgcctggctaattggcaaattaatttaccaatataataagtgtagcgccttgtttgaataccctttttgagaaggtatgatgagaatgggcaagggtgtcagcatctcttcttcttaataattaattgttttcagttttggttcacgaagaatgcttagttaatctgtaatgttgcctagagctgtatttatctgtttttatttatactagtgtagtaaagctgcatatcattacagtaaaaacgactactgtgatgagttaatcagaaaatctattaaaatctatatgacaatgtgtggtttggcctttaattatatctgtaacagtcctccctcttcactgctgccctacgcagtgtaggccgatatgcctggcacagggagccccaaaaaggtaataattataatgcttctctcaggttacaaagcatttctacactttgcaagcaaggagcaatagaagagtagatagatgctggattgacagcaggatgttcataccaccagcaatggtttagcgcccccatttgtcagtgaaagctgcaggtccacagaaaactgatttcatttcagctcactttcaaaagtgatttttttttttttcgcaagaaaaattacgctatttgcatgaaaagaggtaaaacgatttatttacatgtctttaaaaaatcaccttggacatttgctaatagaactgccaaaagagggtggtaagtaacaacctttgattaagatgtggtcttttactattaagcttttagtaaaaaggaacacactaaaa

SEQ ID NO: 121435 - DNA, 2457 bp, Artificial Sequence
  derived and/or modified sequence
atggagagcgagcagctgttccacagaggctactacagaaacagctacaacagcatcaccagcgccagcagcgacgaggagctgctggacggcgccggcgtgatcatggacttccagaccagcgaggacgacaacctgctggacggcgacaccgccgtgggcacccactacaccatgaccaacggcggcagcatcaacagcagcacccacctgctggacctgctggacgagcccatccccggcgtgggcacctacgacgacttccacaccatcgactgggtgagagagaagtgcaaggacagagagagacacagaagaatcaacagcaagaagaaggagagcgcctgggagatgaccaagagcctgtacgacgcctggagcggctggctggtggtgaccctgaccggcctggccagcggcgccctggccggcctgatcgacatcgccgccgactggatgaccgacctgaaggagggcatctgcctgagcgccctgtggtacaaccacgagcagtgctgctggggcagcaacgagaccaccttcgaggagagagacaagtgcccccagtggaagacctgggccgagctgatcatcggccaggccgagggccccggcagctacatcatgaactacatcatgtacatcttctgggccctgagcttcgccttcctggccgtgagcctggtgaaggtgttcgccccctacgcctgcggcagcggcatccccgagatcaagaccatcctgagcggcttcatcatcagaggctacctgggcaagtggaccctgatgatcaagaccatcaccctggtgctggccgtggccagcggcctgagcctgggcaaggagggccccctggtgcacgtggcctgctgctgcggcaacatcttcagctacctgttccccaagtacagcaccaacgaggccaagaagagagaggtgctgagcgccgccagcgccgccggcgtgagcgtggccttcggcgcccccatcggcggcgtgctgttcagcctggaggaggtgagctactacttccccctgaagaccctgtggagaagcttcttcgccgccctggtggccgccttcgtgctgagaagcatcaaccccttcggcaacagcagactggtgctgttctacgtggagtaccacaccccctggtacctgttcgagctgttccccttcatcctgctgggcgtgttcggcggcctgtggggcgccttcttcatcagagccaacatcgcctggtgcagaagaagaaagagcaccaagttcggcaagtaccccgtgctggaggtgatcatcgtggccgccatcaccgccgtgatcgccttccccaacccctacaccagactgaacaccagcgagctgatcaaggagctgttcaccgactgcggccccctggagagcagcagcctgtgcgactacagaaacgacatgaacgccagcaagatcgtggacgacatccccgacagacccgccggcatcggcgtgtacagcgccatctggcagctgtgcctggccctgatcttcaagatcatcatgaccgtgttcaccttcggcatcaaggtgcccagcggcctgttcatccccagcatggccatcggcgccatcgccggcagaatcgtgggcatcgccgtggagcagctggcctactaccaccacgactggttcatcttcaaggagtggtgcgaggtgggcgccgactgcatcacccccggcctgtacgccatggtgggcgccgccgcctgcctgggcggcgtgaccagaatgaccgtgagcctggtggtgatcgtgttcgagctgaccggcggcctggagtacatcgtgcccctgatggccgccgtgatgaccagcaagtgggtgggcgacgccttcggcagagagggcatctacgaggcccacatcagactgaacggctaccccttcctggacgccaaggaggagttcacccacaccaccctggccgccgacgtgatgagacccagaagaaacgacccccccctggccgtgctgacccaggacaacatgaccgtggacgacatcgagaacatgatcaacgagaccagctacaacggcttccccgtgatcatgagcaaggagagccagagactggtgggcttcgccctgagaagagacctgaccatcgccatcgagagcgccagaaagaagcaggagggcatcgtgggcagcagcagagtgtgcttcgcccagcacacccccagcctgcccgccgagagccccagacccctgaagctgagaagcatcctggacatgagccccttcaccgtgaccgaccacacccccatggagatcgtggtggacatcttcagaaagctgggcctgagacagtgcctggtgacccacaacggcagactgctgggcatcatcaccaagaaggacatcctgagacacatggcccagaccgccaaccaggaccccgccagcatcatgttcaactag

SEQ ID NO: 121436 - protein, 729 aa, Artificial Sequence
  derived and/or modified sequence
MVNAGAMSGSGNLMDFLDEPFPDVGTYEDFHTIDWLREKSRDTDRHRKITSKSKESIWEFIKSLLDAWSGWVVMLLIGLLAGTLAGVIDLAVDWMTDLKEGVCLSAFWYSHEQCCWTSNETTFEDRDKCPLWQKWSELLVNQSEGASAYILNYLMYILWALLFAFLAVSLVRVFAPYACGSGIPEIKTILSGFIIRGYLGKWTLLIKTVTLVLVVSSGLSLGKEGPLVHVACCCGNFFSSLFSKYSKNEGKRREVLSAAAAAGVSVAFGAPIGGVLFSLEEVSYYFPLKTLWRSFFAALVAAFTLRSINPFGNSRLVLFYVEYHTPWRRKTTRLGKYPVLEVIVVTAITAIIAYPNPYTRQSTSELISELFNDCGALESSQLCDYINDPNMTRPVDDIPDRPAGVGVYTAMWQLALALIFKIVVTIFTFGMKIPSGLFIPSMAVGAIAGRMVGIGVEQLAYHHHDWIIFRNWCRPGADCVTPGLYAMVGAAACLGGVTRMTVSLVVIMFELTGGLEYIVPLMAAAVTSKWVADAFGKEGIYEAHIHLNGYPFLDVKDEFTHRTLATDVMRPRRGEPPLSVLTQDSMTVEDVETLIKETDYNGFPVVVSRDSERLIGFAQRRELILAIKNARQRQEGIVSNSIMYFTEEPPELPANSPHPLKLRRILNLSPFTVTDHTPMETVVDIFRKLGLRQCLVTRSGRLLGIITKKDVLRHMAQMANQDPESIMFN

SEQ ID NO: 121437 - protein, 760 aa, Artificial Sequence
  derived and/or modified sequence
MVNAGAMSGSGNLMDFLDEPFPDVGTYEDFHTIDWLREKSRDTDRHRKITSKSKESIWEFIKSLLDAWSGWVVMLLIGLLAGTLAGVIDLAVDWMTDLKEGVCLSAFWYSHEQCCWTSNETTFEDRDKCPLWQKWSELLVNQSEGASAYILNYLMYILWALLFAFLAVSLVRVFAPYACGSGIPEIKTILSGFIIRGYLGKWTLLIKTVTLVLVVSSGLSLGKEGPLVHVACCCGNFFSSLFSKYSKNEGKRREVLSAAAAAGVSVAFGAPIGGVLFSLEEVSYYFPLKTLWRSFFAALVAAFTLRSINPFGNSRLVLFYVEYHTPWYMAELFPFILLGVFGGLWGTLFIRCNIAWCRRRKTTRLGKYPVLEVIVVTAITAIIAYPNPYTRQSTSELISELFNDCGALESSQLCDYINDPNMTRPVDDIPDRPAGVGVYTAMWQLALALIFKIVVTIFTFGMKIPSGLFIPSMAVGAIAGRMVGIGVEQLAYHHHDWIIFRNWCRPGADCVTPGLYAMVGAAACLGGVTRMTVSLVVIMFELTGGLEYIVPLMAAAVTSKWVADAFGKEGIYEAHIHLNGYPFLDVKDEFTHRTLATDVMRPRRGEPPLSVLTQDSMTVEDVETLIKETDYNGFPVVVSRDSERLIGFAQRRELILAIKNARQRQEGIVSNSIMYFTEEPPELPANSPHPLKLRRILNLSPFTVTDHTPMETVVDIFRKLGLRQCLVTRSGRLLGIITKKDVLRHMAQMANQDPESIMFN

SEQ ID NO: 121438 - protein, 152 aa, Artificial Sequence
  derived and/or modified sequence
MVNAGAMSGSGNLMDFLDEPFPDVGTYEDFHTIDWLREKSRDTDRHRKITSKSKESIWEFIKSLLDAWSGWVVMLLIGLLAGTLAGVIDLAVDWMTDLKEGVCLSAFWYSHEQCCWTSNETTFEDRDKCPLWQKWSELLVNQSEVLSAAAAA

SEQ ID NO: 121439 - DNA, 2190 bp, Artificial Sequence
  derived and/or modified sequence
atggtcaacgcaggagcgatgagcggatctggaaacctgatggacttcctcgacgaaccttttcctgacgtgggcacatatgaggacttccataccatcgactggcttcgggaaaagagccgggataccgaccgacatcggaagatcacttcaaaatcaaaggagtccatctgggagttcattaagtcgctgttggacgcctggtccgggtgggtagtgatgctgcttatcggattactggcggggactttggccggggtgatcgacctagccgtggactggatgacagatctgaaggaaggggtatgcctgtccgcattttggtacagccacgaacagtgctgttggacatcaaatgagacaactttcgaggatcgagacaagtgtcctctctggcaaaagtggtctgaattgttggttaaccagtcagagggcgcctctgcttacatactgaactatctgatgtatatcttatgggccctgctctttgcgttcctagcagtctcactcgtccgggtatttgcaccatacgcttgtggatctggaatccccgagatcaagaccattctctccggcttcatcattcgtggctacctgggcaagtggactctacttataaagaccgttacgctggttttggtggtgtcaagcggattatccttagggaaggaaggcccactggtgcacgtcgcctgttgctgtgggaacttctttagcagcctgtttagcaagtactcaaagaacgaaggtaagcgcagggaggtcttgtcagccgcggcagctgccggcgttagtgttgcatttggcgccccaatcggcggagtgcttttctcccttgaagaggtctcatattactttccattaaaaaccctgtggcgctcttttttcgcggcacttgtggcggcattcacgttgcgctcaatcaatcccttcggcaatagtcgtttggtgttgttttacgtggaatatcataccccatggcgtagaaagaccacaaggctgggtaaatatcctgtattggaggtcatcgtagttactgccatcacagccatcattgcgtatcccaacccttatacgagacagtctaccagcgagctgatcagcgagttgtttaacgattgtggagcccttgagagctcccagctttgcgactacattaacgaccccaatatgaccagacccgtggatgatatcccagacaggcccgctggggtgggcgtttacacagccatgtggcagctggccctggccctgatattcaaaattgtggtgactatttttaccttcggaatgaaaattcccagcgggctgtttatcccatccatggccgtgggtgctattgccgggcgaatggtggggattggcgtggagcagctggcctaccatcatcatgactggataatctttcgcaactggtgtcgtcccggtgctgactgcgtgacgcctggactttatgcaatggtcggtgctgccgcgtgtttaggcggcgttaccaggatgacagtctccctcgtggtgattatgttcgaactgactggaggcctcgagtatattgtgcctctgatggctgctgcagtgacgagcaaatgggtcgccgatgccttcggaaaagaaggaatttacgaagctcatatacacctcaatggctacccatttttagatgtgaaagatgagttcacgcataggacactggctaccgatgtgatgcgaccccggcgtggcgagcctccgttatcggtcctgacccaagacagcatgacggtggaggatgtcgagactcttattaaggagacggactataatggatttccggtcgtagtgagccgggattctgagcgcctgatcgggttcgcgcagcggagggagctgattcttgctattaaaaacgctaggcagcgtcaagagggtatagtctctaattccataatgtattttaccgaagagcctcccgagctgcctgctaattctcctcacccgttgaagttgcggcgcatccttaacctgtctcctttcacagttactgaccacacacctatggaaactgtggtcgacatttttaggaagctcggcctgaggcagtgccttgtgacacgatctgggcgactgctggggatcataactaagaaagacgtgttgagacatatggcccagatggcgaatcaggaccccgagtccataatgtttaactag

SEQ ID NO: 121440 - DNA, 2283 bp, Artificial Sequence
  derived and/or modified sequence
atggtgaacgcgggcgccatgtcgggatctggcaatctgatggactttctcgatgaacctttccctgatgttgggacctacgaggacttccacacaatcgactggcttcgcgaaaaatccagggataccgaccggcatcgcaagatcacttcaaagagcaaagagagcatttgggaatttataaagagcctgcttgacgcgtggagcggatgggtagtcatgcttctcatcggcctcctcgctggaacattagccggagtgatcgatctggctgtggattggatgactgatctcaaggaaggagtatgcttatctgcattttggtatagtcacgaacagtgttgttggacgtctaatgagaccacctttgaagatagggacaaatgcccactttggcagaagtggagcgaacttctggtaaatcagtccgagggggccagtgcctacattttgaactatctcatgtatatcttgtgggctttactgtttgctttcctcgccgtgagtttagtaagagtgttcgccccttacgcatgtgggagcgggattcccgagatcaaaactatcctgtctggtttcattatcaggggttacctaggaaagtggaccctgctcatcaagaccgtgacactggtacttgtcgtgagcagcggtctctccctagggaaagagggacctctggtccacgtggcctgctgctgcggaaattttttctcaagtcttttctcgaaatactcaaaaaatgaggggaagcggcgtgaagtactttctgccgctgcagctgccggtgtttccgtcgcttttggggcccccatcggcggcgttctgtttagtctcgaagaggtcagctactactttccactgaagactctatggcggtctttctttgctgcattggtcgctgcattcaccctcaggagcatcaacccatttgggaattcccgcttggtgcttttctatgtggaatatcacactccatggtacatggcagagcttttcccattcatcctactgggtgtgttcgggggcctgtggggcacgcttttcattagatgcaatattgcatggtgtcgtcggcggaagactacccgcctgggcaaatatccagtcctggaagttattgtcgtgaccgccatcaccgccatcattgcatacccaaatccatacacgagacagtctacttccgagctgatctcagagctgtttaacgattgcggggccctcgagtcctcccagctctgtgattatattaatgaccccaacatgacaaggccagtcgatgatatccccgaccgacccgcaggagtgggcgtgtataccgcgatgtggcagctagcccttgcgttgattttcaaaatcgtggtcacgatttttacttttgggatgaaaattcccagcgggctattcattccctctatggcagtgggcgcaatcgctggacgcatggtgggtattggggtggagcagctcgcttatcaccaccacgactggataatcttccggaactggtgtaggccaggcgcggactgtgtaactcccggactgtacgccatggttggggctgcagcctgtttaggaggcgtgacccggatgacggtgtctctagtggtaatcatgttcgagctgaccgggggactggagtacatagtgccccttatggcagcagctgttacttccaaatgggttgcagacgcattcggcaaggagggcatatatgaggctcatattcacctaaacggatacccctttttggacgtcaaagacgaatttacacatcgcactcttgctactgatgtgatgcgacccagacgcggcgaaccccctctcagtgtactgactcaggacagcatgaccgtcgaagatgtggaaaccctcattaaggagactgactacaacgggttccctgtcgtcgtgagtagggacagcgagcggctgattggttttgctcagcgccgggagctgattttggccatcaaaaacgcccgccaaagacaggaggggattgtttctaactcgatcatgtatttcacggaagagccgccagagttacctgctaatagccctcatccgctgaagttgaggcgaattcttaacttgtctccattcactgtaaccgatcatactccaatggaaacggtggtggacatctttagaaagttaggtctccgacagtgcctggtcactcggagcgggcgtctcctagggatcataaccaaaaaagacgtgttaagacacatggcgcagatggctaaccaggacccggaatccatcatgttcaactag

SEQ ID NO: 121441 - DNA, 2001 bp, Artificial Sequence
  derived and/or modified sequence
atgacagacttaaaggagggcgtatgtctgtccgctttctggtactcccatgagcaatgctgctggacctctaatgagaccaccttcgaggatcgggacaagtgtccgttatggcagaagtggtccgagctcctggtgaatcaatcagaaggcgcgtccgcctacattctgaactacctaatgtatatcctgtgggctttgctttttgcctttctggcggtgtcattggtgagggtgtttgccccatacgcctgcggctctggcattcccgagataaaaacaatccttagtggcttcattattcggggatatctggggaagtggacactgctgataaagaccgtgactctagttctggtggtctctagcggcttatccctcggcaaagagggtccattggtgcacgtcgcctgctgttgtggcaacttctttagctctctgttctcgaaatacagcaagaacgaagggaaacgcagggaggtgctgagcgctgccgccgccgcaggggtgtctgtagctttcggcgctccaattggcggtgtgctattcagccttgaagaagtgtcctactatttcccactgaaaactctttggagatctttcttcgccgctttggtcgcggcattcaccctgaggagcattaacccatttggaaactctcgcctggtccttttctatgtcgaatatcacactccctggtacatggccgaactgttcccttttatactgctgggtgtgttcgggggactgtgggggacacttttcatccggtgcaatatagcttggtgccggcggagaaaaacaacaagattggggaaatatcccgtgcttgaagttatcgtggtcactgccattaccgccatcattgcatatccaaacccatatacaagacagagtacaagcgagttaattagcgagttgttcaatgattgtggagctctggagtctagccagctgtgtgattacattaatgatcccaatatgactagacctgtggacgatatcccagatcgccctgccggagtgggcgtttataccgccatgtggcagctggctttggctctcatctttaaaattgtagtaacgatattcaccttcggaatgaagatcccctccggcctatttatcccatcaatggctgtgggggcaattgcaggccggatggtggggatcggcgtggaacaacttgcctaccaccatcatgactggatcatatttcggaattggtgccggccaggcgcggactgcgttaccccaggactttatgccatggtgggcgccgcagcttgcctgggcggagtgactcgcatgaccgtcagtctcgtcgtcatcatgttcgaattaaccggtggcctggagtatattgttcccttgatggcagctgccgtgactagcaagtgggtggcggacgcctttgggaaggaaggtatctacgaagcgcacattcacctgaacggttacccttttctcgacgtgaaagatgagttcacccaccggaccctcgctaccgatgtcatgaggccccggcggggcgaacccccactgtcagttctcacccaggactctatgaccgtcgaagacgttgagactctcatcaaagaaaccgactataatggatttcctgttgtcgtcagccgagattctgagcgtttgatcggctttgcccaacgccgagaactcattttggccatcaagaatgcgagacagcgccaggaaggtatcgtctctaactctattatgtacttcacggaggagcctccggagcttcccgccaattctccccacccattgaagttgcgcaggatcctcaacctgagccccttcaccgtcaccgatcatactccaatggaaaccgttgtggatatctttcgcaaactggggctccggcagtgcttggtcacgaggagcggaagactactgggcatcatcacaaaaaaggatgtgctccgtcatatggcgcaaatggccaatcaggatccggaaagtataatgttcaattag

SEQ ID NO: 121442 - DNA, 459 bp, Artificial Sequence
  derived and/or modified sequence
atggtgaatgcgggggcaatgagcggcagcgggaatcttatggattttctggacgaaccattcccagatgtagggacatatgaagattttcatacaatcgattggctgagggagaaaagcagagataccgatagacacaggaagatcacttccaagtcgaaggagtccatttgggagtttattaaaagtcttctagacgcgtggagtggctgggtcgtcatgctgctaattgggctgctagcgggtaccctcgcgggagtaatcgatctggccgtggactggatgactgatctgaaggaaggagtgtgcctgagtgctttctggtactcgcatgagcaatgctgctggacaagtaatgagactacatttgaagaccgagacaagtgccctctttggcagaagtggagcgagcttctggtcaaccaatcagaagtgctgtcagccgccgcagctgcctag

SEQ ID NO: 121443 - DNA, 2190 bp, Artificial Sequence
  derived and/or modified sequence
atggtgaatgctggggccatgagcggcagcggcaacctgatggacttcctggatgagcccttcccagatgtgggcacctatgaggacttccacaccatcgactggctgcgggagaagagccgggacacagacagacacaggaagatcaccagcaagagcaaggagagcatctgggagttcatcaagagcctgctggatgcctggagcggctgggtggtgatgctgctgattggcctgctggccggcaccctggccggggtcatcgacctggccgtggactggatgacagacctgaaggagggcgtgtgcctgagcgccttctggtacagccatgagcagtgctgctggaccagcaatgagaccacctttgaggaccgggacaagtgccccctgtggcagaagtggagcgagctgctggtgaaccagagcgagggcgccagcgcctacatcctgaactacctgatgtacatcctgtgggccctgctgtttgccttcctggccgtgtccctggtgcgggtgtttgccccctatgcctgtggcagcggcatccctgagatcaagaccatcctgagcggcttcatcatccggggctacctgggcaagtggaccctgctgatcaagacagtgaccctggtgctggtggtgagcagcggcctgagcctgggcaaggagggccccctggtgcacgtggcctgctgctgcggcaacttcttcagcagcctcttcagcaagtacagcaagaatgaaggcaagaggcgggaggtgctgtctgctgctgctgctgctggggtgtctgtggccttcggggcccccatcggcggcgtgctcttcagcctggaggaggtgtcctactacttccccctgaagaccctgtggaggagcttctttgctgccctggtggccgccttcaccctgcggagcatcaacccctttggaaacagccggctggtgctcttctacgtggagtaccacaccccctggaggaggaagaccacccggctgggcaagtaccctgtgctggaggtgattgtggtgacagccatcacagccatcatcgcctaccccaacccctacacccggcagagcaccagcgagctgatcagcgagctgttcaatgactgtggggccctggagagcagccagctgtgtgactacatcaatgaccccaacatgaccaggcctgtggatgacatcccagacaggcctgctggggtgggcgtgtacacagccatgtggcagctggccctggccctgatcttcaagatcgtggtgaccatcttcaccttcggcatgaagatccccagcggcctcttcatccccagcatggctgtgggcgccatcgccggccgcatggtgggcatcggcgtggagcagctggcctaccaccaccacgactggatcatcttcaggaactggtgcaggcctggagctgactgtgtgaccccaggcctgtatgccatggtgggcgctgctgcctgcctgggcggcgtgaccaggatgacagtgtccctggtggtgatcatgtttgagctgaccggcggcctggagtacatcgtgcccctgatggctgctgctgtgaccagcaagtgggtggctgatgccttcggcaaggagggcatctatgaggcccacatccacctgaatggctaccccttcctggatgtgaaggatgagttcacccacaggaccctggccacagatgtgatgaggccccggcggggggagccccccctgtctgtgctgacccaggacagcatgacagtggaggatgtggagaccctcatcaaggagacagactacaacggcttccctgtggtggtgtcccgggacagcgagcggctgattggatttgcccagaggcgggagctgatcctggccatcaagaatgcccggcagaggcaggagggcatcgtgagcaacagcatcatgtacttcacagaggagcccccagagctgcctgccaacagcccccaccccctgaagctgcggcgcatcctgaacctgagccccttcaccgtgacagaccacacccccatggagaccgtggtggacatcttcaggaagctgggcctgcggcagtgcctggtgaccaggagcggccgcctgctgggcatcatcaccaagaaggatgtgctgcggcacatggcccagatggccaaccaggaccctgagagcatcatgttcaactag

SEQ ID NO: 121444 - DNA, 2283 bp, Artificial Sequence
  derived and/or modified sequence
atggtgaatgctggggccatgagcggcagcggcaacctgatggacttcctggatgagcccttcccagatgtgggcacctatgaggacttccacaccatcgactggctgcgggagaagagccgggacacagacagacacaggaagatcaccagcaagagcaaggagagcatctgggagttcatcaagagcctgctggatgcctggagcggctgggtggtgatgctgctgattggcctgctggccggcaccctggccggggtcatcgacctggccgtggactggatgacagacctgaaggagggcgtgtgcctgagcgccttctggtacagccatgagcagtgctgctggaccagcaatgagaccacctttgaggaccgggacaagtgccccctgtggcagaagtggagcgagctgctggtgaaccagagcgagggcgccagcgcctacatcctgaactacctgatgtacatcctgtgggccctgctgtttgccttcctggccgtgtccctggtgcgggtgtttgccccctatgcctgtggcagcggcatccctgagatcaagaccatcctgagcggcttcatcatccggggctacctgggcaagtggaccctgctgatcaagacagtgaccctggtgctggtggtgagcagcggcctgagcctgggcaaggagggccccctggtgcacgtggcctgctgctgcggcaacttcttcagcagcctcttcagcaagtacagcaagaatgaaggcaagaggcgggaggtgctgtctgctgctgctgctgctggggtgtctgtggccttcggggcccccatcggcggcgtgctcttcagcctggaggaggtgtcctactacttccccctgaagaccctgtggaggagcttctttgctgccctggtggccgccttcaccctgcggagcatcaacccctttggaaacagccggctggtgctcttctacgtggagtaccacaccccctggtacatggccgagctgttccccttcatcctgctgggcgtgtttggaggcctgtggggcaccctcttcatccgctgcaacatcgcctggtgcagaagaaggaagaccacccggctgggcaagtaccctgtgctggaggtgattgtggtgacagccatcacagccatcatcgcctaccccaacccctacacccggcagagcaccagcgagctgatcagcgagctgttcaatgactgtggggccctggagagcagccagctgtgtgactacatcaatgaccccaacatgaccaggcctgtggatgacatcccagacaggcctgctggggtgggcgtgtacacagccatgtggcagctggccctggccctgatcttcaagatcgtggtgaccatcttcaccttcggcatgaagatccccagcggcctcttcatccccagcatggctgtgggcgccatcgccggccgcatggtgggcattggagtggagcagctggcctaccaccaccacgactggatcatcttcaggaactggtgcaggcctggagctgactgtgtgaccccaggcctgtatgccatggtgggcgccgccgcctgcctgggcggcgtgaccaggatgacagtgtccctggtggtgatcatgtttgagctgactggaggcctggagtacatcgtgcccctgatggctgctgctgtgaccagcaagtgggtggctgatgccttcggcaaggagggcatctatgaggcccacatccacctgaatggctaccccttcctggatgtgaaggatgagttcacccacaggaccctggccacagatgtgatgaggcccaggagaggagagccccccctgtctgtgctgacccaggacagcatgacagtggaggatgtggagaccctcatcaaggagacagactacaacggcttccctgtggtggtgtcccgggacagcgagcggctcatcggctttgcccagaggcgggagctgatcctggccatcaagaatgcccggcagaggcaggagggcatcgtgagcaacagcatcatgtacttcacagaggagcccccagagctgcctgccaacagcccccaccccctgaagctgcggcgcatcctgaacctgagccccttcaccgtgacagaccacacccccatggagaccgtggtggacatcttcaggaagctgggcctgcggcagtgcctggtgaccaggagcggccgcctgctgggcatcatcaccaagaaggatgtgctgcggcacatggcccagatggccaaccaggaccctgagagcatcatgttcaactag

SEQ ID NO: 121445 - DNA, 2001 bp, Artificial Sequence
  derived and/or modified sequence
atgacagacctgaaggagggcgtgtgcctgagcgccttctggtacagccatgagcagtgctgctggaccagcaatgagaccacctttgaggaccgggacaagtgccccctgtggcagaagtggagcgagctgctggtgaaccagagcgagggcgccagcgcctacatcctgaactacctgatgtacatcctgtgggccctgctgtttgccttcctggccgtgtccctggtgcgggtgtttgccccctatgcctgtggcagcggcatccctgagatcaagaccatcctgagcggcttcatcatccggggctacctgggcaagtggaccctgctgatcaagacagtgaccctggtgctggtggtgagcagcggcctgagcctgggcaaggagggccccctggtgcacgtggcctgctgctgcggcaacttcttcagcagcctcttcagcaagtacagcaagaatgaaggcaagaggcgggaggtgctgtctgctgctgctgctgctggggtgtctgtggccttcggggcccccatcggcggcgtgctcttcagcctggaggaggtgtcctactacttccccctgaagaccctgtggaggagcttctttgctgccctggtggccgccttcaccctgcggagcatcaacccctttggaaacagccggctggtgctcttctacgtggagtaccacaccccctggtacatggccgagctgttccccttcatcctgctgggcgtgtttggaggcctgtggggcaccctcttcatccgctgcaacatcgcctggtgcagaagaaggaagaccacccggctgggcaagtaccctgtgctggaggtgattgtggtgacagccatcacagccatcatcgcctaccccaacccctacacccggcagagcaccagcgagctgatcagcgagctgttcaatgactgtggggccctggagagcagccagctgtgtgactacatcaatgaccccaacatgaccaggcctgtggatgacatcccagacaggcctgctggggtgggcgtgtacacagccatgtggcagctggccctggccctgatcttcaagatcgtggtgaccatcttcaccttcggcatgaagatccccagcggcctcttcatccccagcatggctgtgggcgccatcgccggccgcatggtgggcattggagtggagcagctggcctaccaccaccacgactggatcatcttcaggaactggtgcaggcctggagctgactgtgtgaccccaggcctgtatgccatggtgggcgccgccgcctgcctgggcggcgtgaccaggatgacagtgtccctggtggtgatcatgtttgagctgactggaggcctggagtacatcgtgcccctgatggctgctgctgtgaccagcaagtgggtggctgatgccttcggcaaggagggcatctatgaggcccacatccacctgaatggctaccccttcctggatgtgaaggatgagttcacccacaggaccctggccacagatgtgatgaggcccaggagaggagagccccccctgtctgtgctgacccaggacagcatgacagtggaggatgtggagaccctcatcaaggagacagactacaacggcttccctgtggtggtgtcccgggacagcgagcggctcatcggctttgcccagaggcgggagctgatcctggccatcaagaatgcccggcagaggcaggagggcatcgtgagcaacagcatcatgtacttcacagaggagcccccagagctgcctgccaacagcccccaccccctgaagctgcggcgcatcctgaacctgagccccttcaccgtgacagaccacacccccatggagaccgtggtggacatcttcaggaagctgggcctgcggcagtgcctggtgaccaggagcggccgcctgctgggcatcatcaccaagaaggatgtgctgcggcacatggcccagatggccaaccaggaccctgagagcatcatgttcaactag

SEQ ID NO: 121446 - DNA, 459 bp, Artificial Sequence
  derived and/or modified sequence
atggtgaatgctggggccatgagcggcagcggcaacctgatggacttcctggatgagcccttcccagatgtgggcacctatgaggacttccacaccatcgactggctgcgggagaagagccgggacacagacagacacaggaagatcaccagcaagagcaaggagagcatctgggagttcatcaagagcctgctggatgcctggagcggctgggtggtgatgctgctgattggcctgctggccggcaccctggccggggtcatcgacctggccgtggactggatgacagacctgaaggagggcgtgtgcctgagcgccttctggtacagccatgagcagtgctgctggaccagcaatgagaccacctttgaggaccgggacaagtgccccctgtggcagaagtggagcgagctgctggtgaaccagagcgaggtgctgtctgctgctgctgctgcctag

SEQ ID NO: 121447 - DNA, 2190 bp, Artificial Sequence
  derived and/or modified sequence
atggtgaacgccggcgccatgagcggcagcggcaacctgatggactttctggacgagccattccccgacgttggcacttacgaagattttcatacgatagactggcttagagagaagtcacgggacacggaccggcacagaaagattaccagcaaaagcaaggaatctatttgggaattcatcaagtctctactcgatgcctggtcaggctgggtggtgatgttgctgatcggacttcttgctggaacccttgcgggagtaatcgatctcgccgtcgactggatgaccgatctgaaggagggggtatgtttgagcgccttctggtattcccatgagcagtgttgttggacttctaacgagacaacattcgaggaccgcgataaatgcccactgtggcagaagtggagtgagttattagtcaatcagtctgaaggagcaagtgcatacatcctaaactatctgatgtacattctttgggctctgctgttcgcctttctggcggtctccctagtgcgggtgttcgccccttacgcatgtggatcaggaattccagaaatcaagaccattttgagtggatttatcattagaggctacctcggcaagtggaccctgcttatcaaaacagtgactcttgtcctcgttgtgtcctccggtctgagtctcggtaaggagggtcccctggttcacgtcgcctgttgctgcgggaactttttcagctcactcttttctaagtatagcaagaacgaaggaaaacgccgggaggtcttgagcgcagccgcagctgcaggcgtgagcgtagcattcggggccccgattggcggggtgcttttctcgctggaagaggtcagctattacttcccgttaaagaccctgtggaggtccttctttgcagccttagtggccgcttttactttacggtctattaatccctttgggaatagcaggcttgtgctcttctatgttgagtaccacactccctggcgaaggaaaactacacggctgggaaaatatcctgtgcttgaggtcatcgtggtaactgccatcaccgccatcatcgcttaccccaatccgtatacaaggcaatccacatcagaactgattagcgaactgttcaatgactgtggcgccttggagtcctctcaactgtgtgattatattaacgaccctaacatgactcgcccagtagacgatatcccggatagaccagcaggggttggagtgtacactgccatgtggcagttagcactagccctgatctttaagattgtggtgacgatttttacattcggaatgaagataccatccggtttatttatcccaagcatggccgtgggtgctatagccggccgaatggtggggatcggcgttgagcagctagcttatcaccaccacgattggataatcttccgcaattggtgtcgccccggggccgattgtgttaccccaggcctctacgctatggtgggcgccgcagcctgcttaggaggcgtcacgaggatgaccgtgtcactggtggtaatcatgttcgaattgacaggtggtttagagtatattgtaccactgatggcggcagctgtaaccagtaaatgggttgctgacgccttcggcaaggagggcatttacgaggctcacattcacttgaacggatatccatttctggacgtgaaggacgaattcacccaccgtactttggccacagatgtgatgcgtccaaggagaggtgagcctccgctttctgtgctgactcaagactccatgaccgtagaggatgtggaaacgctgatcaaagaaacagactataacgggttcccagtcgtggtctcacgcgacagcgagcgactgatcggcttcgctcagaggagggagttaatcctcgcgattaaaaatgcaaggcagcgacaggaagggatagtaagtaattccattatgtacttcaccgaagagcctccagagttgccagccaattccccccacccgctcaagctgcgtagaatccttaatctgtcaccgttcaccgtcaccgatcatacccccatggagacggtggtggatattttcaggaagctcgggctgcgccagtgcttggtaacgaggtcagggcggctcctaggcatcatcaccaagaaagacgtgctgcgtcacatggcacagatggccaaccaagatccggagagcatcatgtttaactag

SEQ ID NO: 121448 - DNA, 2283 bp, Artificial Sequence
  derived and/or modified sequence
atggtgaacgccggcgccatgagcggcagcggcaacctgatggacttcctagatgagccttttcctgatgtgggcacctacgaagacttccataccatcgattggcttagggagaagagtcgggatactgaccggcataggaaaataacatccaagagcaaggagagtatctgggaattcatcaagtcgctgctggacgcttggtccggctgggtggtaatgcttcttattgggctgctggccgggacgcttgcaggagtaatcgacctggctgtggattggatgacagatttaaaagaaggagtttgtttgagcgctttttggtacagccatgagcagtgctgttggacctcgaatgagactacgtttgaagacagagacaaatgcccattgtggcaaaagtggagtgagcttctggttaatcagagtgagggcgccagcgcttacattctgaattatcttatgtatatactatgggcgctgctctttgcctttctggccgtgagcctggttcgggtgttcgcgccttacgcatgcggctccggcattccagagattaagaccatcttatctggcttcattatccggggttacctgggtaagtggaccctcctcattaagactgtaaccctggtgctcgttgtctctagtggtctgtcactgggaaaggaagggcctctagtccatgtggcgtgttgttgtggcaacttcttttcatcattatttagcaaatacagcaagaacgagggtaaaaggagagaggtgctgtcagctgccgctgccgccggggtcagtgtggctttcggggcccctatcggtggggtcctctttagcctcgaagaagtctcctactacttccccctcaagaccctgtggagatcttttttcgctgcgctggtggccgcctttacactgcgttccatcaacccctttggaaattcaagactggtccttttttacgtggagtatcacaccccatggtacatggcagagctcttccccttcattttactgggcgtcttcggcggtctttgggggactttgttcatcaggtgcaatatcgcttggtgtcggcgcaggaaaacaacacggctcggcaaatatcctgtgctcgaggtaatagtggtgacggctatcactgctatcatcgcttacccaaatccgtatacacggcaaagcacatccgagctcatttccgagctctttaacgactgtggcgcactcgaatcttcccagctgtgtgactacatcaatgatcccaacatgacacggcctgtggatgacataccggatcgaccagccggagttggggtctatactgccatgtggcagcttgccctggctttgattttcaaaatagtagttacaatcttcacatttggcatgaagatccctagtggcctttttataccaagtatggccgtgggggccattgccggtcggatggtagggatcggcgtggagcaactggcctatcaccaccatgactggatcatctttcggaattggtgcaggcctggcgcagactgcgttacgccaggtctttatgctatggtgggcgcagccgcgtgtttgggcggtgtgacaaggatgacagtttccctcgtcgtgattatgtttgaacttacaggcgggctcgagtatatcgtgccccttatggcagccgcagtgaccagcaagtgggtcgcggacgcttttggcaaggaggggatttacgaggcgcacattcacttaaatgggtatccttttctcgacgtgaaggacgaattcacccatcgtacactggcaaccgacgtgatgaggcccaggagaggggaaccccctctcagcgtcctcacacaggactccatgacggtggaggacgtcgagactttgatcaaagagacggactacaacggcttcccagtcgtggtgtcccgagattctgagcggctcatcgggttcgcccaaaggagggagctgatcctcgctatcaagaatgcgaggcaaaggcaggagggtatcgtgtcaaattctatcatgtactttaccgaggagcctcccgagctccccgcaaattctccgcacccgctgaaactgagacggatcctcaacctgtcccctttcaccgttaccgaccatacccctatggagacagtggtggacattttccgaaagcttgggctgagacagtgtcttgtgactcgaagtggccgcctcctgggcattattactaagaaagacgtgctccgccacatggctcaaatggccaaccaggaccccgagtcaattatgttcaactag

SEQ ID NO: 121449 - DNA, 2001 bp, Artificial Sequence
  derived and/or modified sequence
atgaccgacctgaaggagggcgtgtgcctgagcgccttctggtacagccacgagcaatgctgctggacgagcaacgaaactacatttgaggatcgcgacaaatgcccgctctggcagaagtggtccgagctattggttaatcaatccgaaggcgcatcggcatatatcctcaactatcttatgtacatcctctgggcgttgctttttgcctttctggccgtctccttggtgagggtgttcgctccatatgcttgcggctctggcatccccgagattaaaacgatcctctccggctttatcatcagggggtatctcggaaaatggacgctgctgatcaagactgtgactctagttcttgtcgtgtccagtggattgtccctcggcaaggagggcccattggttcatgtcgcttgttgctgcgggaattttttttcgagcctgttttcaaaatactccaagaatgagggcaagcgcagagaagtgcttagcgccgccgcagcagccggcgtttctgtagcattcggcgctcctattgggggtgtgcttttcagcctggaggaggtgagctactattttccgctcaagaccctgtggagatcctttttcgcggcacttgtagctgcattcacactcaggagcatcaatccgttcggcaattcaagattagttcttttttatgtcgagtatcacaccccctggtatatggcagagctgttccctttcatcttgctgggagtgttcggcggtctctggggtacactattcatccgatgtaatatagcatggtgccggaggcggaagaccactaggcttggcaaatatcccgtgttagaggtcatcgtggttacagccatcacagccatcatcgcataccctaacccttacacccgacaatcaacttccgagctgatctccgaattgttcaacgactgtggtgcactcgagagctcccaactctgtgactacatcaatgatcccaacatgacccggcctgtggacgacattccggaccgacctgctggtgtgggcgtctacactgccatgtggcagttggcactcgccttgatattcaaaattgttgttaccattttcacattcggaatgaaaataccgtctgggctgttcattccatcaatggccgtcggagcaattgcaggccggatggtggggatcggggtcgagcaactggcttaccatcatcatgattggattatctttaggaactggtgcagacccggagctgattgcgtgacccctggcctgtatgccatggtgggcgctgccgcttgtctgggcggagttacacggatgacagtctcactggttgtcatcatgttcgaattaacgggcggattggaatacatcgtaccgctgatggcagcagccgtgacgagcaagtgggtcgctgatgcatttggtaaggagggaatttatgaggcgcacatccacctcaatggctaccctttcctggatgtgaaagatgagtttacacacaggaccctcgccactgacgtcatgagacctagacgaggagaaccacctcttagcgtcctgacccaagatagcatgactgtggaggatgtggagacccttattaaagaaaccgactacaacgggttccccgtggtggtgtccagagactccgagcggctaatcggtttcgcccagcgacgcgagctcattctggcaatcaaaaacgccaggcaaaggcaagagggaattgtttctaatagcatcatgtacttcaccgaggaaccacctgagttgccagccaattccccccatccacttaaactgcgccgcatcttgaacctaagcccatttaccgtgacagatcacaccccaatggaaaccgtagtggatatattccgaaaactcggattgcggcagtgcctggtgacaagaagtggtcggcttctggggatcatcactaaaaaagatgtactcaggcacatggcgcagatggcaaaccaagaccccgaaagcatcatgttcaactag

SEQ ID NO: 121450 - DNA, 459 bp, Artificial Sequence
  derived and/or modified sequence
atggtgaacgccggcgccatgagcggcagcggcaacctgatggacttcctggacgagcccttccctgacgtgggcacttacgaggattttcataccatcgactggctcagagagaaaagcagagatacagatcggcatagaaaaatcacaagtaaatccaaagagtctatttgggaattcataaagagccttctggacgcctggtccgggtgggtagtgatgctgctgatcggcctgctggcagggaccctggccggagtcattgatctggctgttgattggatgaccgacctgaaagagggggtgtgtctcagcgccttttggtactcccatgaacagtgttgttggacgtccaacgaaaccacctttgaggaccgcgataaatgccctttatggcagaagtggtctgagttactggttaaccagagtgaagttctgtctgcagccgcagctgcttag

SEQ ID NO: 121451 - DNA, 2190 bp, Artificial Sequence
  derived and/or modified sequence
atggtcaatgccggagccatgagtgggtcgggtaaccttatggatttcttggacgaaccgttccccgatgtgggcacctacgaggattttcacacgatcgattggcttagggaaaaaagcagggacaccgaccgacatagaaaaatcacttcaaaatccaaggagtccatttgggaatttataaagagtctcctggatgcttggagtgggtgggttgttatgctgcttattggtctgctggccggaacattggcaggcgttatcgatctggctgtggactggatgactgacctgaaagagggggtttgtctttctgccttttggtatagccacgaacagtgctgctggacgtccaacgaaacgacatttgaagaccgggataagtgccctctgtggcagaagtggtctgaactgctcgtaaatcagtccgaaggtgcttctgcgtacattctgaactaccttatgtatattctttgggccctcctgttcgcatttttggcggtgtccctggtgagagtgttcgctccttatgcctgtggctcaggaataccagagatcaagaccattctctccggcttcatcatccgcggttacctgggtaagtggaccctcctcataaaaacggtgactcttgtgctggtcgtgagcagcggcctgtccctaggtaaggaagggcctctggtgcatgtggcttgttgttgcggaaacttcttctcgtcacttttttcaaaatattcaaagaatgaggggaagaggcgagaagtcttatccgccgcagcagccgctggagtctctgtagcctttggggcacccatcggaggcgttttgttttctctggaggaagtgtcctattattttcctctgaagacgctgtggagatctttcttcgccgctttagtggctgcatttaccctgcgaagcattaacccatttggaaattctcgtctggtccttttctatgtggagtaccacacaccttggcgccgaaagaccacaaggttggggaaataccccgttcttgaggtgatagtggtgaccgctattaccgcaatcattgcttaccccaatccctacacaaggcagtctacttccgagctcattagcgagttgtttaacgattgcggtgccctcgagtctagccaactttgcgactatatcaacgacccaaacatgacaagaccggtagacgacatccctgaccgcccagcaggtgtgggcgtgtacactgcaatgtggcagctggctcttgctttaatctttaaaattgtcgttaccatctttacattcggcatgaaaatcccatccggactttttatcccatctatggccgtgggcgctatagcaggcagaatggttggaattggagtggaacagctggcctatcaccaccatgattggatcatttttagaaattggtgccgtccaggagccgactgcgtaacccccggactctacgcaatggtaggtgccgctgcttgtctgggtggggtgactagaatgactgtgtccctagtggtgatcatgtttgaactcacaggtggcctcgagtacatcgttcctctaatggctgctgctgtaaccagcaaatgggtggccgatgccttcggtaaggagggcatctatgaggcccatatccatctgaatggttacccttttttggacgtgaaagatgagttcacccaccgcacactggcaactgatgtgatgcgtcctagacgaggggaacctccgctgtctgtgctaacacaggacagcatgacagttgaggatgtagagacactgattaaggaaaccgattacaacggcttccccgttgttgtgtcccgagatagtgaaaggctgatcggattcgcacagcgaagagagcttatcctggccatcaaaaacgctcggcagagacaggaaggcatcgtgagcaacagcattatgtatttcaccgaggaaccacccgagcttcccgctaactccccccatcccctgaagttgcgtaggatcctgaatctgtcccccttcacagtgactgatcataccccaatggagacagtcgtggacatcttccgtaaattaggcctgcgccagtgtctcgtgacacggtccgggcgactgttggggatcattaccaaaaaggatgtgctccgtcacatggcacagatggctaatcaggaccctgaatcgatcatgttcaactag

SEQ ID NO: 121452 - DNA, 2283 bp, Artificial Sequence
  derived and/or modified sequence
atggtaaacgccggagccatgtcagggagcgggaatctgatggacttcctggacgagccattcccagacgtcggcacctacgaggacttccatacaattgactggcttagagagaaaagtagggacactgacaggcaccgcaagattacttccaagtccaaagagagcatctgggagttcattaaatctcttttagacgcctggagcggctgggtcgtcatgctgctcattggcttgttggcaggaaccttggccggagtaattgatctcgcggtcgactggatgactgatctgaaagaaggcgtttgcctatccgccttctggtactcccacgagcagtgttgttggaccagtaacgagacaaccttcgaggaccgcgacaagtgcccgctgtggcaaaagtggtctgaactgctggttaatcagtccgaaggcgcatccgcttatatcttgaattatcttatgtatattctatgggctttgctcttcgcctttctggcagtgagcctcgtgagagtgttcgctccttacgcatgtggttcgggtatccctgaaatcaaaactattctgagtggttttatcatccggggatatctaggaaagtggaccctcttgattaaaacggttacactcgtgctagttgtcagcagcggcctgtcccttggcaaggaagggccactcgttcacgtcgcctgttgctgtgggaacttcttctccagtctgttttccaagtactctaagaacgagggtaaaaggcgcgaagtgctgagcgcggcagccgcagctggtgtcagcgtcgccttcggtgccccaatcgggggagttttattcagtctagaggaagtgtcatactactttcctctcaagacgctgtggaggtcttttttcgccgctctggttgcagcgtttaccctgagaagtatcaaccctttcggcaactcgcggcttgtgctcttctatgttgagtatcacaccccctggtacatggccgaactattcccgtttatactccttggcgtgtttgggggtctttgggggactctgtttatcagatgtaacattgcctggtgccgtcgtcgtaaaaccaccagactgggtaaatatccagtgctggaagtgatcgtggtgaccgcaataacagcaatcatcgcctatccaaatccatatacacggcagtctacatccgagctgatcagtgaactgtttaacgattgtggagccctggagagctcacaactttgcgactatatcaatgatcctaacatgacgaggcctgtcgacgatattcctgacaggcctgccggtgtcggagtgtacactgcaatgtggcagcttgccctagccctcatctttaagatcgtcgtgactatattcacgtttggtatgaagatcccaagtgggctcttcataccttctatggctgtcggcgctatcgccggacgaatggtgggaatcggtgtggaacaacttgcgtatcatcaccacgattggattattttcaggaattggtgtcgccctggcgctgattgtgtgacaccaggactctatgctatggtcggcgcagccgcatgcctgggaggagtgacgagaatgaccgtatctctcgtggtaattatgttcgaactgaccggtggacttgagtacattgtgcctctcatggcagcagctgtcacttctaagtgggtggctgatgccttcgggaaggaaggcatctatgaagcacatatacatttgaacggatatcccttcctcgatgttaaagacgaatttacacatcgtaccttagcaaccgatgtcatgcgtccccgacggggtgagcctccactcagcgttctgacacaggactccatgacagtagaagatgttgagacactgatcaaagaaaccgactataacggattccctgtggtggtctccagggattccgagaggttgattgggtttgcccagaggcgggagcttattctcgcaatcaagaatgccagacagaggcaagagggcattgtgtctaactctattatgtattttactgaggaaccccctgaattgcccgcaaatagcccacacccgcttaagctcaggagaatccttaacctgagtccatttaccgttactgaccataccccgatggagaccgtcgtcgatatcttcagaaagctgggcctgcgacagtgtctcgtgaccagatcgggaaggctgctggggataatcactaagaaagacgtcttgcggcatatggctcagatggcaaaccaggatcctgagtccatcatgttcaattag

SEQ ID NO: 121453 - DNA, 2001 bp, Artificial Sequence
  derived and/or modified sequence
atgactgacctaaaagagggagtgtgtctgagcgctttttggtacagccacgaacaatgttgctggacttctaacgaaactacatttgaagaccgcgacaaatgtccactgtggcaaaagtggagtgaactgctcgtgaaccagtcagaaggggcaagcgcttatatcctgaattatttgatgtacattctgtgggcgctgctctttgcatttctggccgtcagtcttgttagagtgttcgcgccttacgcgtgtggcagtggcattccagagattaagaccatcctctctgggttcattattcgcggatatctgggaaagtggacactgctgatcaaaacagttaccctcgttctcgtagtgagctctggcctctctctggggaaggaggggccactggttcacgtagcctgttgctgcggaaattttttctccagtctgtttagtaagtatagcaaaaatgaaggcaaaagacgtgaggttttgtccgccgctgccgcagccggtgtatctgtcgctttcggtgcgcctatcggcggagttctttttagccttgaagaagtatcctattactttcctcttaagaccttatggagatctttctttgctgccctggtcgcagcattcacactgcgaagtattaaccccttcggaaatagccggctggtgctgttctatgtggagtaccatacaccctggtatatggcagagctgttcccattcatcctcctcggcgtcttcgggggattatggggtaccctgttcatccgctgcaatatcgcctggtgccgcaggagaaagacaacccggttagggaagtatccagtcctggaggttatcgttgtgacagccatcactgccattatcgcttacccaaatccttacacccgacaaagtaccagtgagctaatctctgaactgttcaacgattgcggagctcttgaatcgtctcaactctgcgattacattaacgatcctaacatgactaggcccgtggatgacatcccagaccggcctgccggtgtgggagtgtacaccgctatgtggcagcttgctctcgctcttatttttaagatcgttgtcaccatatttactttcggaatgaaaattccttctgggctcttcattccctccatggcggttggtgccatcgcaggtcggatggtggggatcggggtagagcagctggcctaccatcatcacgactggatcatctttcggaattggtgtcgcccaggagccgactgcgtgacaccaggattgtatgctatggtgggcgctgcagcgtgcttaggcggagtaaccagaatgaccgtgtcactggtggtcatcatgtttgaattaactgggggactggaatatatcgttcctttaatggcggcagccgttacaagcaagtgggtcgctgatgcttttggcaaagaaggaatttacgaagcacacattcacttgaatggatatcccttcctggacgtgaaggacgagtttacccatcggacactggccaccgacgtgatgcggccacggcgaggggagcctcctttgagcgtcttgacacaggacagcatgactgtggaagatgtcgagactttgataaaagaaactgactacaatggcttcccagttgtggtgtctcgcgactccgaacgacttatcggctttgctcaacggcgtgaactgattctggccataaaaaacgccagacagcgacaggaggggatcgtcagtaactcgataatgtatttcactgaggagcccccagagctgccagccaacagtccacacccattaaagctccgcagaattctgaacttatcccctttcacagtgaccgaccatacgcccatggaaacagtcgttgacattttccggaagctgggcctcagacaatgcctggtaaccagaagtggcaggctgttgggaattatcacgaagaaggacgtccttcgtcatatggcgcagatggctaatcaggatcccgaatcaatcatgttcaactag

SEQ ID NO: 121454 - DNA, 459 bp, Artificial Sequence
  derived and/or modified sequence
atggtgaacgccggagcaatgagtgggtcgggcaacctaatggattttctggacgaaccctttccagacgttggtacttacgaggatttccatactatcgattggttgcgagagaagtcccgcgacaccgacagacacaggaagatcacaagcaaatctaaagaatctatttgggagttcatcaaaagcttgctggatgcctggtcgggctgggtggttatgctgctgatcggccttctggctgggactctcgcaggggtcattgaccttgccgtagattggatgacagatttaaaggaaggcgtctgtttgtcagcattctggtactcccacgaacagtgctgttggacctcaaatgagacaaccttcgaggacagggacaaatgcccactctggcagaagtggtccgagctactggtcaaccagtctgaagtgctctctgccgcagccgctgcttag

SEQ ID NO: 121455 - DNA, 2418 bp, Artificial Sequence
  derived and/or modified sequence
ccgcctcctggtgatgtcacggcgctcgcagccgtcgcgctgaagaaaggatgctcgaggatgctgtccaggtgggcggccgcgggcgcgatgcggcactgcaggtgtaattagcatggtcaatgcgggagcgatgagtggctctggaaacctgatggatttcctcgatgagccgttccctgatgtggggacgtatgaggacttccacaccatcgactggctaagggaaaagtcacgggacaccgacagacacaggaagatcaccagcaagagcaaggagtccatatgggagttcatcaagagcctgctggatgcctggtcgggatgggtggtgatgctgctcatcggcctgctggcgggcaccttggctggggtcatcgatctcgccgtggactggatgacggacctgaaggagggggtctgcctgtctgccttctggtatagccatgagcagtgttgctggacttctaacgagaccacttttgaggacagagacaagtgtcccctgtggcagaaatggtcggagctgctggtgaatcagtcagagggtgccagtgcttacattctgaattacttaatgtacatcctatgggcgctgctgtttgcatttttggctgtctccctggtgcgtgtatttgcaccatatgcctgtggctctggcataccagagataaagaccattttgagcggctttatcatcaggggctacttggggaagtggaccctgctaatcaagacagtcacgctggtgctggtagtgtcctccggtctgagccttgggaaggaagggccgctagtgcacgtggcttgttgctgtggcaacttcttcagcagccttttctccaagtacagcaagaatgagggcaagaggcgggaggtgctttcagctgcagcggctgctggagtctctgttgcctttggtgcaccaattggaggcgtgcttttcagtctagaagaggtcagttactactttcccctgaagaccttgtggaggtcatttttcgcagccctggtggcggcctttacgctgagatccatcaatccctttgggaatagccgtctcgttctcttttatgtggaataccacacgccctggaggcgcaagaccaccaggctggggaagtacccggtgctggaggtcattgtggtgactgccatcactgccatcattgcctaccccaatccctacacacgccagagcaccagcgagctcatttctgagctgttcaatgactgtggagcccttgagtcttcccagctctgtgactacatcaatgaccccaacatgactcggcctgtggatgacattccagaccggccggctggtgtcggtgtttacacggccatgtggcagctggccctggcactgatcttcaaaatcgtcgttaccatatttacctttggcatgaagatcccgtcgggcctcttcatccccagcatggctgtgggcgcgatagcgggcaggatggtgggaattggcgtggagcagctggcctaccatcaccatgactggatcatcttcaggaactggtgcagacccggtgcagactgtgtcacgccagggctgtacgcaatggtgggagctgcggcctgcctcggtggagttaccaggatgacggtgtcattggtggtcatcatgtttgaattaaccgggggtctggagtacatcgtgcccctgatggcggcggctgtgaccagcaagtgggtagctgatgcatttgggaaagaaggcatctacgaggcccacatccacttaaatgggtaccctttccttgacgtgaaggacgagtttactcaccgcacactggccaccgacgtcatgcggccccggcggggagagccgccactgtcggtgctcacccaggacagcatgactgtcgaggacgtggagacgctcatcaaggagaccgactacaacggcttccccgtggtggtctccagagactccgagcgcctcattggatttgcccagaggagggaactgattctcgcaataaagaacgccagacagaggcaggagggcattgtgagcaattccatcatgtacttcacggaggaaccccccgagctgccggccaacagcccacatcccctgaagctgcggcgcatcctgaacctcagcccgtttacagtgacagaccacactccgatggaaacggtggtggatatcttccggaaactggggcttcggcagtgcctggtgacgcggagcgggagacttcttggcatcatcacaaaaaaggatgttctgagacatatggcccagatggcaaaccaggaccccgaatccatcatgtttaattagcaacaaggtggcaattattttcagaaaaacactgactgtgtcatttaaaaagaaataaatgatatgttattatcccaatgaaagatcatgcattggggacagcagaaacaaaa

SEQ ID NO: 121456 - DNA, 6750 bp, Artificial Sequence
  derived and/or modified sequence
atttgcctctggcaggaaaatgagcttgtcagtttctgcctccattagaccctcaacccaaaggagcaggagatttcggtagcgttttaactttatctcagaatctgaaagcggaaggccaggcaagctgcacacatcaagcgaaacgcctgaggggcggccagcgcgagggtttctggccatcgaccctcacctcccgggacttccagggtcttccccccaccccgcgcacacctccctgcctcgccccgagggcgtcacgtggcagcgtggggcccgcctcctggtgatgtcacggcgctcgcagccgtcgcgctgaagaaaggatgctcgaggatgctgtccaggtgggcggccgcgggcgcgatgcggcactgcaggtgtaattagcatggtcaatgcgggagcgatgagtggctctggaaacctgatggatttcctcgatgagccgttccctgatgtggggacgtatgaggacttccacaccatcgactggctaagggaaaagtcacgggacaccgacagacacaggaagatcaccagcaagagcaaggagtccatatgggagttcatcaagagcctgctggatgcctggtcgggatgggtggtgatgctgctcatcggcctgctggcgggcaccttggctggggtcatcgatctcgccgtggactggatgacggacctgaaggagggggtctgcctgtctgccttctggtatagccatgagcagtgttgctggacttctaacgagaccacttttgaggacagagacaagtgtcccctgtggcagaaatggtcggagctgctggtgaatcagtcagagggtgccagtgcttacattctgaattacttaatgtacatcctatgggcgctgctgtttgcatttttggctgtctccctggtgcgtgtatttgcaccatatgcctgtggctctggcataccagagataaagaccattttgagcggctttatcatcaggggctacttggggaagtggaccctgctaatcaagacagtcacgctggtgctggtagtgtcctccggtctgagccttgggaaggaagggccgctagtgcacgtggcttgttgctgtggcaacttcttcagcagccttttctccaagtacagcaagaatgagggcaagaggcgggaggtgctttcagctgcagcggctgctggagtctctgttgcctttggtgcaccaattggaggcgtgcttttcagtctagaagaggtcagttactactttcccctgaagaccttgtggaggtcatttttcgcagccctggtggcggcctttacgctgagatccatcaatccctttgggaatagccgtctcgttctcttttatgtggaataccacacgccctggtacatggctgaactcttccccttcatcctgcttggggtcttcgggggcttgtggggaaccctcttcatccgctgcaacatcgcctggtgcaggaggcgcaagaccaccaggctggggaagtacccggtgctggaggtcattgtggtgactgccatcactgccatcattgcctaccccaatccctacacacgccagagcaccagcgagctcatttctgagctgttcaatgactgtggagcccttgagtcttcccagctctgtgactacatcaatgaccccaacatgactcggcctgtggatgacattccagaccggccggctggtgtcggtgtttacacggccatgtggcagctggccctggcactgatcttcaaaatcgtcgttaccatatttacctttggcatgaagatcccgtcgggcctcttcatccccagcatggctgtgggcgcgatagcgggcaggatggtgggaattggcgtggagcagctggcctaccatcaccatgactggatcatcttcaggaactggtgcagacccggtgcagactgtgtcacgccagggctgtacgcaatggtgggagctgcggcctgcctcggtggagttaccaggatgacggtgtcattggtggtcatcatgtttgaattaaccgggggtctggagtacatcgtgcccctgatggcggcggctgtgaccagcaagtgggtagctgatgcatttgggaaagaaggcatctacgaggcccacatccacttaaatgggtaccctttccttgacgtgaaggacgagtttactcaccgcacactggccaccgacgtcatgcggccccggcggggagagccgccactgtcggtgctcacccaggacagcatgactgtcgaggacgtggagacgctcatcaaggagaccgactacaacggcttccccgtggtggtctccagagactccgagcgcctcattggatttgcccagaggagggaactgattctcgcaataaagaacgccagacagaggcaggagggcattgtgagcaattccatcatgtacttcacggaggaaccccccgagctgccggccaacagcccacatcccctgaagctgcggcgcatcctgaacctcagcccgtttacagtgacagaccacactccgatggaaacggtggtggatatcttccggaaactggggcttcggcagtgcctggtgacgcggagcgggagacttcttggcatcatcacaaaaaaggatgttctgagacatatggcccagatggcaaaccaggaccccgaatccatcatgtttaattagcaacaaggtggcaattattttcagaaaaacactgactgtgtcatttaaaaagaaataaatgatatgttattatcccaatgaaagatcatgcattggggacagcagaaacaaaagcttttttggaaaggcggggaagaaggatgaaacctttaaaaacaaaaacaaaaacatcaatgagtaggcattttatagctttaaccccgtatgagtttcaagctgtgtttcctaatgagtttgctactgctgtgggggcatgtgggtgggtaaatgatgtaaatgatgtgatctgtacaagtatgtggagcatgaatgctgactcaagaaacttttactccttctgctcaaggctgatgtttgtaacttatgaacacacgtgaagtgttgagtccaaaagacaaaggggcatcggcatgtcagcgtccttatttattggttcttgaagttttgctgctatgttactgaatcatactaaagacatttgcgcttactttgttgaaaaagaaaaagaaattaaatttgaacacagtgaaagctgcaagtatgccagtgggtccgctcacgaccgtcctgtttcttgctcctgttctcagcctgttatctggcttatccatcagtttctgaaccaacatcaggggcacctgccatgatgagtgtgaagaaatcatttctctatgcaagactggcatcctgggactgcacgatgaactattggagcatacagtactgcggtgtgtctcctcccatacaaagggacacatccttattttgagggtatactcacccgatcattgatttgcatccccatggcatttgcttcatttatttattgcttttgcccatgcattcaatattgatcagctcagcacttccatgggccatagccggtatgcccccagcctgccataagcgtgctttcattttcaagtagcatatgcaagagtccaaacaggctacccaatgttactacttatttttcctctcaggtcttatcagatacggctgtggagaggatgaggcatatgcgttgtcagttggaatccctccaaatggattgcaagagaaatactaaattgattctaaatctgttccattatcttctctgtaggatgcaaaacatccagttgtaatgtataagcatgcacttcatactagcaatcacagcacaggaggacagcattaaattttatatagccaatttgggcactgggcatctttgtatttgaacttaacgacacatttactcttttagtcaggatttcggtcttttctgcgggaaggaattaagctatgtattaggtccaccatacgatctgtgtaagtaagattatcccacttgccctttctctttagtctttgtcccttccttttcactaagtgcccctcatccttttcaatctcattgtcactggatagtgctgtatcacttaggtgtgcattcggctgcaaataacagaaaacccagcaaacactgaagggctggataagaaccctgagagggggtactccaggactgtctccataacatcattgggatccccatcccgttgctatttctttttcaccgtttttaccttttgtcctctggcttattgcctcagagttgcaagatggttcctgaactgtcaggtatcatgtctgctttctaagtgggaagaggaagggagaggcaagcaactaggtacaatgtctatcaggaaagcaaagcttccccagagacgctcagcttgtatccattgactggaagtctgtcacgtggctccccctagccgcacactagtgtgggaaggaaaatattgagctaggcacattactctctgaacgaaattcatattatcttattaaggaagagtgttggtcttcaggaggggaagtttgctgtattggatgccatcatcgtgtccttgtcattgcccttccggttttcattcttgctaaacccctgtgaatgttcttctaaccttcctgttccccaccccttttctcagatttgacctagaattcccagcccaaatccataatttcttagctctaatacgaattttcatgttggacaaaaacctagctacaaatgggtttctatggaacttctaattaatgtgcaaaatacatattttctccaggttaagaaattttaagtcagatcatgctgacacaataagaaaatttgtttgtgtaattcattgacctcttccttccaaaataacatcaagtagccacctcagtgtgacaatatccagtcaatagtagagaatttaatccttggtcctataaaagaataaaattcattgtcgtatttatagcacgtaagccttgagtaacaggtcttaatgttagtgttggtgttgtggtttctgcggaacgtttacaagtgaagttggattctcctgggctttaaatccaaaaagtcttaatgaccgcttcatgtagttcccctcttattcccctgtggtctcctcagagccagcgtgtgctgggaaagagtattagtcatagcctggctttatagaatccaggaggtccttttagctgaaacaagtggcttcaaaagggaacatgaaacagtgaaaagatagccaaaggtcagtgaaaccacagcatttctttctaatctggctgaggccatgggggggaatgaggggaaattatgcttccgggccaaggtcaccgagggggaccttgggatttgtgtcctccccagtgcttagagtagagatacctgcaaattcatggcaaacagttggaagagttacttgactgaaacaacccaatcttactttctttcgtaagttgaacctctgatttattgtggggttcaggctctcctcaatagaaggccagagttggacaggtggactaaggtcaaggatgaggagtctgcagtggggactaccacagcaaactgccttccttccgtggagtcctaactcagccatgtggtccactcacccaggggcccgggggctcagacaaaccccatggggaacatgctgccatgctctgtctttcttgtaaacgtagttgggtagggatcccaagggtatttgctctctccaaatgcagaacttccatccactttatctggtgatctgatgaacagcatggggacgtggaggtgaaataagcatctttcagaataaggtttttttttttttcctcttccagaaccaaaggctttagacatttgtagaactttctggattccttctgaatcgggttttaacataaaaaaccatcaacacatcatgggaaaggagctctttcatgatatacatcacatgtttcttgctctcactgaggaaatgtgttgtacaaaagcaccaaataagggcaccctggaagtgacatgtgtgtttcttctaagtcgtttttagtgcatcccctgcgattgcatgatgctcatgtggcttttagggaaaggcagaatgtgctagaagtcgaagtcattcaatattcagtgcttactgttactttgaaccaggtaatctcagttctttattcagtccttcccaaagaccttacaaaggagatgtgtaaactgatagattttgagcctaataagtcacagaaatggaaaattttagagcagtttgtttcacttaggtgagaactgattactttaaattaccaacatgtgcaaattctacttagtattcattattagatgctaagctggaaaagatgagaaacccaaggagaactattgaattaccacataattgtaatattatgctttaattttgtatgggcagtgttctatcagactaagcttctagcctttgaaatgatttacatgaggagagagcctgtatatctgacttgggaaacattaagcagaccctattttcactggcgcggtaataactatttatttgctatcctagaggtgctgggaatgagcctacgtgcgactttgatgagatatattcacatttggtgttggaacgaccacatagcaacgtgttggtttttttttattgtaacactctgtgtaaacgttgacaccttattaaatattaaatgtctgaactctatttttaaaaataaaacaagcacagagtctgcaacaaacatgtaaa

SEQ ID NO: 121457 - DNA, 2227 bp, Artificial Sequence
  derived and/or modified sequence
gctcgaggatgctgtccaggtgggcggccgcgggcgcgatgcggcactgcaggcaccttggctggggtcatcgatctcgccgtggactggatgacggacctgaaggagggggtctgcctgtctgccttctggtatagccatgagcagtgttgctggacttctaacgagaccacttttgaggacagagacaagtgtcccctgtggcagaaatggtcggagctgctggtgaatcagtcagagggtgccagtgcttacattctgaattacttaatgtacatcctatgggcgctgctgtttgcatttttggctgtctccctggtgcgtgtatttgcaccatatgcctgtggctctggcataccagagataaagaccattttgagcggctttatcatcaggggctacttggggaagtggaccctgctaatcaagacagtcacgctggtgctggtagtgtcctccggtctgagccttgggaaggaagggccgctagtgcacgtggcttgttgctgtggcaacttcttcagcagccttttctccaagtacagcaagaatgagggcaagaggcgggaggtgctttcagctgcagcggctgctggagtctctgttgcctttggtgcaccaattggaggcgtgcttttcagtctagaagaggtcagttactactttcccctgaagaccttgtggaggtcatttttcgcagccctggtggcggcctttacgctgagatccatcaatccctttgggaatagccgtctcgttctcttttatgtggaataccacacgccctggtacatggctgaactcttccccttcatcctgcttggggtcttcgggggcttgtggggaaccctcttcatccgctgcaacatcgcctggtgcaggaggcgcaagaccaccaggctggggaagtacccggtgctggaggtcattgtggtgactgccatcactgccatcattgcctaccccaatccctacacacgccagagcaccagcgagctcatttctgagctgttcaatgactgtggagcccttgagtcttcccagctctgtgactacatcaatgaccccaacatgactcggcctgtggatgacattccagaccggccggctggtgtcggtgtttacacggccatgtggcagctggccctggcactgatcttcaaaatcgtcgttaccatatttacctttggcatgaagatcccgtcgggcctcttcatccccagcatggctgtgggcgcgatagcgggcaggatggtgggaattggcgtggagcagctggcctaccatcaccatgactggatcatcttcaggaactggtgcagacccggtgcagactgtgtcacgccagggctgtacgcaatggtgggagctgcggcctgcctcggtggagttaccaggatgacggtgtcattggtggtcatcatgtttgaattaaccgggggtctggagtacatcgtgcccctgatggcggcggctgtgaccagcaagtgggtagctgatgcatttgggaaagaaggcatctacgaggcccacatccacttaaatgggtaccctttccttgacgtgaaggacgagtttactcaccgcacactggccaccgacgtcatgcggccccggcggggagagccgccactgtcggtgctcacccaggacagcatgactgtcgaggacgtggagacgctcatcaaggagaccgactacaacggcttccccgtggtggtctccagagactccgagcgcctcattggatttgcccagaggagggaactgattctcgcaataaagaacgccagacagaggcaggagggcattgtgagcaattccatcatgtacttcacggaggaaccccccgagctgccggccaacagcccacatcccctgaagctgcggcgcatcctgaacctcagcccgtttacagtgacagaccacactccgatggaaacggtggtggatatcttccggaaactggggcttcggcagtgcctggtgacgcggagcgggagacttcttggcatcatcacaaaaaaggatgttctgagacatatggcccagatggcaaaccaggaccccgaatccatcatgtttaattagcaacaaggtggcaattattttcagaaaaacactgactgtgtcatttaaaaagaaataaatgatatgttattatcccaatgaaagatcatgcattggggacagcagaaacaaaagcttttttggaaaggcggggaag

SEQ ID NO: 121458 - DNA, 487 bp, Artificial Sequence
  derived and/or modified sequence
ggcgcgatgcggcactgcaggtgtaattagcatggtcaatgcgggagcgatgagtggctctggaaacctgatggatttcctcgatgagccgttccctgatgtggggacgtatgaggacttccacaccatcgactggctaagggaaaagtcacgggacaccgacagacacaggaagatcaccagcaagagcaaggagtccatatgggagttcatcaagagcctgctggatgcctggtcgggatgggtggtgatgctgctcatcggcctgctggcgggcaccttggctggggtcatcgatctcgccgtggactggatgacggacctgaaggagggggtctgcctgtctgccttctggtatagccatgagcagtgttgctggacttctaacgagaccacttttgaggacagagacaagtgtcccctgtggcagaaatggtcggagctgctggtgaatcagtcagaggtgctttcagctgcagcggctgct

SEQ ID NO: 121459 - DNA, 2190 bp, Artificial Sequence
  derived and/or modified sequence
atggtgaacgccggcgccatgagcggcagcggcaacctgatggacttcctggacgagcccttccccgacgtgggcacctacgaggacttccacaccatcgactggctgagagagaagagcagagacaccgacagacacagaaagatcaccagcaagagcaaggagagcatctgggagttcatcaagagcctgctggacgcctggagcggctgggtggtgatgctgctgatcggcctgctggccggcaccctggccggcgtgatcgacctggccgtggactggatgaccgacctgaaggagggcgtgtgcctgagcgccttctggtacagccacgagcagtgctgctggaccagcaacgagaccaccttcgaggacagagacaagtgccccctgtggcagaagtggagcgagctgctggtgaaccagagcgagggcgccagcgcctacatcctgaactacctgatgtacatcctgtgggccctgctgttcgccttcctggccgtgagcctggtgagagtgttcgccccctacgcctgcggcagcggcatccccgagatcaagaccatcctgagcggcttcatcatcagaggctacctgggcaagtggaccctgctgatcaagaccgtgaccctggtgctggtggtgagcagcggcctgagcctgggcaaggagggccccctggtgcacgtggcctgctgctgcggcaacttcttcagcagcctgttcagcaagtacagcaagaacgagggcaagagaagagaggtgctgagcgccgccgccgccgccggcgtgagcgtggccttcggcgcccccatcggcggcgtgctgttcagcctggaggaggtgagctactacttccccctgaagaccctgtggagaagcttcttcgccgccctggtggccgccttcaccctgagaagcatcaaccccttcggcaacagcagactggtgctgttctacgtggagtaccacaccccctggagaagaaagaccaccagactgggcaagtaccccgtgctggaggtgatcgtggtgaccgccatcaccgccatcatcgcctaccccaacccctacaccagacagagcaccagcgagctgatcagcgagctgttcaacgactgcggcgccctggagagcagccagctgtgcgactacatcaacgaccccaacatgaccagacccgtggacgacatccccgacagacccgccggcgtgggcgtgtacaccgccatgtggcagctggccctggccctgatcttcaagatcgtggtgaccatcttcaccttcggcatgaagatccccagcggcctgttcatccccagcatggccgtgggcgccatcgccggcagaatggtgggcatcggcgtggagcagctggcctaccaccaccacgactggatcatcttcagaaactggtgcagacccggcgccgactgcgtgacccccggcctgtacgccatggtgggcgccgccgcctgcctgggcggcgtgaccagaatgaccgtgagcctggtggtgatcatgttcgagctgaccggcggcctggagtacatcgtgcccctgatggccgccgccgtgaccagcaagtgggtggccgacgccttcggcaaggagggcatctacgaggcccacatccacctgaacggctaccccttcctggacgtgaaggacgagttcacccacagaaccctggccaccgacgtgatgagacccagaagaggcgagccccccctgagcgtgctgacccaggacagcatgaccgtggaggacgtggagaccctgatcaaggagaccgactacaacggcttccccgtggtggtgagcagagacagcgagagactgatcggcttcgcccagagaagagagctgatcctggccatcaagaacgccagacagagacaggagggcatcgtgagcaacagcatcatgtacttcaccgaggagccccccgagctgcccgccaacagcccccaccccctgaagctgagaagaatcctgaacctgagccccttcaccgtgaccgaccacacccccatggagaccgtggtggacatcttcagaaagctgggcctgagacagtgcctggtgaccagaagcggcagactgctgggcatcatcaccaagaaggacgtgctgagacacatggcccagatggccaaccaggaccccgagagcatcatgttcaactag

SEQ ID NO: 121460 - DNA, 2283 bp, Artificial Sequence
  derived and/or modified sequence
atggtgaacgccggcgccatgagcggcagcggcaacctgatggacttcctggacgagcccttccccgacgtgggcacctacgaggacttccacaccatcgactggctgagagagaagagcagagacaccgacagacacagaaagatcaccagcaagagcaaggagagcatctgggagttcatcaagagcctgctggacgcctggagcggctgggtggtgatgctgctgatcggcctgctggccggcaccctggccggcgtgatcgacctggccgtggactggatgaccgacctgaaggagggcgtgtgcctgagcgccttctggtacagccacgagcagtgctgctggaccagcaacgagaccaccttcgaggacagagacaagtgccccctgtggcagaagtggagcgagctgctggtgaaccagagcgagggcgccagcgcctacatcctgaactacctgatgtacatcctgtgggccctgctgttcgccttcctggccgtgagcctggtgagagtgttcgccccctacgcctgcggcagcggcatccccgagatcaagaccatcctgagcggcttcatcatcagaggctacctgggcaagtggaccctgctgatcaagaccgtgaccctggtgctggtggtgagcagcggcctgagcctgggcaaggagggccccctggtgcacgtggcctgctgctgcggcaacttcttcagcagcctgttcagcaagtacagcaagaacgagggcaagagaagagaggtgctgagcgccgccgccgccgccggcgtgagcgtggccttcggcgcccccatcggcggcgtgctgttcagcctggaggaggtgagctactacttccccctgaagaccctgtggagaagcttcttcgccgccctggtggccgccttcaccctgagaagcatcaaccccttcggcaacagcagactggtgctgttctacgtggagtaccacaccccctggtacatggccgagctgttccccttcatcctgctgggcgtgttcggcggcctgtggggcaccctgttcatcagatgcaacatcgcctggtgcagaagaagaaagaccaccagactgggcaagtaccccgtgctggaggtgatcgtggtgaccgccatcaccgccatcatcgcctaccccaacccctacaccagacagagcaccagcgagctgatcagcgagctgttcaacgactgcggcgccctggagagcagccagctgtgcgactacatcaacgaccccaacatgaccagacccgtggacgacatccccgacagacccgccggcgtgggcgtgtacaccgccatgtggcagctggccctggccctgatcttcaagatcgtggtgaccatcttcaccttcggcatgaagatccccagcggcctgttcatccccagcatggccgtgggcgccatcgccggcagaatggtgggcatcggcgtggagcagctggcctaccaccaccacgactggatcatcttcagaaactggtgcagacccggcgccgactgcgtgacccccggcctgtacgccatggtgggcgccgccgcctgcctgggcggcgtgaccagaatgaccgtgagcctggtggtgatcatgttcgagctgaccggcggcctggagtacatcgtgcccctgatggccgccgccgtgaccagcaagtgggtggccgacgccttcggcaaggagggcatctacgaggcccacatccacctgaacggctaccccttcctggacgtgaaggacgagttcacccacagaaccctggccaccgacgtgatgagacccagaagaggcgagccccccctgagcgtgctgacccaggacagcatgaccgtggaggacgtggagaccctgatcaaggagaccgactacaacggcttccccgtggtggtgagcagagacagcgagagactgatcggcttcgcccagagaagagagctgatcctggccatcaagaacgccagacagagacaggagggcatcgtgagcaacagcatcatgtacttcaccgaggagccccccgagctgcccgccaacagcccccaccccctgaagctgagaagaatcctgaacctgagccccttcaccgtgaccgaccacacccccatggagaccgtggtggacatcttcagaaagctgggcctgagacagtgcctggtgaccagaagcggcagactgctgggcatcatcaccaagaaggacgtgctgagacacatggcccagatggccaaccaggaccccgagagcatcatgttcaactag

SEQ ID NO: 121461 - DNA, 2001 bp, Artificial Sequence
  derived and/or modified sequence
atgaccgacctgaaggagggcgtgtgcctgagcgccttctggtacagccacgagcagtgctgctggaccagcaacgagaccaccttcgaggacagagacaagtgccccctgtggcagaagtggagcgagctgctggtgaaccagagcgagggcgccagcgcctacatcctgaactacctgatgtacatcctgtgggccctgctgttcgccttcctggccgtgagcctggtgagagtgttcgccccctacgcctgcggcagcggcatccccgagatcaagaccatcctgagcggcttcatcatcagaggctacctgggcaagtggaccctgctgatcaagaccgtgaccctggtgctggtggtgagcagcggcctgagcctgggcaaggagggccccctggtgcacgtggcctgctgctgcggcaacttcttcagcagcctgttcagcaagtacagcaagaacgagggcaagagaagagaggtgctgagcgccgccgccgccgccggcgtgagcgtggccttcggcgcccccatcggcggcgtgctgttcagcctggaggaggtgagctactacttccccctgaagaccctgtggagaagcttcttcgccgccctggtggccgccttcaccctgagaagcatcaaccccttcggcaacagcagactggtgctgttctacgtggagtaccacaccccctggtacatggccgagctgttccccttcatcctgctgggcgtgttcggcggcctgtggggcaccctgttcatcagatgcaacatcgcctggtgcagaagaagaaagaccaccagactgggcaagtaccccgtgctggaggtgatcgtggtgaccgccatcaccgccatcatcgcctaccccaacccctacaccagacagagcaccagcgagctgatcagcgagctgttcaacgactgcggcgccctggagagcagccagctgtgcgactacatcaacgaccccaacatgaccagacccgtggacgacatccccgacagacccgccggcgtgggcgtgtacaccgccatgtggcagctggccctggccctgatcttcaagatcgtggtgaccatcttcaccttcggcatgaagatccccagcggcctgttcatccccagcatggccgtgggcgccatcgccggcagaatggtgggcatcggcgtggagcagctggcctaccaccaccacgactggatcatcttcagaaactggtgcagacccggcgccgactgcgtgacccccggcctgtacgccatggtgggcgccgccgcctgcctgggcggcgtgaccagaatgaccgtgagcctggtggtgatcatgttcgagctgaccggcggcctggagtacatcgtgcccctgatggccgccgccgtgaccagcaagtgggtggccgacgccttcggcaaggagggcatctacgaggcccacatccacctgaacggctaccccttcctggacgtgaaggacgagttcacccacagaaccctggccaccgacgtgatgagacccagaagaggcgagccccccctgagcgtgctgacccaggacagcatgaccgtggaggacgtggagaccctgatcaaggagaccgactacaacggcttccccgtggtggtgagcagagacagcgagagactgatcggcttcgcccagagaagagagctgatcctggccatcaagaacgccagacagagacaggagggcatcgtgagcaacagcatcatgtacttcaccgaggagccccccgagctgcccgccaacagcccccaccccctgaagctgagaagaatcctgaacctgagccccttcaccgtgaccgaccacacccccatggagaccgtggtggacatcttcagaaagctgggcctgagacagtgcctggtgaccagaagcggcagactgctgggcatcatcaccaagaaggacgtgctgagacacatggcccagatggccaaccaggaccccgagagcatcatgttcaactag

SEQ ID NO: 121462 - DNA, 459 bp, Artificial Sequence
  derived and/or modified sequence
atggtgaacgccggcgccatgagcggcagcggcaacctgatggacttcctggacgagcccttccccgacgtgggcacctacgaggacttccacaccatcgactggctgagagagaagagcagagacaccgacagacacagaaagatcaccagcaagagcaaggagagcatctgggagttcatcaagagcctgctggacgcctggagcggctgggtggtgatgctgctgatcggcctgctggccggcaccctggccggcgtgatcgacctggccgtggactggatgaccgacctgaaggagggcgtgtgcctgagcgccttctggtacagccacgagcagtgctgctggaccagcaacgagaccaccttcgaggacagagacaagtgccccctgtggcagaagtggagcgagctgctggtgaaccagagcgaggtgctgagcgccgccgccgccgcctag

SEQ ID NO: 121463 - protein, 449 aa, Artificial Sequence
  derived and/or modified sequence
MMKTLLLFVGLLLTWESGQVLGDQTVSDNELQEMSNQGSKYVNKEIQNAVNGVKQIKTLIEKTNEERKTLLSNLEEAKKKKEDALNETRESETKLKELPGVCNETMMALWEECKPCLKQTCMKFYARVCRSGSGLVGRQLEEFLNQSSPFYFWMNGDRIDSLLENDRQQTHMLDVMQDHFSRASSIIDELFQDRFFTREPQDTYHYLPFSLPHRRPHFFFPKSRIVRSLMPFSPYEPLNFHAMFQPFLEMIHEAQQAMDIHFHSPAFQHPPTEFIREGDDDRTVCREIRHNSTGCLRMKDQCDKCREILSVDCSTNNPSQAKLRRELDESLQVAERLTRKYNELLKSYQWKMLNTSSLLEQLNEQFNWVSRLANLTQGEDQYYLRVTTVASHTSDSDVPSGVTEVVVKLFDSDPITVTVPVEVSRKNPKFMETVAEKALQEYRKKHREE

SEQ ID NO: 121464 - protein, 274 aa, Artificial Sequence
  derived and/or modified sequence
MQDHFSRASSIIDELFQDRFFTREPQDTYHYLPFSLPHRRPHFFFPKSRIVRSLMPFSPYEPLNFHAMFQPFLEMIHEAQQAMDIHFHSPAFQHPPTEFIREGDDDRTVCREIRHNSTGCLRMKDQCDKCREILSVDCSTNNPSQAKLRRELDESLQVAERLTRKYNELLKSYQWKMLNTSSLLEQLNEQFNWVSRLANLTQGEDQYYLRVTTVASHTSDSDVPSGVTEVVVKLFDSDPITVTVPVEVSRKNPKFMETVAEKALQEYRKKHREE

SEQ ID NO: 121465 - protein, 271 aa, Artificial Sequence
  derived and/or modified sequence
MMKTLLLFVGLLLTWESGQVLGDQTVSDNELQEMSNQGSKYVNKEIQNAVNGVKQIKTLIEKTNEERKTLLSNLEEAKKKKEDALNETRESETKLKELPGVCNETMMALWEECKPCLKQTCMKFYARVCRSGSGLVGRQLEEFLNQSSPFYFWMNGDRIDSLLENDRQQTHMLDVMQDHFSRASSIIDELFQDSLMPFSPYEPLNFHAMFQPFLEMIHEAQQAMDIHFHSPAFQHPPTEFIREGDDDRTVCREIRHNSTGCLRMKDQCDKC

SEQ ID NO: 121466 - DNA, 1350 bp, Artificial Sequence
  derived and/or modified sequence
atgatgaaaactctgctattgtttgtcggcctcctgttaacatgggagtcaggtcaggtgttgggggatcaaaccgtctctgacaatgagcttcaggagatgtcgaatcagggcagcaaatacgttaataaggaaatccagaatgcagtaaacggggtgaaacagatcaagactctgatagagaagaccaacgaggaaagaaaaacgttgctgtcgaacctggaggaggctaagaaaaagaaggaggatgccttgaacgaaaccagggaaagtgaaacaaaacttaaggaactgcccggggtctgtaacgagaccatgatggccctctgggaagagtgcaaaccctgcctgaaacaaacttgtatgaagttctatgccagggtgtgtagatctggatctggactggtgggccgacagttggaggaatttcttaaccagagctcacctttttatttttggatgaacggggatcggattgattcactgttggagaatgaccggcagcagacacatatgctggacgtaatgcaggatcacttctcgagggccagctctattatagacgagctcttccaggaccgctttttcacacgagaaccccaggacacctaccactacctgcccttcagcctgccccatcgtaggccacattttttcttccctaaaagccggatcgtgcgctctctgatgcccttctccccctatgaaccactgaacttccacgctatgttccagccttttctggaaatgatccacgaggcacagcaggccatggatattcactttcactcccctgccttccagcatccacccaccgagtttattagagagggtgacgacgataggacagtctgcagagagatccgacataattcaacagggtgtctcagaatgaaagatcaatgcgataaatgccgggaaatactgtccgtagactgctccacaaataaccctagccaggccaaattgagacgcgaattagatgagtccctgcaagttgccgagaggcttacaaggaaatataacgaactgctaaagagctatcagtggaaaatgctcaatacgtcaagcctcctggagcagctcaatgaacagttcaactgggtcagtcgtctagccaacctgacccaaggggaagaccagtattatttaagagtgacaactgtcgcttcacacaccagtgactctgacgtcccctctggcgttacagaagtggtggtgaaattatttgactccgaccctatcacggtgaccgtgccggtggaagtgtcacgcaagaatcctaaatttatggaaacagtcgccgaaaaggccctacaagaataccggaagaaacacagagaagaatag

SEQ ID NO: 121467 - DNA, 825 bp, Artificial Sequence
  derived and/or modified sequence
atgcaggatcacttctctcgcgcatcgtctatcattgatgagctcttccaggatcggttcttcactcgtgaaccacaagatacataccactatttgccgtttagtctccctcataggaggccccactttttcttcccaaaaagcagaatcgtccgttcactcatgccctttagcccttacgaaccactgaatttccacgcaatgttccagccctttttagagatgatccatgaggctcagcaggccatggacatccactttcatagtccagctttccaacatcctcccaccgagttcatccgggagggagacgacgacagaactgtctgcagggaaatccggcacaacagcactgggtgcttgcggatgaaggaccagtgtgataaatgccgagagatcctctcagttgattgcagtaccaataacccttctcaggccaaactgcggcgtgaactcgatgaaagcttgcaagtcgctgaaagactgacacggaaatataacgagttacttaaaagctatcagtggaagatgctcaatacgtcctcactattggaacaactcaacgaacagtttaactgggtgtctagacttgcaaacctgacacagggtgaggatcagtactacctgcgggtgacaacagtggcatctcacaccagtgattccgacgtgccatccggggtaactgaagttgtcgtgaagctttttgatagtgatcctattaccgtgaccgtccctgtggaggtgtctcggaagaacccgaagtttatggaaactgttgcagaaaaagccctccaggagtaccgcaagaagcacagagaggaatag

SEQ ID NO: 121468 - DNA, 1350 bp, Artificial Sequence
  derived and/or modified sequence
atgatgaagacactgcttctcttcgtgggacttctccttacctgggagagcgggcaggttttgggtgaccagacagtgtctgataacgaactgcaagaaatgtctaaccaaggttccaagtacgtgaataaagaaattcaaaatgctgtgaatggggttaagcagattaaaaccctgatagaaaagaccaatgaggaacggaagacgcttttgagcaacctcgaggaagccaagaagaagaaagaggacgcattgaacgaaaccagagaaagcgaaaccaagctcaaagagctgcccggggtgtgcaatgaaactatgatggcgctttgggaggaatgtaaaccctgcctcaaacagacgtgcatgaagttctacgcaagagtgtgtcggagcggtagcgggctagtcggccggcagctcgaagagttcctgaaccagtcctcccccttctacttctggatgaacggggatagaattgattccctgttagaaaatgatcgccagcagacccacatgctggatgtcatgcaagatcattttagtcgcgcttcttccatcattgacgaactcttccaggatcggttctttacaagggaacctcaggatacataccattacctgccattcagtctgccccatcgaaggcctcatttcttcttcccgaagtctagaatagttcgaagtctgatgccattctccccttatgaaccgctgaacttccatgctatgttccagccattcctggagatgattcatgaagctcagcaggctatggacatccattttcactctcccgctttccagcacccccccaccgagtttataagggagggcgatgacgataggacagtgtgtagggagattaggcataattccacaggctgtcttcgcatgaaagaccagtgcgataagtgcagagagatcctctctgttgactgttctactaacaaccccagtcaagcaaaattgcgaagagaactggatgaaagcctgcaggtagcagagaggcttaccaggaagtataacgaactcttgaagagctatcaatggaaaatgcttaacacctctagcctcctggagcaattgaacgagcagtttaactgggtgagtcgactggcaaacctcacacagggagaagatcagtactacctgcgtgtcaccaccgtggcctcacacacatctgattctgacgtgccatctggtgttacagaggtggtggtgaaactcttcgattccgatcctatcaccgttaccgtgccagtggaggtatctagaaaaaatcccaagtttatggaaacagttgcagagaaggccctgcaggaatacaggaagaaacatcgagaagagtag

SEQ ID NO: 121469 - DNA, 615 bp, Artificial Sequence
  derived and/or modified sequence
atgatgaagacgctgctcttattcgtcggtttactgctgacatgggagtctgggcaggttctgggagaccaaacagtatccgataacgagcttcaggaaatgtctaatcagggtagcaagtatgtcaacaaagaaattcagaacgccgtgaatggcgtcaaacaaatcaagaccctcatagaaaagacaaacgaggaacggaagaccctgctttctaacctggaagaggccaaaaaaaagaaggaagacgctttgaacgagacaagggagtctgaaacgaaactgaaagagctccccggtgtctgtaatgagaccatgatggccttatgggaggaatgtaagccgtgcctcaaacagacatgtatgaagttttatgcacgcgtctgcagatcaggctccggcctggtcggtagacagctggaggaatttctcaaccagagctcaccgttttacttttggatgaatggggatcgcattgattctttgcttgagaatgacaggcaacaaacacacatgctggatgtgatgcaggaccattttagtagagcttcgagtataattgacgaactattccaagatcgatttttcacaagggaaccccaggatacttattag

SEQ ID NO: 121470 - DNA, 1350 bp, Artificial Sequence
  derived and/or modified sequence
atgatgaagactctgctgttattcgtggggttactgctgacatgggagtcggggcaggtgcttggagaccaaactgtgagtgataacgaactccaggagatgtcgaatcagggaagtaaatatgttaataaggaaatccagaatgcagtgaatggtgtcaaacagataaagacccttatagaaaagaccaatgaagaacgcaagaccctgctgtccaacttggaggaagcgaagaagaaaaaagaagatgcactcaatgaaactcgcgaaagcgagaccaaactgaaagagctgcctggggtttgtaacgagaccatgatggccttgtgggaagagtgcaaaccctgcctgaagcagacttgcatgaagttttacgcgcgggtctgcagatcgggaagtgggctcgtcggacggcagttagaagagttcctcaaccagtcatcaccattttacttttggatgaatggagatagaatagactccttactggaaaatgataggcagcaaacacatatgctcgacgtaatgcaggaccacttttctcgggctagtagcattatcgatgagctctttcaggatcgcttcttcacgagggagccacaagacacgtaccattatcttccattcagtttgccacatcggcgccctcactttttcttccctaaatccaggatcgtgagatcactgatgccgttctccccatacgagccactcaattttcacgcgatgtttcagccgtttctcgagatgatccacgaggcacaacaggcgatggacatccattttcattctcctgccttccagcaccctcccaccgagttcatccgtgaaggcgatgatgatcggactgtatgcagggagattcggcacaactcaactgggtgtctccgtatgaaagaccagtgcgacaagtgccgggagatcttgagcgtagactgctcaaccaataatccaagtcaggccaaactccgtcgagaactcgacgagtccctgcaagtagcggagcgcctgacgcgcaaatacaacgagctacttaaatcttaccagtggaaaatgctcaacacatcatctctgttggagcagcttaatgaacagttcaactgggtctcgcgactggccaacttgactcagggggaagatcagtattacctgagggtaacaacggtggccagccatacatcagactccgatgtgccatctggagtgaccgaggtagtggttaagttgtttgacagcgatccgattaccgtgaccgtaccagtggaagtctcgcgtaaaaaccctaagttcatggagacagtggccgagaaagccctgcaggaatatcgcaaaaaacacagagaggagtag

SEQ ID NO: 121471 - DNA, 816 bp, Artificial Sequence
  derived and/or modified sequence
atgatgaaaacgctgcttttgtttgttggactgttactgacctgggaatcaggccaagttctgggtgatcaaacagttagcgataatgagctgcaggaaatgtccaatcagggctctaaatatgtgaacaaggagattcagaacgccgtaaacggtgtcaaacagataaaaactttaatcgaaaaaacaaatgaagagcggaaaaccctattgtcaaacctggaggaggctaaaaagaagaaggaggatgccctgaatgaaaccagggagtccgaaacgaagttgaaggaactgcctggggtttgcaacgaaacgatgatggctctgtgggaggagtgtaaaccatgcctcaagcagacatgtatgaaattttacgcgcgtgtttgcagaagtgggtcgggccttgtcgggaggcagttggaagagtttctgaatcagtcttcaccattctatttttggatgaacggcgacaggatagattccctcttggaaaatgacaggcagcagacgcatatgctggacgtgatgcaggatcattttagtagggcctccagtatcattgatgagttattccaagatagcttgatgcccttctcgccgtatgagcccctgaatttccacgcaatgttccagcctttcctcgaaatgatacatgaagctcaacaggccatggatatccacttccactcccctgcctttcaacatccgcccacagaattcatacgggaaggagacgatgacagaaccgtgtgcagggagattaggcacaacagcaccggctgcttgaggatgaaggaccagtgcgataagtgctag

SEQ ID NO: 121472 - DNA, 1350 bp, Artificial Sequence
  derived and/or modified sequence
atgatgaagaccctgctgctgtttgtgggcctgctgctgacctgggagagcggccaggtgctgggggaccagacagtgtctgacaatgagctgcaggagatgagcaaccagggcagcaaatatgtgaacaaggagatccagaatgctgtgaatggagtgaagcagatcaagaccctcatcgagaagaccaatgaggagaggaagaccctgctgagcaacctggaggaggccaagaagaagaaggaggatgccctgaatgagacccgggagagcgagaccaagctgaaggagctgcccggggtgtgcaatgagaccatgatggccctgtgggaggagtgcaagccctgcctgaagcagacctgcatgaagttctacgcccgggtgtgccgcagcggcagcggcctggtgggccggcagctggaggagttcctgaaccagagcagccccttctacttctggatgaatggagacagaattgacagcctgctggagaatgaccggcagcagacccacatgctggatgtgatgcaggaccacttcagccgggccagcagcatcattgatgagctgttccaggaccgcttcttcacccgggagccccaggacacctaccactacctgcccttcagcctgccccaccggcggccccacttcttcttccccaagagcagaattgtgcgcagcctgatgcccttcagcccctatgagcccctgaacttccacgccatgttccagcccttcctggagatgatccacgaggcccagcaggccatggacatccacttccacagccctgccttccagcaccccccaacagagttcatccgggagggagatgatgacagaacagtgtgccgggagatccgccacaacagcacaggctgcctgaggatgaaggaccagtgtgacaagtgccgggagatcctgtctgtggactgcagcaccaacaaccccagccaggccaagctgcggcgggagctggatgagagcctgcaggtggccgagcggctgaccaggaagtacaatgagctgctgaagagctaccagtggaagatgctgaacaccagcagcctgctggagcagctgaatgagcagttcaactgggtgtcccggctggccaacctgacccagggcgaggaccagtactacctgcgggtgaccaccgtggccagccacaccagtgacagtgatgtgcccagcggcgtgacagaggtggtggtgaagctgtttgacagcgaccccatcaccgtgacagtgcctgtggaggtgtccaggaagaaccccaagttcatggagaccgtggccgagaaggccctgcaggagtacaggaagaagcaccgggaggagtag

SEQ ID NO: 121473 - DNA, 825 bp, Artificial Sequence
  derived and/or modified sequence
atgcaggaccacttcagccgggccagcagcatcattgatgagctgttccaggaccgcttcttcacccgggagccccaggacacctaccactacctgcccttcagcctgccccacagaagaccccacttcttcttccccaagagccgcatcgtgcgcagcctgatgcccttcagcccctatgagcccctgaacttccacgccatgttccagcccttcctggagatgattcatgaggcccagcaggccatggacatccacttccacagccctgccttccagcaccccccaacagagttcatccgggagggagatgatgacagaacagtgtgccgggagatccgccacaacagcacaggctgcctgaggatgaaggaccagtgtgacaagtgccgggagatcctgtctgtggactgcagcaccaacaaccccagccaggccaagctgcggcgggagctggatgagagcctgcaggtggccgagcggctgaccaggaagtacaatgagctgctgaagagctaccagtggaagatgctgaacaccagcagcctgctggagcagctgaatgagcagttcaactgggtgtcccggctggccaacctgacccagggcgaggaccagtactacctgcgggtgaccaccgtggccagccacaccagtgacagtgatgtgcccagcggcgtgacagaggtggtggtgaagctgtttgacagcgaccccatcaccgtgacagtgcctgtggaggtgtccaggaagaaccccaagttcatggagaccgtggccgagaaggccctgcaggagtacaggaagaagcaccgggaggagtag

SEQ ID NO: 121474 - DNA, 615 bp, Artificial Sequence
  derived and/or modified sequence
atgatgaagaccctgctgctgtttgtgggcctgctgctgacctgggagagcggccaggtgctgggggaccagacagtgtctgacaatgagctgcaggagatgagcaaccagggcagcaaatatgtgaacaaggagatccagaatgctgtgaatggagtgaagcagatcaagaccctcatcgagaagaccaatgaggagaggaagaccctgctgagcaacctggaggaggccaagaagaagaaggaggatgccctgaatgagacccgggagagcgagaccaagctgaaggagctgcccggggtgtgcaatgagaccatgatggccctgtgggaggagtgcaagccctgcctgaagcagacctgcatgaagttctacgcccgggtgtgccgcagcggcagcggcctggtgggccggcagctggaggagttcctgaaccagagcagccccttctacttctggatgaatggagacagaattgacagcctgctggagaatgaccggcagcagacccacatgctggatgtgatgcaggaccacttcagccgggccagcagcatcattgatgagctgttccaggaccgcttcttcacccgggagccccaggacacctactag

SEQ ID NO: 121475 - DNA, 816 bp, Artificial Sequence
  derived and/or modified sequence
atgatgaagaccctgctgctgtttgtgggcctgctgctgacctgggagagcggccaggtgctgggggaccagacagtgtctgacaatgagctgcaggagatgagcaaccagggcagcaaatatgtgaacaaggagatccagaatgctgtgaatggagtgaagcagatcaagaccctcatcgagaagaccaatgaggagaggaagaccctgctgagcaacctggaggaggccaagaagaagaaggaggatgccctgaatgagacccgggagagcgagaccaagctgaaggagctgcccggggtgtgcaatgagaccatgatggccctgtgggaggagtgcaagccctgcctgaagcagacctgcatgaagttctacgcccgggtgtgccgcagcggcagcggcctggtgggccggcagctggaggagttcctgaaccagagcagccccttctacttctggatgaatggagacagaattgacagcctgctggagaatgaccggcagcagacccacatgctggatgtgatgcaggaccacttcagccgggccagcagcatcattgatgagctgttccaggacagcctgatgcccttcagcccctatgagcccctgaacttccacgccatgttccagcccttcctggagatgatccacgaggcccagcaggccatggacatccacttccacagccctgccttccagcaccccccaacagagttcatccgggagggagatgatgacagaacagtgtgccgggagatccgccacaacagcacaggctgcctgaggatgaaggaccagtgtgacaagtgctag

SEQ ID NO: 121476 - DNA, 1350 bp, Artificial Sequence
  derived and/or modified sequence
atgatgaagaccctgctgctgttcgtgggcctgctgctgacctgggagagcggccaagtgctgggggaccaaaccgttagtgataatgaactgcaagaaatgagtaaccagggctccaagtatgttaacaaagagattcaaaatgctgtgaacggtgtcaaacagatcaagaccctgattgagaaaactaatgaagagcgcaagactctcttaagcaatctcgaggaggcaaaaaagaagaaggaagatgctctgaacgaaacccgtgagagcgagaccaagctcaaggagttacccggcgtgtgcaatgaaactatgatggccttatgggaggaatgcaagccttgtttaaagcagacatgtatgaagttctatgcgcgggtctgcagatcagggtctggacttgtcggaaggcaattggaagagttcctgaaccagagtagccccttttacttttggatgaatggagaccggatcgacagtctcctggagaacgacagacagcagactcatatgcttgacgttatgcaggatcacttctcacgcgcctcctcaattatagacgagctcttccaggatagattttttacgcgtgagcctcaggacacttatcattacctcccattctctctgccccaccgaagaccacacttcttcttccctaagagccgtatcgttcggagtctcatgccattcagtccctacgagccactcaatttccacgccatgtttcaaccattcctcgagatgatccatgaggcacaacaggctatggatatccattttcacagccctgcctttcagcatccgcccacagaatttattcgcgaaggggacgacgatcgcacagtatgcagagagatcaggcacaacagcactggctgtctgcgcatgaaagatcagtgtgacaagtgtcgcgaaattttaagtgtggactgcagtacaaataacccaagtcaggccaaattgagacgggaacttgacgaatccctgcaagtcgccgaacggctaacgcggaagtacaatgaactgctcaagtcttatcagtggaaaatgctgaatacctcctctctcctggaacagctgaatgagcagttcaactgggtctcacggttggcgaatcttacacagggcgaggatcagtactatctcagagtcacaaccgtagcctcgcacacctcggattccgatgtgccctctggcgtgactgaggtggttgtcaaattgtttgattcggaccccattaccgtgaccgtcccggtggaggtatctagaaagaaccctaaattcatggaaacggtcgccgagaaagctttgcaagagtatcgcaagaaacatcgcgaggagtag

SEQ ID NO: 121477 - DNA, 825 bp, Artificial Sequence
  derived and/or modified sequence
atgcaggaccacttcagccgggccagcagcatcatcgacgagctgttccaagaccgtttcttcacaagggagcctcaggacacttatcactacttacccttcagtctgccccaccgtagacctcactttttcttcccgaagagccgcatcgtgcgtagcctgatgcccttcagcccatacgagccgcttaacttccacgcaatgttccagcccttcctggaaatgattcacgaagcacaacaggccatggacatccatttccattcaccggcatttcagcatcctccaaccgagtttataagagaaggggatgacgacagaacagtgtgtcgagagatcagacataactcaacgggctgccttaggatgaaggatcaatgtgacaagtgccgtgagatcctgagtgtcgattgcagcacaaataatcctagtcaggcaaaactccggagggaattggatgagtcactgcaggtcgcagaaaggctgaccagaaagtataacgagctgttgaagagttaccaatggaagatgctcaacacctcctcactactcgagcaactgaatgagcaattcaactgggtgtcgaggctggcaaatcttactcagggcgaggaccaatattaccttcgagtaaccaccgtagcatcccacacgagtgatagcgacgtgccaagtggagtgaccgaagttgtagtgaaattgtttgatagcgatcccataacggtgacggtcccagtcgaagtttcaagaaaaaatccgaaattcatggaaactgtcgctgagaaagctctccaggagtaccgcaagaagcacagagaggaatag

SEQ ID NO: 121478 - DNA, 1350 bp, Artificial Sequence
  derived and/or modified sequence
atgatgaagaccctgctgctgttcgtgggcctgctgctgacctgggagagcggtcaggttttaggcgaccaaactgtttccgataacgaactccaagaaatgtctaatcagggatcgaagtacgtgaataaagagatacagaacgccgtaaatggcgtaaaacagattaaaaccctcatcgaaaagacgaacgaagaacggaaaacactgctatcaaatctagaagaggcaaaaaagaagaaggaagacgccctgaatgaaacacgcgagtcagaaacaaaattgaaagaactcccaggggtttgtaatgaaactatgatggcactttgggaggaatgcaagccctgcctcaaacagacttgtatgaaattctacgcaagggtgtgcaggtccggctcagggttggtgggaagacagctggaggagtttctcaaccaatctagtccattttatttttggatgaatggcgaccgcattgacagccttctagagaatgacaggcagcaaacccatatgttggatgtaatgcaggaccattttagccgcgcatcttcaatcatcgacgaactcttccaggaccgtttttttacccgggaaccccaggatacgtaccattatctccccttttcattaccccaccgccggccacatttttttttcccaaagtcccggattgtcaggtcattgatgccgttttccccatacgagccgctcaattttcacgccatgttccagcccttcctggagatgattcacgaggcacagcaggctatggacattcacttccacagtccggcatttcaacatcccccgactgaatttatacgggagggggacgacgaccggactgtttgccgagaaattcgtcataatagcactggatgcctcaggatgaaggatcagtgcgataaatgtcgcgagatcttaagtgtggactgttctacaaacaatcctagccaagctaagctcagacgtgagcttgatgaatctctgcaggttgctgagcgccttacaaggaagtataacgagctcctcaagagttatcagtggaaaatgcttaacacctcatccctgctggaacagctgaacgaacagttcaactgggtgtccagactggctaacctgactcaaggcgaggaccaatactatctcagagtgaccaccgtggccagtcacacttctgattccgatgtgccctcgggggtgacggaggtggttgtgaagctgtttgactcagatcccataacagtgaccgtgcccgtcgaagtgagcagaaaaaacccaaagttcatggaaacagtagccgaaaaggccctccaggagtatagaaaaaagcatcgggaagagtag

SEQ ID NO: 121479 - DNA, 615 bp, Artificial Sequence
  derived and/or modified sequence
atgatgaagaccctgctgctgttcgtgggcctgctgctgacctgggaatcggggcaggttctgggtgaccaaactgtgtccgacaacgagctccaggaaatgtccaaccagggttctaaatatgtcaacaaagaaatccagaacgccgttaacggtgtgaagcaaataaagaccctgattgaaaagaccaacgaagaacggaaaactttgctgagcaatctcgaagaagcgaagaaaaaaaaggaagatgcacttaacgagacccgagagtccgagacgaagctcaaagagctgccaggagtgtgcaatgagacgatgatggcgctctgggaagaatgcaaaccatgcctaaagcaaacatgtatgaagttttacgcccgggtctgcaggtctggctcagggctggtagggagacagttagaggagtttctcaaccaatcctcaccgttttacttctggatgaatggtgatagaattgattcattgcttgagaacgaccgtcagcagacccacatgcttgatgtcatgcaggatcacttcagtcgagcttccagcattatagatgagttgtttcaggacaggttcttcactagagaaccccaggacacatactag

SEQ ID NO: 121480 - DNA, 1350 bp, Artificial Sequence
  derived and/or modified sequence
atgatgaagaccctgctgctgttcgtgggcctgctgctgacctgggaaagcggtcaggtcctaggagaccagactgtgtcagataatgagctacaggagatgagcaatcagggttcgaagtatgttaataaggagatccagaatgccgtcaacggtgttaaacaaatcaaaactctgattgagaagacaaatgaggagcgaaagacattgctctcaaatcttgaggaagcaaagaagaaaaaagaggacgcactcaatgagactcgagagtctgaaacaaaactgaaggaattgcccggtgtatgcaatgaaacgatgatggcattgtgggaggaatgcaagccatgtctcaagcaaacgtgtatgaaattttacgcccgtgtttgccggagtgggtctggcctggtgggcagacagctcgaagaattccttaatcaatcgtctcctttctacttttggatgaacggggatcggatcgacagtctgctggaaaacgacaggcagcaaacacatatgctagacgttatgcaggatcacttttcgcgtgcatctagtatcattgacgagctcttccaggacaggttcttcacccgggagccgcaggacacctatcactatctgccttttagcctgcctcatcgtcgcccacactttttctttcccaagtccaggattgtgcggtctctgatgcccttctctccatacgaacccctgaatttccatgctatgtttcagccttttttggaaatgattcatgaggctcagcaggccatggatatccacttccactccccagcatttcagcatccacccactgaatttattagagagggggacgacgaccgcaccgtctgccgggaaatcagacataattcaactgggtgtctgcggatgaaagatcaatgcgacaagtgccgtgaaatcctctctgtcgactgcagcacaaacaaccccagccaggctaagctgaggagggagctggatgagagccttcaggtggccgagcgcctgactcgcaaatataacgagttactgaagtcttaccagtggaagatgctgaatacgagctctttgctggaacagcttaatgaacagtttaactgggtctcccgcctggcaaatcttactcaaggggaggatcagtattacttaagagtgaccactgtggcaagccacacaagtgactctgatgtaccttcaggcgtgactgaggtagtggtcaaactgttcgattccgaccctatcacagtgacagtcccagtggaggtctctaggaagaatcccaaattcatggaaaccgtggcagagaaagcactgcaggaataccgcaagaagcacagggaagagtag

SEQ ID NO: 121481 - DNA, 816 bp, Artificial Sequence
  derived and/or modified sequence
atgatgaagaccctgctgctgttcgtgggcctgctgctgacctgggaaagcggtcaggtgctgggcgatcagaccgtgagtgataacgagctgcaagaaatgagtaatcagggaagtaagtacgtgaacaaagagattcagaatgccgttaacggggtcaaacagataaaaaccctcatcgaaaaaactaatgaggagcgtaaaacactattgagtaatttggaggaggcaaagaaaaagaaggaagacgctctgaatgagactcgggaatccgagaccaagctgaaggaactgccaggggtatgcaacgaaactatgatggccttatgggaggaatgcaaaccatgtctaaagcagacatgcatgaaattttacgcccgggtatgtcgctccggcagcggcctagtggggagacagcttgaagagtttctgaatcagtcttcaccgttttacttctggatgaacggagatcgtatcgattccctgcttgagaacgataggcaacagacccacatgctggatgtgatgcaggaccactttagtcgagcgtctagtattatcgacgagctgttccaagactccctcatgcctttctctccatacgagccactgaatttccacgccatgttccagccattccttgagatgatccatgaagctcaacaggcaatggatatccacttccacagtcccgcgttccagcatccaccaaccgagtttatacgcgagggagatgacgatcggaccgtttgtcgggagataagacataattctaccgggtgcctgcggatgaaggatcaatgtgacaaatgctag

SEQ ID NO: 121482 - DNA, 1350 bp, Artificial Sequence
  derived and/or modified sequence
atgatgaagacacttctgcttttcgtgggactcttgctgacctgggaatccggacaagtactcggtgatcaaacggtcagcgacaacgaattacaagagatgtcaaatcaagggagcaagtatgtcaataaggagatacagaacgccgtgaatggcgttaagcagataaaaaccttgattgaaaaaacaaacgaggaacgcaaaacattgctgtccaatctggaggaagcgaaaaagaagaaagaggatgcactgaatgagacccgggaatcagaaactaaactcaaggagttacctggtgtatgtaacgagactatgatggccttgtgggaggaatgtaaaccctgccttaaacagacctgcatgaaattttatgcgcgagtctgtcggtcaggatctggcctcgtagggcgtcaactcgaagagttcttgaatcagagtagtccgttctatttctggatgaatggcgatcgtattgactcccttttagagaatgaccgccagcagactcatatgctggatgttatgcaagatcacttctccagagcctctagcataatagacgaactatttcaagatagattcttcactcgggaaccccaggatacgtatcattacctgccattttccctgccacatcggaggcctcatttcttttttccaaaatctcgtatcgtgcgcagcctcatgccattctccccttacgagccacttaattttcatgcgatgttccaaccattccttgagatgatccatgaggcccagcaagccatggacatccactttcattcccctgcttttcagcacccccctacggagtttattcgagagggagacgacgacaggacagtgtgtcgggagattagacacaattccaccgggtgtctgagaatgaaagatcaatgtgacaagtgccgcgagatactgtctgtcgattgtagtactaacaatccctcacaggccaagttacgtagagaacttgatgagtcgctccaggtcgctgagagactgacaagaaagtacaacgaactcttaaagagctatcagtggaaaatgctgaatacctcttcgttactggaacagttgaatgagcaattcaattgggtaagtcggctcgcaaatttaactcagggcgaggaccaatattacttgcgagtcaccactgtcgctagccacacctcagattccgatgtgccatctggagtgactgaggtagtggtgaaactttttgactctgatccgattactgtaactgtcccagtggaggtcagccgcaagaatcccaagtttatggagactgtggctgaaaaggctctgcaggaataccgcaagaagcacagggaagagtag

SEQ ID NO: 121483 - DNA, 825 bp, Artificial Sequence
  derived and/or modified sequence
atgcaggaccatttctctcgggcttctagtatcattgacgagctttttcaggaccgtttctttacacgggaacctcaggatacataccactacctaccattctctcttccccatagacgtccccacttttttttccctaagtcacggatcgtgcggtcactgatgcccttttctccctatgagcctttgaattttcatgccatgtttcaaccctttctagaaatgatccacgaggcccagcaggccatggacattcacttccacagcccagcattccagcacccccctaccgaattcattcgcgaaggtgacgacgataggaccgtttgtagggaaattcgacacaattcgaccggttgtctcaggatgaaggatcagtgtgacaagtgcagggagatacttagtgtggattgttcaacaaataaccccagtcaagctaaacttagaagggaactcgacgaaagcctgcaggttgcagagagactgacacgcaagtacaacgagctgctgaaatcctaccagtggaaaatgcttaacactagcagcctgctcgagcagctcaacgagcagtttaattgggtatcaaggctcgcaaatttgactcagggggaggatcaatactatctgagggtgaccactgtggcttcacacacctctgattccgacgtgccaagtggagtgacagaggtggtagtcaagttgtttgattcagatccaataacagtaaccgtccctgtagaagtctcaaggaagaatccgaaatttatggagactgtcgcagagaaagctctgcaggaataccgtaagaagcatagggaagaatag

SEQ ID NO: 121484 - DNA, 1350 bp, Artificial Sequence
  derived and/or modified sequence
atgatgaaaacgctcctgctgttcgttggcttactgctcacctgggagagcgggcaagtgctgggcgatcagactgtgtctgacaacgagcttcaagaaatgtcaaatcagggatctaagtacgtcaataaagagattcagaatgcagtaaacggggtgaagcagattaagacactcattgagaagaccaacgaagaacgcaaaacactactgtccaatctagaagaagctaagaaaaagaaagaagacgcgctcaacgagacacgagaaagcgaaaccaagcttaaagaattgcctggcgtgtgcaacgagactatgatggccctgtgggaggaatgcaaaccttgtcttaaacagacctgtatgaagttttatgccagggtgtgccggtccgggtccggactcgtggggagacagctagaggaattcctgaaccagtcttctcccttttacttttggatgaatggagaccgtatagattcactgctggaaaacgaccggcaacagacccatatgctggacgtgatgcaggatcatttctcccgggcaagtagtataatcgatgagctgtttcaggaccgatttttcacacgcgaaccccaggacacttatcattacttgcctttttctttgcctcataggcggccacatttcttctttcccaaatcaaggatcgtgcggtctcttatgccttttagtccttatgaacctctgaatttccacgctatgttccagccatttctggaaatgatccacgaagcccaacaggctatggatattcacttccattcccctgcctttcagcacccgcctaccgagtttatccgcgagggtgacgatgataggactgtttgcagggagattcgccacaactcaacgggttgcctacgcatgaaggatcagtgtgataagtgccgggaaattctcagtgtggactgcagtaccaacaatccctcacaggccaagttacgacgcgaacttgacgagtcacttcaggtggccgagcgcctgacacgaaaatacaatgaactgctcaagtcttatcagtggaaaatgctgaatacctcctccctgctcgagcaactgaacgaacagtttaattgggtgagccgcttagccaacctcacccagggggaggaccagtattatctcagagttactactgtggcatcccacaccagcgatagcgatgtgccttctggtgtgacagaggttgtggtgaagctgttcgactctgacccgatcaccgtgacagttcctgtggaggtgagtagaaaaaaccctaagtttatggaaacagtggcagaaaaggcgctgcaggaatacaggaaaaagcacagagaggaatag

SEQ ID NO: 121485 - DNA, 615 bp, Artificial Sequence
  derived and/or modified sequence
atgatgaaaacacttcttttgtttgtgggacttctcctgacgtgggagtctggacaggtcctgggcgaccaaacagtgagcgacaacgaactgcaggaaatgagtaaccagggttccaaatacgttaacaaagaaattcagaacgccgtgaacggggtgaaacagattaaaacgctcatagagaagaccaacgaggaacgaaagactctcctgagcaatctggaggaggcgaagaaaaagaaggaggatgcccttaacgaaacaagggaatccgaaactaagctgaaggaactgcctggggtttgcaatgaaaccatgatggccctgtgggaggagtgtaagccctgcctaaagcagacctgtatgaagttttacgccagggtttgcaggagcggttccggcctagtgggcagacagctcgaagaattccttaatcaatcttctcctttttacttctggatgaatggagaccgtattgatagcttactggaaaacgaccggcagcagacacacatgctggatgtgatgcaagaccactttagtagagcttctagcattatagacgagttgtttcaagatcggttcttcacacgcgaaccacaggacacttactag

SEQ ID NO: 121486 - DNA, 1350 bp, Artificial Sequence
  derived and/or modified sequence
atgatgaagactctccttctgttcgtgggtctcctgcttacatgggagagcggacaggtgctaggcgaccagacggtttccgacaacgagctgcaggagatgtcaaaccaagggtccaagtatgtcaataaggaaatacagaatgcggtaaatggcgttaagcagataaaaactctcattgagaaaacaaacgaggaaagaaaaactctcttgtccaacttggaagaagcgaagaaaaagaaggaggacgctctgaatgagactagggaatccgaaacaaaattgaaggaactccctggcgtgtgtaacgagaccatgatggccctatgggaggaatgtaagccatgcctcaaacagacctgtatgaagttctacgccagggtgtgtagatctggatccgggcttgtggggaggcagttggaggagttccttaaccagtccagtcccttttacttttggatgaacggggatcgcattgattctcttctggagaacgacagacagcagacccacatgctggacgtgatgcaagaccatttttcccgcgcatcttctatcatcgatgagctgttccaggatagattcttcactcgagaacctcaggacacctaccactacctgcccttctccctgcctcaccgacggccacactttttttttccgaaaagccggatcgtgaggtctctaatgcccttcagtccctacgaacccctaaatttccacgctatgtttcagccatttctcgagatgatccacgaggcccaacaggctatggacatccactttcatagtccagcctttcagcatccacccaccgagtttattagagaaggagacgatgaccgtacagtctgtcgagagatacgccacaattctacagggtgtctgagaatgaaggaccagtgcgataagtgcagggagatactgagtgtcgattgttcaaccaacaatccatcccaggctaagctgcggcgagaacttgatgagtccctgcaagttgccgaacggttgaccaggaagtacaacgagctgcttaagagttatcagtggaaaatgttaaacacatccagtttactggaacagctgaacgaacagtttaattgggtcagtcgcctggcaaacctgacacagggagaggatcagtactacctgcgcgtgaccacagtcgcctcccacacttccgattcggacgtgccctcaggggtgacggaggttgtcgttaaattgtttgattctgatcctattaccgttactgtgcccgttgaagtatctcgtaaaaaccctaaattcatggagactgttgccgaaaaagctctccaggagtatcggaaaaaacacagagaagagtag

SEQ ID NO: 121487 - DNA, 816 bp, Artificial Sequence
  derived and/or modified sequence
atgatgaagaccctattgctctttgtgggcctgttactcacctgggagtcagggcaagtgttaggcgaccagaccgtttcagacaatgagctccaggagatgagcaatcaggggtcgaaatatgtgaataaagagatccaaaatgccgtaaacggtgtaaagcagatcaaaacattaatcgaaaaaactaatgaggaacgcaaaacactccttagcaatctggaggaggccaaaaaaaaaaaagaggatgcattgaacgagactagggagtctgaaaccaagctaaaggagctcccaggcgtctgtaacgaaacgatgatggcactttgggaggaatgcaagccttgcttgaagcaaacctgcatgaaattttatgctagagtctgccggtcaggatccggtttagttggacgccagctggaagaattcttgaaccagagctcacctttctatttctggatgaatggcgatcgtatagacagcctactggaaaatgatagacagcaaacacacatgttggatgtgatgcaggatcacttttcccgcgcttcaagcatcattgatgaacttttccaggattcactgatgccattcagtccttatgagcccttgaatttccacgctatgtttcaaccctttctggagatgattcatgaggcccagcaagctatggatatccattttcattcacccgcatttcaacatccacctaccgagtttattcgagagggcgacgacgaccggacagtgtgccgggagatccgtcacaattcaacaggctgccttagaatgaaggaccagtgcgataaatgctag

SEQ ID NO: 121488 - DNA, 1350 bp, Artificial Sequence
  derived and/or modified sequence
atgatgaaaaccttgctcctgttcgtaggtctgcttctaacttgggaatccggccaagtgttaggagatcaaactgtgtctgacaacgagttgcaggaaatgtcaaatcagggatccaagtacgttaataaggagatccagaacgctgtaaatggcgtgaagcagatcaagacactgattgaaaagaccaatgaagaaaggaagaccctgctctctaatctcgaggaggcgaagaagaaaaaagaggacgctctgaatgaaacaagggagtcagaaaccaaactgaaggagttaccaggggtttgcaatgaaactatgatggccctgtgggaagaatgtaagccgtgtctaaaacagacgtgcatgaagttttatgcccgggtttgcaggtcaggatccgggcttgtcggcagacagctggaggagttccttaatcaaagcagtcccttttatttctggatgaatggtgacagaattgacagcctgctggaaaacgataggcaacagacccacatgcttgatgtgatgcaagaccactttagccgggcaagtagcataattgatgagctgtttcaggatagattttttacccgagagccacaggacacataccactatctacctttctcactcccacatagacggcctcatttttttttccctaaaagtagaatcgtacggagccttatgcccttctctccatacgaacccctcaatttccacgctatgttccagccatttctggaaatgattcatgaggcgcagcaggccatggatatacactttcattcccccgcttttcaacatccacccaccgagttcataagagagggcgatgacgatcgaaccgtgtgccgagagatccgacataatagcacaggttgcctgcggatgaaagaccagtgtgacaagtgtagagagatactttccgtagactgttctaccaacaacccatcgcaggctaaactcagaagggagctcgatgaaagtctccaggtggccgagcgtttgaccagaaaatacaatgaacttctcaagagttaccagtggaaaatgcttaatacatcctctctgctggagcagctgaacgagcagttcaattgggtttccagactggctaacttgacacaaggtgaggaccaatattaccttagggtcacaaccgtcgcaagccacacctctgactccgacgtgccatctggggtgacagaagtggtggttaagctctttgattctgaccctattactgtaactgtgccagttgaggtcagcaggaagaacccaaagtttatggaaactgttgccgaaaaggccttacaagagtatcggaagaagcacagggaggaatag

SEQ ID NO: 121489 - DNA, 825 bp, Artificial Sequence
  derived and/or modified sequence
atgcaagaccacttttcgagggcgagcagcatcattgacgagttatttcaagatcgctttttcactcgagagcctcaggacacataccactaccttcctttctcactcccacatcggcgcccccattttttctttcctaaaagtaggattgtccgatcattaatgcccttctctccatacgagccccttaactttcacgcaatgttccagccttttttagaaatgatccatgaggcccagcaagcaatggacattcacttccactcacccgctttccagcaccctcccaccgagttcatccgcgagggggatgacgataggacggtctgtagagaaattcgacataactcaacaggctgtcttagaatgaaggaccagtgtgataagtgcagagagatcctgtcagtcgattgttctactaacaacccttcccaagcaaagctacgacgcgagctagatgaatcactgcaggtggctgagagactgacaagaaagtataatgagcttcttaaaagctaccaatggaagatgctgaatacaagctcactactcgaacaacttaatgagcagtttaattgggtgagccggctggctaacctgacccaaggcgaggaccagtattatctccgcgtgacaacagttgctagccacacatcagactccgacgtcccttcaggcgtcactgaagttgtggtaaaactatttgactctgaccccatcacggtcacagttcccgtggaagtgtctaggaaaaaccctaaatttatggaaacggtggctgaaaaggcgctacaggaataccgcaaaaaacaccgcgaggaatag

SEQ ID NO: 121490 - DNA, 1350 bp, Artificial Sequence
  derived and/or modified sequence
atgatgaaaacactacttctgttcgtgggcttattgttaacctgggagagcggtcaggtcttgggcgatcagactgtgagcgacaatgagttacaagaaatgagcaaccaaggctcaaagtatgtcaataaggagatacagaacgccgttaatggtgtaaagcagattaaaacccttatcgaaaaaactaatgaagaaagaaagacattgctatcaaatctggaggaagcaaagaagaaaaaggaagacgccttaaacgaaacacgtgaaagtgaaactaaactaaaagaattaccaggagtttgcaatgaaaccatgatggctctgtgggaggaatgcaaaccttgtcttaaacaaacatgcatgaaattctatgcccgagtgtgtcggtcgggatcagggttggttgggcgccagctcgaggagttcctaaatcaatcttctcctttttacttttggatgaacggagataggatcgatagccttctcgaaaatgataggcaacagacgcacatgttggacgtgatgcaagaccacttcagccgggcaagctccattatagatgagctgtttcaggacaggttcttcactagagaacctcaggatacctaccattatctgccgttttctctgcctcaccgtcggcctcacttctttttcccaaagtccaggatcgttagatctcttatgccgtttagcccctacgaaccactcaactttcatgccatgtttcagccatttctcgaaatgatccacgaggcacagcaagcgatggacatccattttcatagtcccgcttttcaacacccacctaccgagtttattcgcgagggcgacgacgatagaacagtgtgtcgagagattcggcataattcaacaggctgccttcgcatgaaggatcagtgcgacaaatgcagggaaatactgagtgtggattgcagcacgaacaaccccagccaggcaaagctacgaagagaactggacgaatcactgcaggtggcggagaggttgacccgaaaatataacgagctgctcaagtcataccaatggaaaatgcttaatacaagctcactgttggaacagctgaacgaacaattcaattgggtgtcgagactggcgaatcttacccagggagaggatcagtattatttgcgggtgacaaccgttgcttcccatactagcgatagcgacgttccttccggagttactgaggtggtggtgaaactgtttgactccgaccctataactgtcaccgtgcctgtcgaagtgagcagaaagaacccaaaattcatggaaaccgtagccgaaaaagcccttcaggagtatagaaaaaagcatagggaggagtag

SEQ ID NO: 121491 - DNA, 615 bp, Artificial Sequence
  derived and/or modified sequence
atgatgaaaactctactcctgtttgtgggactgctgctaacttgggaatctggacaggtgctcggtgaccagaccgtgagcgacaatgagcttcaggaaatgagcaatcaggggagcaagtacgttaacaaggaaattcaaaacgcagtgaacggagtgaaacaaattaagacattgatcgagaagacaaacgaagagaggaagacgcttctgagtaatctggaggaggccaaaaagaagaaggaagacgcactgaatgagactcgggaatccgagacaaagttaaaggagctgcctggcgtatgtaatgaaaccatgatggccttatgggaggagtgcaaaccctgcttgaagcagacatgcatgaagttctacgctcgggtgtgtcgatcaggctccggactcgtcggccgccagctcgaagagtttcttaaccagtcatctccattttatttctggatgaacggcgaccggattgactccctccttgaaaatgaccggcagcagacacatatgttggatgttatgcaggaccatttctcccgtgcctcttccattatcgacgaactgttccaagatcgcttctttacccgggaaccacaggacacatactag

SEQ ID NO: 121492 - DNA, 1350 bp, Artificial Sequence
  derived and/or modified sequence
atgatgaagactcttcttcttttcgttggcctcctcctgacctgggaatccggccaggttctcggggaccaaactgtttccgacaacgagctccaggaaatgagcaaccaagggtctaaatatgttaacaaagaaattcagaatgctgtaaacggggtcaagcagatcaagacattgattgagaaaaccaacgaagaacgcaaaacactcttatccaatttagaagaggctaaaaagaaaaaagaggatgcactgaacgaaactagggaatcggaaacaaagctcaaggaattaccaggcgtctgtaatgagacaatgatggcactctgggaagagtgtaagccctgcctcaagcagacatgtatgaaattttacgctagggtctgccgctctgggagcggactagtgggtagacagctggaggaattccttaaccagtcatcgcccttttatttctggatgaatggcgataggatcgatagtctgcttgaaaatgatcgccagcaaacacacatgttggacgtaatgcaggaccatttctcccgtgcctcaagcatcatcgacgaactcttccaggaccgcttttttacgagagaaccacaagacacttaccattacctgcccttcagccttccccaccgacgtccccatttcttcttcccgaagtctcggattgtaagatctctgatgcctttctccccatatgagccacttaattttcatgccatgtttcagcctttcctggagatgatccatgaggcccagcaagcgatggatatccactttcattctcctgccttccagcatccaccgaccgagtttattagagagggcgatgacgacagaacagtctgtagggaaattcgacataattctaccggctgcctgcgcatgaaagatcagtgtgacaagtgccgtgaaatcttgtcagttgattgtagcacaaacaacccttcacaagccaagctgcgacgcgagctcgacgaaagcctccaggtggccgaacggctcactcgcaaatacaatgaactcttgaagtcataccagtggaagatgttaaacacttccagcctgctcgaacagcttaacgaacagtttaattgggtgtcccgtctggctaatcttacacagggggaggatcagtattacctgcgagtgaccacggtggcctcccacacatctgatagtgacgtccccagcggggtgactgaggtggtggtgaaactctttgattctgatcctatcacagtcacagtcccagtggaggttagtagaaaaaacccgaagttcatggagaccgtggctgaaaaggccctccaggagtacagaaaaaaacacagggaagaatag

SEQ ID NO: 121493 - DNA, 816 bp, Artificial Sequence
  derived and/or modified sequence
atgatgaaaaccctcctactttttgtaggactcctactgacatgggaatcggggcaagtccttggcgaccaaacagtgtctgacaacgaactgcaggaaatgagtaatcaggggtctaagtatgtgaacaaggagatacagaacgctgtgaatggcgtcaagcagatcaaaacactgattgagaaaaccaacgaagagcgtaaaacactgctcagtaatctggaggaggcaaaaaagaaaaaggaagatgccttgaacgagactagagaaagcgagaccaaactgaaagaactgcctggagtgtgcaatgaaaccatgatggccctctgggaagaatgcaagccatgcctcaagcagacctgcatgaaattctatgctcgcgtgtgccgctcaggtagcggattagtgggcaggcaattggaagagttcctgaaccagagctcgcctttctacttctggatgaacggggatcgtatcgattccttgctagagaatgataggcagcagacgcatatgctggacgtgatgcaggaccatttcagccgggccagcagcattatcgatgagttgttccaagacagcctgatgcccttttccccttacgagccactcaactttcatgctatgttccaaccattccttgaaatgattcacgaggcccagcaagccatggatattcactttcactctcccgcatttcagcatccacccacagaatttattcgggaaggagacgacgatcgcacagtgtgcagggagatccggcataactctacaggatgtttaaggatgaaagaccaatgtgacaaatgctag

SEQ ID NO: 121494 - DNA, 1350 bp, Artificial Sequence
  derived and/or modified sequence
atgatgaaaactcttctgctatttgtgggcttgctgctgacctgggaaagcggccaggtgttaggtgaccaaactgtttccgataacgaattacaggagatgtctaatcagggcagcaaatatgttaacaaagagatacagaatgcagtcaacggggtgaagcagatcaagactctgatagagaaaacaaatgaagagcggaagactttgttatccaatttagaagaagcaaaaaagaagaaggaagacgcactgaatgaaactagagagagcgagactaagctgaaagaactcccgggtgtctgtaatgaaactatgatggctctctgggaggaatgcaagccatgcctgaagcaaacgtgtatgaagttctacgcccgagtgtgccgatcaggaagtggccttgtggggcgacaattggaagagtttctgaatcagtccagcccattttacttttggatgaacggtgatagaatagacagccttctcgagaatgacagacagcagacccacatgctggacgtgatgcaggatcacttcagccgagcatcttcaatcatcgacgagttgttccaggaccgattttttacccgggaacctcaagatacctaccattatcttccattttctctgcctcatcgcaggccacacttttttttccccaagtcaagaatcgtgaggagtcttatgccatttagcccgtatgaacctcttaacttccacgccatgtttcagccctttttagagatgattcacgaagctcagcaagccatggacatccacttccattcacctgcattccagcatccccctacagagtttatccgagagggagacgatgatcgcaccgtctgtcgagagattcgacacaactccacaggttgtctcagaatgaaagaccagtgtgacaaatgccgcgaaatcctgtccgttgattgttcaacgaataacccttcccaagcgaaattaaggcgcgaactagatgaatctctgcaagttgctgaaagactaacccgcaagtataatgagctgcttaagagctatcagtggaagatgttgaatacctctagcctgctggaacaactgaatgaacagtttaattgggtatcccgcctggcaaacttgactcagggagaagaccaatactatttgagagtaactacagtcgcaagccacaccagcgatagtgacgtgccatcaggcgtgaccgaggtggtagttaagctgtttgatagtgaccccataacagttactgttcccgttgaggttagtcgaaaaaatcccaagtttatggagaccgtggccgaaaaagcactacaggagtacaggaagaaacacagagaggagtag

SEQ ID NO: 121495 - DNA, 825 bp, Artificial Sequence
  derived and/or modified sequence
atgcaggaccatttcagccgtgcctctagcattattgatgaattgttccaggatcgcttctttacaagagagccccaggacacttatcactatctccccttcagcctgccgcaccgtcgccctcatttcttctttccgaaatcccgtatagtgaggtccctcatgcctttttctccgtacgaacccctaaactttcacgcaatgttccaacctttcctggagatgatccacgaagcacaacaagccatggacattcacttccactcaccagcatttcaacatccacccacagagtttattcgggagggtgatgatgatcgtaccgtctgtagagagattaggcataacagtacaggctgcctgcgaatgaaggaccaatgtgacaagtgtagggaaatcttaagtgtagattgtagtacgaataacccaagccaagctaaactgcgacgggagctagatgaatcactgcaggtggcagaacgattgactcggaaatataacgaactcttgaaatcataccagtggaagatgctcaacacaagcagcctgctggagcagcttaacgaacaatttaactgggtgagccgactcgccaacctgacacaaggagaggaccaatactatctgcgcgttacaaccgtcgcttctcatacgtccgacagtgatgtcccatcgggcgtgacagaggtggtagtgaaactgttcgactccgatcccataaccgtgacagtcccagttgaagtgagcaggaagaatccgaagtttatggaaaccgtagcagaaaaagcattgcaggagtatagaaagaaacaccgggaagagtag

SEQ ID NO: 121496 - DNA, 1350 bp, Artificial Sequence
  derived and/or modified sequence
atgatgaaaacactacttctgttcgtgggcttattgttaacctgggagagcggtcaggtcttgggcgatcagactgtgagcgacaatgagttacaagaaatgagcaaccaaggctcaaagtatgtcaataaggagatacagaacgccgttaatggtgtaaagcagattaaaacccttatcgaaaaaactaatgaagaaagaaagacattgctatcaaatctggaggaagcaaagaagaaaaaggaagacgccttaaacgaaacacgtgaaagtgaaactaaactaaaagaattaccaggagtgtgtaatgagaccatgatggcactgtgggaggaatgcaaaccttgcttgaaacagacatgcatgaagttttatgctcgggtctgcaggagcggctcagggctcgtgggacggcagcttgaagaatttctgaaccaatcctcacccttctatttttggatgaacggtgatagaatagacagcttactagaaaacgaccgtcagcaaactcatatgctcgatgtgatgcaggatcacttcagcagggcctcatcaatcatcgacgaactcttccaggatcgattcttcacacgagaaccacaagacacctatcactatctacccttcagtttgccacatcgcaggccacactttttcttcccaaaatcccgcatcgtacgaagcttgatgccctttagcccatatgaacccctcaattttcacgcgatgttccagccgttcttggaaatgattcacgaggcacagcaggctatggacatccacttccactctcccgccttccaacatccacccacagaatttatcagagaaggagacgacgacaggaccgtgtgcagagaaatccgccataatagtactggctgtttaagaatgaaggaccagtgcgataaatgccgcgaaattctatcagtggactgttccacaaataacccatcccaagctaaattacggcgagagctagatgagagtcttcaagttgcagagcggctaacccgtaaatataacgaattgctgaagtcttatcagtggaagatgctgaacacgtcctcacttctcgagcaactgaatgaacagttcaattgggtgtccaggctggccaatttgacccaaggagaggaccagtattacctaagagttacaacggtcgcctctcatacttccgatagcgatgtgccatcaggagtgacagaggtggtggtgaaactgttcgatagtgatccaataactgttacagtacccgtggaagtctcgagaaaaaaccccaaattcatggaaaccgtggctgagaaagctctccaggaatacagaaagaagcaccgtgaagagtag

SEQ ID NO: 121497 - DNA, 615 bp, Artificial Sequence
  derived and/or modified sequence
atgatgaaaactctactcctgtttgtgggactgctgctaacttgggaatctggacaggtgctcggtgaccagaccgtgagcgacaatgagcttcaggaaatgagcaatcaggggagcaagtacgttaacaaggaaattcaaaacgcagtgaacggagtgaaacaaattaagacattgatcgagaagacaaacgaagagaggaagacgcttctgagtaatctggaggaggccaaaaagaagaaggaagacgcactgaatgagactcgggaatccgagacaaagttaaaggagctgcctggcgtgtgtaacgagaccatgatggcattatgggaggaatgcaagccatgtttaaaacaaacatgcatgaagttctatgccagagtgtgtaggagcgggagtggcctcgttgggagacagctcgaggaattcctgaaccagtccagccctttctatttttggatgaacggcgatagaatcgacagcctcctcgaaaatgatagacagcagactcatatgttggacgttatgcaagaccacttttcacgcgcttcatcaattatcgacgaactatttcaagacaggtttttcacccgcgagccacaggatacttattag

SEQ ID NO: 121498 - DNA, 1350 bp, Artificial Sequence
  derived and/or modified sequence
atgatgaaaacactgctgctgttcgtcggactcttacttacgtgggaaagtggacaggtcctgggtgatcaaacggttagcgataacgaactccaggagatgagcaatcagggaagtaagtacgtcaacaaagaaatacagaacgcagtcaacggagtaaaacaaatcaagacgctaatcgaaaaaacaaatgaagaaaggaagacactgctgtcaaatttagaggaagcaaaaaaaaagaaagaggatgcacttaatgaaacgagggaatccgagacaaagctgaaggagttgcctggggtgtgtaatgagaccatgatggcgttgtgggaagaatgcaagccctgcctcaaacaaacatgcatgaagttctacgctcgggtttgtcggagcggtagcggattggtgggcaggcagttggaggaatttcttaatcagagctctccattttatttttggatgaacggtgataggatcgattccctgttggaaaacgacagacagcagacacacatgctagatgttatgcaagaccacttttcacgggcaagctccatcatagacgagttgttccaggatcgattttttaccagagagcctcaggatacttatcattatctccccttctcattaccccatcgacgacctcacttcttctttccgaagtcacgcattgtccgttcattgatgccattctctccttacgagccactgaatttccatgccatgttccagcccttcctcgagatgatacatgaagcacaacaggcaatggatatccactttcactcccctgcttttcagcaccccccaacagagtttatacgggaaggagatgacgacagaaccgtgtgtagggagatacggcacaactctactggatgcctgcgcatgaaagaccagtgcgacaagtgtagggaaatcctcagcgttgattgctctaccaacaacccaagtcaggccaagttgcgccgtgaactagacgagtcactgcaggttgccgaacgcttgacaaggaaatacaatgaacttctgaaaagctatcagtggaagatgttaaacacgtcatccctgttggaacagcttaacgagcagttcaattgggtgtcccggctagcaaatctcacccagggagaggaccagtactacctcagagtgacaaccgtagcaagtcatacctcagactcggatgtaccttccggagttaccgaagtggtcgttaagcttttcgactctgatcctatcaccgttacagtgcccgttgaagtgagccgaaaaaaccctaaatttatggaaaccgtcgccgagaaagcactccaagaatacagaaagaaacaccgggaggagtag

SEQ ID NO: 121499 - DNA, 816 bp, Artificial Sequence
  derived and/or modified sequence
atgatgaagacattgctactctttgtcgggctgctgctcacatgggagtctggccaggtgctcggagatcagaccgttagtgataatgagcttcaggagatgtctaatcaaggaagtaagtacgtcaacaaagagattcaaaatgctgtaaacggagtaaaacagattaagacactgattgaaaagacgaacgaagagcgaaaaactctcttatcaaatctagaggaagcgaagaaaaagaaggaggatgcactgaatgagacaagggagtctgagacaaagctgaaagagctgccaggtgtgtgcaacgagaccatgatggcactgtgggaagagtgcaagccatgtctgaagcaaacttgtatgaagttctatgcacgggtgtgccgaagtggttctggactggtaggcagacagcttgaagaattcttgaatcaatctagtccattctatttttggatgaatggtgaccgcattgactccttgctggagaacgaccgccaacaaacccacatgctcgacgtgatgcaggaccatttctcaagagccagctctattatcgatgaactgtttcaggactcactgatgcctttttctccctacgagccgctcaattttcacgcaatgtttcaacctttcctcgagatgatccacgaagcccagcaagccatggatatacacttccactcccctgctttccagcacccgcccacagagtttatcagagagggcgatgatgataggacagtctgcagagaaattcggcacaattccacaggctgtcttcggatgaaagatcagtgcgataaatgttag

SEQ ID NO: 121500 - DNA, 1350 bp, Artificial Sequence
  derived and/or modified sequence
atgatgaagaccctgctgctgttcgtgggcctgctgctgacctgggagagcggccaggtgctgggcgaccagaccgtgagcgacaacgagctgcaggagatgagcaaccagggcagcaagtacgtgaacaaggagatccagaacgccgtgaacggcgtgaagcagatcaagaccctgatcgagaagaccaacgaggagagaaagaccctgctgagcaacctggaggaggccaagaagaagaaggaggacgccctgaacgagaccagagagagcgagaccaagctgaaggagctgcccggcgtgtgcaacgagaccatgatggccctgtgggaggagtgcaagccctgcctgaagcagacctgcatgaagttctacgccagagtgtgcagaagcggcagcggcctggtgggcagacagctggaggagttcctgaaccagagcagccccttctacttctggatgaacggcgacagaatcgacagcctgctggagaacgacagacagcagacccacatgctggacgtgatgcaggaccacttcagcagagccagcagcatcatcgacgagctgttccaggacagattcttcaccagagagccccaggacacctaccactacctgcccttcagcctgccccacagaagaccccacttcttcttccccaagagcagaatcgtgagaagcctgatgcccttcagcccctacgagcccctgaacttccacgccatgttccagcccttcctggagatgatccacgaggcccagcaggccatggacatccacttccacagccccgccttccagcacccccccaccgagttcatcagagagggcgacgacgacagaaccgtgtgcagagagatcagacacaacagcaccggctgcctgagaatgaaggaccagtgcgacaagtgcagagagatcctgagcgtggactgcagcaccaacaaccccagccaggccaagctgagaagagagctggacgagagcctgcaggtggccgagagactgaccagaaagtacaacgagctgctgaagagctaccagtggaagatgctgaacaccagcagcctgctggagcagctgaacgagcagttcaactgggtgagcagactggccaacctgacccagggcgaggaccagtactacctgagagtgaccaccgtggccagccacaccagcgacagcgacgtgcccagcggcgtgaccgaggtggtggtgaagctgttcgacagcgaccccatcaccgtgaccgtgcccgtggaggtgagcagaaagaaccccaagttcatggagaccgtggccgagaaggccctgcaggagtacagaaagaagcacagagaggagtag

SEQ ID NO: 121501 - DNA, 825 bp, Artificial Sequence
  derived and/or modified sequence
atgcaggaccacttcagcagagccagcagcatcatcgacgagctgttccaggacagattcttcaccagagagccccaggacacctaccactacctgcccttcagcctgccccacagaagaccccacttcttcttccccaagagcagaatcgtgagaagcctgatgcccttcagcccctacgagcccctgaacttccacgccatgttccagcccttcctggagatgatccacgaggcccagcaggccatggacatccacttccacagccccgccttccagcacccccccaccgagttcatcagagagggcgacgacgacagaaccgtgtgcagagagatcagacacaacagcaccggctgcctgagaatgaaggaccagtgcgacaagtgcagagagatcctgagcgtggactgcagcaccaacaaccccagccaggccaagctgagaagagagctggacgagagcctgcaggtggccgagagactgaccagaaagtacaacgagctgctgaagagctaccagtggaagatgctgaacaccagcagcctgctggagcagctgaacgagcagttcaactgggtgagcagactggccaacctgacccagggcgaggaccagtactacctgagagtgaccaccgtggccagccacaccagcgacagcgacgtgcccagcggcgtgaccgaggtggtggtgaagctgttcgacagcgaccccatcaccgtgaccgtgcccgtggaggtgagcagaaagaaccccaagttcatggagaccgtggccgagaaggccctgcaggagtacagaaagaagcacagagaggagtag

SEQ ID NO: 121502 - DNA, 615 bp, Artificial Sequence
  derived and/or modified sequence
atgatgaagaccctgctgctgttcgtgggcctgctgctgacctgggagagcggccaggtgctgggcgaccagaccgtgagcgacaacgagctgcaggagatgagcaaccagggcagcaagtacgtgaacaaggagatccagaacgccgtgaacggcgtgaagcagatcaagaccctgatcgagaagaccaacgaggagagaaagaccctgctgagcaacctggaggaggccaagaagaagaaggaggacgccctgaacgagaccagagagagcgagaccaagctgaaggagctgcccggcgtgtgcaacgagaccatgatggccctgtgggaggagtgcaagccctgcctgaagcagacctgcatgaagttctacgccagagtgtgcagaagcggcagcggcctggtgggcagacagctggaggagttcctgaaccagagcagccccttctacttctggatgaacggcgacagaatcgacagcctgctggagaacgacagacagcagacccacatgctggacgtgatgcaggaccacttcagcagagccagcagcatcatcgacgagctgttccaggacagattcttcaccagagagccccaggacacctactag

SEQ ID NO: 121503 - DNA, 816 bp, Artificial Sequence
  derived and/or modified sequence
atgatgaagaccctgctgctgttcgtgggcctgctgctgacctgggagagcggccaggtgctgggcgaccagaccgtgagcgacaacgagctgcaggagatgagcaaccagggcagcaagtacgtgaacaaggagatccagaacgccgtgaacggcgtgaagcagatcaagaccctgatcgagaagaccaacgaggagagaaagaccctgctgagcaacctggaggaggccaagaagaagaaggaggacgccctgaacgagaccagagagagcgagaccaagctgaaggagctgcccggcgtgtgcaacgagaccatgatggccctgtgggaggagtgcaagccctgcctgaagcagacctgcatgaagttctacgccagagtgtgcagaagcggcagcggcctggtgggcagacagctggaggagttcctgaaccagagcagccccttctacttctggatgaacggcgacagaatcgacagcctgctggagaacgacagacagcagacccacatgctggacgtgatgcaggaccacttcagcagagccagcagcatcatcgacgagctgttccaggacagcctgatgcccttcagcccctacgagcccctgaacttccacgccatgttccagcccttcctggagatgatccacgaggcccagcaggccatggacatccacttccacagccccgccttccagcacccccccaccgagttcatcagagagggcgacgacgacagaaccgtgtgcagagagatcagacacaacagcaccggctgcctgagaatgaaggaccagtgcgacaagtgctag

SEQ ID NO: 121504 - protein, 112 aa, Artificial Sequence
  derived and/or modified sequence
MEKILILLLVALSVAYAAPGPRGIIINLENGELCMNSAQCKSNCCQHSSALGLARCTSMASENSECSVKTLYGIYYKCPCERGLTCEGDKTIVGSITNTNFGICHDAGRSKQ

SEQ ID NO: 121505 - DNA, 339 bp, Artificial Sequence
  derived and/or modified sequence
atggagaagatcttgattctcctgctagtggctctgtccgtcgcgtatgcggcaccaggccctcgaggtattattataaacctggagaatggcgaactctgcatgaacagcgcccagtgcaagagtaactgctgccaacactcctctgcactaggcctggctcgctgtaccagcatggcttcagagaattctgagtgctctgttaagacgctctatggaatctactacaaatgcccctgcgaaagggggttaacctgcgaaggggataagaccatcgtcggatcgataacaaataccaacttcggcatctgccatgacgccggccgtagtaaacagtag

SEQ ID NO: 121506 - DNA, 339 bp, Artificial Sequence
  derived and/or modified sequence
atggagaagatcctgatcctgctgctggtggccctgtctgtggcctatgctgcccctggcccccggggcatcatcatcaacctggagaatggagagctgtgcatgaacagcgcccagtgcaagagcaactgctgccagcacagcagcgccctgggcctggcccgctgcacctccatggccagcgagaacagtgaatgttctgtgaagaccctgtatggcatctactacaagtgcccctgtgagcggggcctgacctgtgagggggacaagaccatcgtgggcagcatcaccaacaccaactttggcatctgccatgatgctggccgcagcaagcagtag

SEQ ID NO: 121507 - DNA, 339 bp, Artificial Sequence
  derived and/or modified sequence
atggagaagatcctgatcctgctgctggtggccctgagcgtggcctacgcggcccccgggcccagaggaatcatcatcaacctggaaaacggagaactgtgcatgaatagcgctcagtgcaagtctaattgctgccaacactcatccgctcttggtctggcccgctgtactagtatggcgtcagagaacagcgagtgtagcgtgaagaccctttacggcatctattacaaatgcccatgtgagcgagggctcacgtgcgaaggggacaagacaatcgtcggtagtatcacgaatactaacttcggcatctgccacgatgccggaagaagcaagcaatag

SEQ ID NO: 121508 - DNA, 339 bp, Artificial Sequence
  derived and/or modified sequence
atggagaaaatactgatacttttgcttgtggccctgtcagtagcctatgccgctccagggcctagagggatcataatcaaccttgaaaacggcgaactgtgtatgaacagcgctcaatgcaagagcaactgttgtcagcactcctctgcactaggtctcgctcggtgcacgagtatggcctcagaaaattccgaatgttccgttaaaaccctctacggaatttattacaagtgtccctgtgaacgcggtctcacttgcgaaggcgataaaaccatcgtcggatccatcactaacaccaattttgggatctgtcacgatgctgggagatctaaacagtag

SEQ ID NO: 121509 - DNA, 526 bp, Artificial Sequence
  derived and/or modified sequence
ccacaccagctgtcccactcaccatggagaagatcctgatcctcctgcttgtcgccctctctgtggcctatgcagctcctggcccccgggggatcattatcaacctggagaacggtgagctctgcatgaatagtgcccagtgtaagagcaattgctgccagcattcaagtgcgctgggcctggcccgctgcacatccatggccagcgagaacagcgagtgctctgtcaagacgctctatgggatttactacaagtgtccctgtgagcgtggcctgacctgtgagggagacaagaccatcgtgggctccatcaccaacaccaactttggcatctgccatgacgctggacgctccaagcagtgagactgcccacccactcccacacctagcccagaatgctgtaggccactaggcgcaggggcatctctcccctgctccagcgcatctcccgggctggccacctccttgaccagcatatctgttttctgattgcgctcttcacaattaaaggcctcctgcaaaccttt

SEQ ID NO: 121510 - DNA, 339 bp, Artificial Sequence
  derived and/or modified sequence
atggagaagatcctgatcctgctgctggtggccctgagcgtggcctacgccgcccccggccccagaggcatcatcatcaacctggagaacggcgagctgtgcatgaacagcgcccagtgcaagagcaactgctgccagcacagcagcgccctgggcctggccagatgcaccagcatggccagcgagaacagcgagtgcagcgtgaagaccctgtacggcatctactacaagtgcccctgcgagagaggcctgacctgcgagggcgacaagaccatcgtgggcagcatcaccaacaccaacttcggcatctgccacgacgccggcagaagcaagcagtag

SEQ ID NO: 121511 - protein, 218 aa, Artificial Sequence
  derived and/or modified sequence
MAELDPFGAPAGAPGGPALGNGVAGAGEEDPAAAFLAQQESEIAGIENDEAFAILDGGAPGPQPHGEPPGGPDAVDGVMNGEYYQESNGPTDSYAAISQVDRLQSEPESIRKWREEQMERLEALDANSRKQEAEWKEKAIKELEEWYARQDEQLQKTKANNRAAEEAFVNDIDESSPGTEWERVARLCDFNPKSSKQAKDVSRMRSVLISLKQAPLVH

SEQ ID NO: 121512 - DNA, 657 bp, Artificial Sequence
  derived and/or modified sequence
atggccgagctggacccgtttggggccccagccggcgcccctggaggccctgctctcgggaatggcgtggctggagctggggaggaggatccagctgcagccttcctggcgcagcaagagtccgaaattgctggaatcgagaatgatgaagcatttgccattttggacgggggagcccctggtccacaaccacatggcgaacctcccgggggccccgacgccgtcgacggtgtaatgaatggagagtactaccaggagtcgaacggccccaccgacagctacgcagctattagccaggtcgacagattgcaatctgagcctgagagcatacgcaaatggagggaggagcaaatggaacggttggaggcactcgacgctaactcaaggaagcaggaggccgaatggaaggagaaggcgatcaaggagctggaagaatggtacgcgagacaggatgaacaactgcagaaaaccaaggctaataaccgcgcagctgaggaagccttcgtaaacgatatcgatgagagttcaccagggacagagtgggaacgcgtcgcacgcctttgcgacttcaaccctaagagttccaagcaggccaaggatgtttccagaatgcgttctgtgcttattagcctcaagcaggcacccttggtgcattag

SEQ ID NO: 121513 - DNA, 657 bp, Artificial Sequence
  derived and/or modified sequence
atggccgagctggacccctttggagccccagctggggcccctgggggccctgccctgggcaatggagtggccggggccggggaggaggaccctgctgctgccttcctggcccagcaggagagcgagattgctggcattgaaaatgatgaggcctttgccatcctggatggaggagcccctggcccccagccccatggagagcccccaggcggcccagatgctgtggatggagtgatgaatggagagtactaccaggagagcaatggccccacagacagctatgctgccatcagccaggtggaccggctgcagagcgagcctgagagcatcaggaagtggagggaggagcagatggagcggctggaggccctggatgccaacagcaggaagcaggaggccgagtggaaggagaaggccatcaaggagctggaggagtggtacgcccggcaggatgagcagctgcagaagaccaaggccaacaacagagctgctgaggaggcctttgtgaatgacattgatgagagcagccctggaacagagtgggagcgggtggcccggctgtgtgacttcaaccccaagagcagcaagcaggccaaggatgtgtccaggatgaggtctgtgctgatcagcctgaagcaggcccccctggtgcactag

SEQ ID NO: 121514 - DNA, 657 bp, Artificial Sequence
  derived and/or modified sequence
atggccgagctggaccccttcggcgcccccgccggcgcccccggcggtcccgcacttgggaatggggtcgccggtgctggggaagaggatccagcagcagcttttctggcacaacaggaatcggaaattgctggaattgagaatgatgaggcgttcgctatccttgacggtggagcacccgggccccagccacatggggagccgcccggcgggccggacgctgttgacggagtgatgaatggtgagtattatcaggaatctaatggcccaaccgatagttacgccgctatttctcaggttgatagactccagagcgaacccgagtctattaggaagtggagggaggaacagatggagagactggaggctttagacgctaatagtagaaagcaagaggcagaatggaaagagaaggcgattaaagaactagaagaatggtatgctcgccaggatgagcaactgcagaagaccaaggccaacaatagggccgctgaagaggccttcgttaatgacattgacgagtctagccctggaaccgaatgggaaagagtggcccggttatgcgatttcaaccccaagagttccaaacaggctaaggacgtgagccgaatgaggagtgtcctaatctcactgaaacaggcaccactggtgcactag

SEQ ID NO: 121515 - DNA, 657 bp, Artificial Sequence
  derived and/or modified sequence
atggccgaactggatcctttcggcgcaccagcaggcgcacccggaggccctgctctcggcaatggcgtcgccggagctggagaagaagatcccgctgctgccttcttagctcagcaggagtctgagattgccggaatcgagaacgacgaggccttcgccatcctggatggcggtgcacccggacctcaaccacatggagagcccccaggaggacccgacgccgtcgatggagtaatgaatggggagtactaccaggaaagcaatggtcccactgacagctatgccgcaatcagccaggtggaccggcttcagagcgagccggagtcgatacggaagtggagagaggagcagatggaacggctggaggctttggacgctaacagccggaagcaagaggctgaatggaaggagaaagctattaaagaactggaagagtggtacgcgaggcaggatgaacaactgcaaaagactaaggccaataatcgtgccgctgaggaagcttttgttaacgatattgacgaatcctccccaggtacggaatgggagcgtgtagctcgattgtgtgatttcaacccaaaaagctctaagcaggcaaaagatgtcagccgaatgagatcagttctcatttccctaaaacaggcaccactcgttcattag

SEQ ID NO: 121516 - DNA, 1073 bp, Artificial Sequence
  derived and/or modified sequence
gctttacccgtctccctcctggcgcttgtcctcctctcccagtcggcaccacagcggtggctgccgggcgtggtgtcggtgggtcggttggtttttgtctcaccgttggtgtccgtgccgttcagttgcccgccatggctgagctggatccgttcggcgcccctgccggcgcccctggcggtcccgcgctggggaacggagtggccggcgccggcgaagaagacccggctgcggccttcttggcgcagcaagagagcgagattgcgggcatcgagaacgacgaggccttcgccatcctggacggcggcgcccccgggccccagccgcacggcgagccgccggggggtccggatgctgttgatggagtaatgaatggtgaatactaccaggaaagtaatggtccaacagacagttatgcagctatttcacaagtggatcgattgcagtcagagcctgaaagtatccgtaaatggagagaagaacaaatggaacgcttggaagcccttgatgccaattctcggaagcaagaagcagagtggaaagaaaaggcaataaaggagctagaagaatggtatgcaagacaggacgagcagctacagaaaacaaaagcaaacaacagggcagcagaagaagcctttgtaaatgacattgacgagtcgtccccaggcactgagtgggaacgggtggcccggctgtgtgactttaaccccaagtctagcaagcaggccaaagatgtctcccgcatgcgctcagtcctcatctccctcaagcaggccccgctggtgcactgaagagccaccctgtggaaacactacatctgcaatatcttaatcctactcagtgaagctcttcacagtcattggattaattatgttgagttcttttggaccaaacctttttgtctttagagttgttcattgtttgtgattgcatgtttccttccttcaactgtgttctccctggcattcagagaggagggagaggaggaagaggaaggggagggaagcttcccaagagtagcctcaacctgtgcttctgtgcattattctgagaataaatttctgtttcaaact

SEQ ID NO: 121517 - DNA, 657 bp, Artificial Sequence
  derived and/or modified sequence
atggccgagctggaccccttcggcgcccccgccggcgcccccggcggccccgccctgggcaacggcgtggccggcgccggcgaggaggaccccgccgccgccttcctggcccagcaggagagcgagatcgccggcatcgagaacgacgaggccttcgccatcctggacggcggcgcccccggcccccagccccacggcgagccccccggcggccccgacgccgtggacggcgtgatgaacggcgagtactaccaggagagcaacggccccaccgacagctacgccgccatcagccaggtggacagactgcagagcgagcccgagagcatcagaaagtggagagaggagcagatggagagactggaggccctggacgccaacagcagaaagcaggaggccgagtggaaggagaaggccatcaaggagctggaggagtggtacgccagacaggacgagcagctgcagaagaccaaggccaacaacagagccgccgaggaggccttcgtgaacgacatcgacgagagcagccccggcaccgagtgggagagagtggccagactgtgcgacttcaaccccaagagcagcaagcaggccaaggacgtgagcagaatgagaagcgtgctgatcagcctgaagcaggcccccctggtgcactag

SEQ ID NO: 121518 - protein, 1583 aa, Artificial Sequence
  derived and/or modified sequence
MAQILPVRFQEHFQLQNLGINPANIGFSTLTMESDKFICIREKVGEQAQVTIIDMSDPMAPIRRPISAESAIMNPASKVIALKAGKTLQIFNIEMKSKMKAHTMAEEVIFWKWVSVNTVALVTETAVYHWSMEGDSQPMKMFDRHTSLVGCQVIHYRTDEYQKWLLLVGISAQQNRVVGAMQLYSVDRKVSQPIEGHAAAFAEFKMEGNAKPATLFCFAVRNPTGGKLHIIEVGQPAAGNQPFVKKAVDVFFPPEAQNDFPVAMQIGAKHGVIYLITKYGYLHLYDLESGVCICMNRISADTIFVTAPHKPTSGIIGVNKKGQVLSVCVEEDNIVNYATNVLQNPDLGLRLAVRSNLAGAEKLFVRKFNTLFAQGSYAEAAKVAASAPKGILRTRETVQKFQSIPAQSGQASPLLQYFGILLDQGQLNKLESLELCHLVLQQGRKQLLEKWLKEDKLECSEELGDLVKTTDPMLALSVYLRANVPSKVIQCFAETGQFQKIVLYAKKVGYTPDWIFLLRGVMKISPEQGLQFSRMLVQDEEPLANISQIVDIFMENSLIQQCTSFLLDALKNNRPAEGLLQTWLLEMNLVHAPQVADAILGNKMFTHYDRAHIAQLCEKAGLLQQALEHYTDLYDIKRAVVHTHLLNPEWLVNFFGSLSVEDSVECLHAMLSANIRQNLQLCVQVASKYHEQLGTQALVELFESFKSYKGLFYFLGSIVNFSQDPDVHLKYIQAACKTGQIKEVERICRESSCYNPERVKNFLKEAKLTDQLPLIIVCDRFGFVHDLVLYLYRNNLQRYIEIYVQKVNPSRTPAVIGGLLDVDCSEEVIKHLIMAVRGQFSTDELVAEVEKRNRLKLLLPWLESQIQEGCEEPATHNALAKIYIDSNNSPECFLRENAYYDSSVVGRYCEKRDPHLACVAYERGQCDLELIKVCNENSLFKSEARYLVCRKDPELWAHVLEETNPSRRQLIDQVVQTALSETRDPEEISVTVKAFMTADLPNELIELLEKIVLDNSVFSEHRNLQNLLILTAIKADRTRVMEYISRLDNYDALDIASIAVSSALYEEAFTVFHKFDMNASAIQVLIEHIGNLDRAYEFAERCNEPAVWSQLAQAQLQKDLVKEAINSYIRGDDPSSYLEVVQSASRSNNWEDLVKFLQMARKKGRESYIETELIFALAKTSRVSELEDFINGPNNAHIQQVGDRCYEEGMYEAAKLLYSNVSNFARLASTLVHLGEYQAAVDNSRKASSTRTWKEVCFACMDGQEFRFAQLCGLHIVIHADELEELMCYYQDRGYFEELILLLEAALGLERAHMGMFTELAILYSKFKPQKMLEHLELFWSRVNIPKVLRAAEQAHLWAELVFLYDKYEEYDNAVLTMMSHPTEAWKEGQFKDIITKVANVELCYRALQFYLDYKPLLINDLLLVLSPRLDHTWTVSFFSKAGQLPLVKPYLRSVQSHNNKSVNEALNHLLTEEEDYQDAMQHAAESRDAELAQKLLQWFLEEGKRECFAACLFTCYDLLRPDMVLELAWRHNLVDLAMPYFIQVMREYLSKVDKLDALESLRKQEEHVTEPAPLVFDFDGHE

SEQ ID NO: 121519 - DNA, 4752 bp, Artificial Sequence
  derived and/or modified sequence
atggctcagattctgcctgtgcgcttccaggagcatttccagctgcagaatctaggtataaatccagcaaacatcggcttttcaactctgacgatggaatccgataagttcatttgtatacgagagaaggtgggggagcaggcccaggtgaccatcatcgatatgagcgatcctatggccccaatccgacgccctatctccgccgagtccgccattatgaacccagcctctaaggtcatcgccttaaaggcaggaaagacgctgcagatcttcaatatcgaaatgaagagtaagatgaaagcacacaccatggctgaggaggtgattttctggaagtgggtgtctgtgaacaccgtcgcactggtgaccgaaaccgccgtttatcattggagcatggaaggagatagtcagccaatgaagatgttcgaccggcacactagtttggtgggatgtcaagtgatccactacagaaccgatgagtaccagaagtggctgctcttagtcgggatctctgctcagcaaaatagggtcgtgggtgccatgcagctgtactccgtagataggaaggtcagtcagccaattgaagggcacgcggccgcctttgctgagtttaaaatggaagggaacgctaaacccgctacactgttctgctttgccgtgcgcaacccaaccggagggaagctccatataatcgaagtggggcaacctgccgccggcaatcagcccttcgtaaaaaaggctgtggatgtcttcttccccccggaagcacagaatgactttcctgtggccatgcaaattggggctaaacacggcgtcatttacctgattacaaaatacggctatttacacctttacgatctggaatccggagtttgtatttgcatgaaccgaatctctgctgacaccatattcgttactgcgccccacaagcccacaagcggaatcattggagtcaataagaagggccaggtcctctcagtttgcgttgaggaggataatattgtgaattacgccactaacgtgctccaaaatcccgacctaggacttcgattggctgtgcgatctaatctggcgggcgccgaaaagttgtttgtcaggaagtttaatacccttttcgctcaggggtcttacgctgaggcagccaaggtcgcggcttccgctccaaaggggatcctcagaactagagagacggtgcagaagtttcagtctatcccagcacagagtggtcaggccagtcctttattgcagtatttcggtatcctactggaccaaggacagttgaacaaactggagtctttggaactctgtcatctggtactgcagcaaggtcgtaagcagctgctcgagaaatggttaaaggaggataagttggagtgttctgaggaactcggtgatctggtgaagactactgaccctatgctggctctgtcagtatatctgcgcgcaaacgtcccatccaaggtgatacagtgtttcgccgaaaccggacagttccagaaaatcgtgctgtacgctaagaaggtggggtatactcctgactggatttttctgctgcgtggagtaatgaaaatttccccagaacaagggctccagttctctcgtatgttagtccaagatgaagagccacttgcgaatatctcacagatcgtggacatatttatggaaaattctctcattcagcagtgtaccagttttcttcttgatgcattgaaaaacaacaggccggctgaggggctgctgcagacttggctattagagatgaatctggtgcacgctcctcaggtcgcagatgctatcctgggtaacaagatgtttactcattacgatcgggctcacatcgcacagctctgcgagaaggcaggcctgcttcagcaggccctggaacattatacagacctgtacgatattaagagagccgtcgtacacacccatctcttgaatccagagtggttggtgaattttttcggtagtctctctgtggaggatagcgtggagtgtttgcatgcaatgttgtctgctaacatcaggcagaacttacagctttgtgtacaggtggcttcaaagtaccatgaacagctcggcacgcaagccctggtcgagttgttcgaatccttcaaaagctataaagggctgttttacttcttaggatccattgtgaatttctcacaggaccccgacgtccacctgaaatatattcaggctgcgtgtaagaccggccagatcaaagaggtggagagaatttgtagagaaagctcttgctataatcctgagcgcgtcaagaactttctcaaagaagcgaaacttacagatcagctccccctcataattgtctgcgacaggttcgggtttgtgcacgacttggttctctatttataccgcaataacttacaacgctacatcgaaatatatgtacagaaagttaacccttctcggacacctgcagtgattggcggactgctggatgtggactgttccgaggaggtgatcaagcacttgatcatggctgtgcgtggccagttcagtacggacgagctggtagctgaagtcgagaaacggaatcgcctgaagttgctgctcccgtggctggaaagccagatacaagaaggctgtgaagagccagccacgcataatgcattggccaagatctatattgatagcaataacagcccggagtgtttcctacgggagaatgcctactacgattcttctgtggttggaagatactgtgagaaaagggatccccatctggcttgcgttgcatacgaaagaggccagtgtgacctcgagctgatcaaggtgtgcaatgagaacagtctcttcaaatcagaagccaggtacctcgtctgtcggaaggatccagagctgtgggcccacgtactcgaagagaccaacccctctaggcgccagctcatagaccaggtagtccaaacagctctatccgagactcgtgaccccgaggaaatttctgtcactgttaaagcgttcatgactgctgacttgccaaatgagctgattgagttgctggagaagattgtgttagacaacagcgttttcagtgaacatagaaatttgcagaacctcctgatcctcacagcgatcaaagccgacagaaccagggtgatggagtatatatcaagattggacaattatgatgccctggacatagcttccatcgccgtctcttcggccctgtacgaagaggcctttactgtctttcataagtttgacatgaacgcctctgctatccaagtgcttatagagcacattggaaatctggatcgggcatatgagtttgctgaaagatgcaacgaacctgctgtatggtcccagttggcacaggcccagctgcagaaagacctagttaaggaggccattaactcatacatccggggcgatgaccctagcagttatctggaagtcgtccagagcgctagcagaagcaataattgggaggacctggttaagttcctgcagatggctcgaaaaaaggggcgggaaagttacatcgaaaccgagctcatcttcgccttagctaaaacatctagggtgagcgagctggaggattttattaacggtccgaacaacgcacacattcagcaggtgggcgacagatgctatgaagaaggtatgtacgaagcggccaaattactctactcgaatgtatctaattttgctaggctggccagcactcttgtgcatctaggcgagtatcaagccgccgtggataattcccgcaaagcctcctcaacccgtacttggaaggaagtctgcttcgcctgtatggatggacaggagttccgcttcgcacagctttgcgggcttcatattgttatacacgccgacgaactggaagagctgatgtgctattaccaagatcgaggctatttcgaggaactgatcctacttctagaagccgccctggggttggaaagggctcatatggggatgttcactgaattagccattctatacagcaagtttaaaccccaaaaaatgctagagcatctggaattattttggtctagggtcaatatccccaaggtgttacgtgcggcagagcaggcccatctgtgggccgaacttgtgttcctgtacgataagtacgaagagtacgacaatgcggtcctgacaatgatgagccatcccaccgaggcctggaaggagggacagtttaaagatatcatcacaaaagttgccaacgtagaactgtgctatagagcccttcaattttacctggactataagcccctgctgattaacgacctactcctggtcctgagcccacgattagaccacacctggaccgtgtcatttttctctaaagcaggacagctgccacttgtgaagccttacctccggtctgtccagtcccataacaacaaatccgtgaacgaagcactcaatcatttgctgacagaagaggaggattaccaggatgctatgcaacatgcagcggaatcccgtgacgccgaattggctcaaaaattactccagtggttcttagaagaggggaaaagagagtgtttcgccgcttgcctttttacatgctacgacctactaagacctgatatggtgctggagttagcgtggcgacacaacttagtggatctcgcaatgccgtacttcattcaggtgatgagagagtaccttagcaaagtagacaagctggatgccctcgaatcactgagaaagcaggaagagcacgtgaccgagccagccccactggtcttcgatttcgacggtcatgagtag

SEQ ID NO: 121520 - DNA, 4752 bp, Artificial Sequence
  derived and/or modified sequence
atggcccagatcctgcctgtgcgcttccaggagcacttccagctgcagaacctgggcatcaacccagccaacatcggcttcagcaccctgaccatggagagtgacaagttcatctgcatccgggagaaggtgggggagcaggcccaggtgaccatcatcgacatgtctgaccccatggcccccatcagaagacccatctctgctgagagcgccatcatgaacccagccagcaaggtgattgccctgaaggccggcaagaccctgcagatcttcaacatcgagatgaagagcaagatgaaggcccacaccatggccgaggaggtgatcttctggaagtgggtgtctgtgaacacagtggccctggtgacagaaacagctgtgtaccactggagcatggagggggacagccagcccatgaagatgtttgacagacacaccagcctggtgggctgccaggtgatccactacagaacagatgagtaccagaagtggctgctgctggtgggcatcagcgcccagcagaacagagtggtgggcgccatgcagctgtacagcgtggacaggaaggtgtcccagcccatcgagggccacgccgccgcctttgctgagttcaagatggagggcaatgccaagccagccaccctcttctgctttgctgtgaggaaccccaccggcggcaagctgcacatcatcgaggtgggccagcctgctgctggcaaccagccctttgtgaagaaggctgtggatgtgttcttccccccagaggcccagaatgacttccctgtggccatgcagatcggggccaagcacggcgtcatctacctgatcaccaagtatggctacctgcacctgtatgacctggagagcggcgtgtgcatctgcatgaaccgcatctctgctgacaccatctttgtgacagccccccacaagcccaccagcggcatcatcggcgtgaacaagaagggccaggtgctgtctgtgtgtgtggaggaggacaacatcgtgaactatgccaccaacgtgctgcagaacccagacctgggcctgcggctggccgtgcgcagcaacctggccggggctgagaagctgtttgtgaggaagttcaacaccctgtttgcccagggcagctatgcagaggccgccaaggtggccgccagcgcccccaagggcatcctgcggacccgggagaccgtgcagaagttccagagcatcccagcccagagcggccaggccagccccctgctgcagtacttcggcatcctgctggaccagggccagctgaacaagctggagagcctggagctgtgccacctggtgctgcagcagggcaggaagcagctgctggagaagtggctgaaggaggacaagctggagtgcagcgaggagctgggggacctggtgaagaccacagaccccatgctggccctgtctgtgtacctgcgggccaacgtgcccagcaaggtgatccagtgctttgctgagaccggccagttccagaagatcgtgctgtatgccaagaaggtgggctacaccccagactggatcttcctgctgcggggcgtgatgaagatcagccctgagcagggcctgcagttcagcaggatgctggtgcaggatgaggagcccctggccaacatcagccagatcgtggacatcttcatggagaacagcctcatccagcagtgcaccagcttcctgctggatgccctgaagaacaacagacctgctgagggcctgctgcagacctggctgctggagatgaacctggtgcacgccccccaggtggctgatgccatcctgggcaacaagatgttcacccactatgaccgggcccacatcgcccagctgtgtgagaaggccggcctgctgcagcaggccctggagcactacacagacctgtatgacatcaagagagctgtggtgcacacccacctgctgaaccctgagtggctggtgaacttcttcggcagcctgtctgtggaggacagcgtggagtgcctgcacgccatgctgagcgccaacatccggcagaacctgcagctgtgtgtgcaggtggccagcaagtaccacgagcagctgggcacccaggccctggtggagctgtttgagagcttcaagagctacaagggcctcttctacttcctgggcagcatcgtgaacttcagccaggaccctgatgtgcacctgaagtacatccaggccgcctgcaagacaggccagatcaaggaggtggagcgcatctgccgggagagcagctgctacaaccctgagcgggtgaagaacttcctgaaggaggccaagctgacagaccagctgcccctcatcatcgtgtgtgacagatttggatttgtgcatgacctggtgctgtacctgtacagaaacaacctgcagcgctacatcgagatctacgtgcagaaggtgaaccccagcaggaccccagctgtgattggaggcctgctggatgtggactgcagcgaggaggtgatcaagcacctgatcatggctgtgcggggccagttcagcacagatgagctggtggccgaggtggagaagaggaaccggctgaagctgctgctgccctggctggagagccagatccaggagggctgtgaggagcccgccacccacaatgccctggccaagatctacatcgacagcaacaacagccctgagtgcttcctgcgggagaatgcctactatgacagctctgtggtgggccgctactgtgagaagagggacccccacctggcctgtgtggcctatgagcggggccagtgtgacctggagctgatcaaggtgtgcaatgaaaacagcctcttcaagtctgaggcccgctacctggtgtgcaggaaggaccctgagctgtgggcccacgtgctggaggagaccaaccccagccggcggcagctgattgaccaggtggtgcagacagccctgtctgagacccgggaccctgaggagatctctgtgacagtgaaggccttcatgacagctgacctgcccaatgagctgattgagctgctggagaagatcgtgctggacaacagcgtcttcagcgagcacaggaacctgcagaacctgctgatcctgacagccatcaaggctgacaggaccagggtgatggagtacatcagccggctggacaactatgatgccctggacatcgccagcattgctgtgagcagcgccctgtatgaggaggccttcaccgtcttccacaagtttgacatgaatgccagcgccatccaggtgctgattgagcacatcggcaacctggaccgggcctatgaatttgctgagcgctgcaatgaacctgctgtgtggagccagctggcccaggcccagctgcagaaggacctggtgaaggaggccatcaacagctacatcagaggagatgaccccagcagctacctggaggtggtgcagagcgccagccgcagcaacaactgggaggacctggtgaagttcctgcagatggccaggaagaagggccgggagagctacattgaaacagagctgatctttgccctggccaagaccagccgggtgtctgagctggaggacttcatcaatggccccaacaatgcccacatccagcaggtgggggaccgctgctatgaggagggcatgtatgaagctgccaagctgctgtacagcaatgtgagcaactttgcccggctggccagcaccctggtgcacctgggggagtaccaggccgctgtggacaacagcaggaaggccagcagcaccaggacctggaaggaggtgtgctttgcctgcatggatggccaggagttccgctttgcccagctgtgtggcctgcacatcgtcatccacgcagatgagctggaggagctgatgtgctactaccaggaccggggctactttgaggagctgatcctgctgctggaggccgccctgggcctggagcgggcccacatgggcatgttcacagagctggccatcctgtacagcaagttcaagccccagaagatgctggagcacctggagctgttctggagccgggtgaacatccccaaggtgctgcgggctgctgagcaggcccacctgtgggccgagctggtgttcctgtatgacaagtatgaggagtatgacaatgctgtgctgaccatgatgagccaccccacagaggcctggaaggagggccagttcaaggacatcatcaccaaggtggccaacgtggagctgtgctaccgggccctgcagttctacctggactacaagcccctgctgatcaatgacctgctgctggtgctgagcccccggctggaccacacctggacagtgtccttcttcagcaaggccggccagctgcccctggtgaagccctacctgcggtctgtgcagagccacaacaacaagtctgtgaatgaggccctgaaccacctgctgacagaggaggaggactaccaggatgccatgcagcacgccgctgagagcagagatgctgagctggcccagaagctgctgcagtggttcctggaggagggcaagagagaatgttttgctgcctgcctcttcacctgctatgacctgctgcggccagacatggtgctggagctggcctggaggcacaacctggtggacctggccatgccctacttcatccaggtgatgagggagtacctgagcaaggtggacaagctggatgccctggagagcctgaggaagcaggaggagcacgtgacagagcccgcccccctggtgtttgattttgatggccacgagtag

SEQ ID NO: 121521 - DNA, 4752 bp, Artificial Sequence
  derived and/or modified sequence
atggcccagatcctgcccgtgcggttccaggagcacttccagctgcagaacttggggatcaatccagctaacattggtttcagcacactgaccatggagtcggataaattcatttgtattcgggagaaggtcggtgaacaagcccaggttactatcattgacatgtcagaccctatggctcccatccggagacctataagtgctgagagtgctataatgaaccccgcctccaaggtgatagcattaaaagccgggaaaacactgcagattttcaacattgaaatgaaaagtaaaatgaaagcccatacaatggctgaagaagtcatcttctggaaatgggttagcgtgaacaccgtggccttggtaacggagactgctgtctaccactggtccatggagggcgatagccagcccatgaagatgtttgacaggcacacaagcctggtgggctgtcaagtcatacattataggacagacgaataccagaagtggctgttactggttggtatttcggctcaacaaaatcgggtggtgggggctatgcagctctattccgtggacagaaaagtttcgcagcccattgagggccatgctgccgctttcgccgagtttaaaatggaggggaatgccaagcccgctactctgttctgcttcgcagtgcgaaatccaacaggcgggaagctccacataattgaggttggccaacccgccgcaggtaatcaaccttttgtaaaaaaagccgtagatgtgtttttcccaccagaagctcagaatgattttcctgtcgccatgcagattggagcaaagcatggtgtgatctacctcattacaaagtacgggtatctccatttgtacgacctggagtccggggtgtgtatctgtatgaatcgcatctcggccgatacgatcttcgtcacggcgccccacaagcctacctctggcataataggagtgaacaaaaagggtcaggtactgagcgtctgcgtcgaagaggacaatatcgtcaattacgccacgaacgtccttcaaaatcccgaccttggcctccggcttgctgtacgctctaatctggctggcgccgagaagctttttgtcagaaagtttaatacactctttgcccaggggagctacgccgaggctgctaaggtggctgcatctgcccctaagggaatcttaaggacacgcgaaacagtgcagaagtttcagtctatacctgctcagtctggacaggcctcgccattactccagtacttcgggatcctgctcgaccagggccaattgaataagctcgaaagccttgaactttgtcatttagtgctgcagcaaggaaggaaacaactgctggagaagtggctgaaggaggataaattagagtgcagtgaggaacttggagacctcgtgaaaactacagacccaatgcttgctctctctgtataccttagggccaacgtcccaagtaaagtcatacaatgcttcgcagagaccggtcagttccaaaagatcgtgctctacgctaaaaaagttgggtatactcccgattggatattcttactccggggggtgatgaagatatcacccgaacagggcctacagttttcgaggatgctggtccaggatgaagaacctttggccaatatctcccagatcgtagatatctttatggagaattctttaattcagcagtgcaccagttttctgctggatgccctgaagaataacaggcccgcggaggggttgctgcagacctggctgcttgaaatgaatctggtccacgctcctcaagtcgctgacgctattctcggcaacaagatgttcactcactatgatcgcgcacatatcgctcaactgtgcgagaaggccgggctgctccagcaggccctggagcactataccgacctctacgacatcaaacgagccgtagtgcacacgcacctcttaaatccagaatggcttgtgaatttttttgggagcctgtccgtggaggattcagttgagtgcctccatgccatgttaagcgcaaatattcgccagaacttgcaactctgcgtacaggtcgccagcaaataccacgaacagcttggaacccaggccttggtggagctgtttgaatcttttaaaagctataaaggcttattttactttttgggatctatcgttaacttttcccaggatcccgacgtccatctcaaatacatccaggcggcatgcaaaacaggacagattaaagaagtggagaggatctgcagagaaagtagctgctacaaccccgagcgagtcaagaacttcctgaaggaggccaagcttacggatcagctgccgttgataatcgtgtgtgacaggttcggctttgtacacgacttagtgttgtatttataccggaataacctgcagcgctatatcgagatatatgtgcagaaggtaaacccatcacggacacccgcagtgatcggaggcctattggatgtggactgctctgaggaggtcattaagcacctcatcatggctgttcgcggccagttcagtaccgacgagcttgttgccgaagtggaaaagcgtaaccggctgaagttactgctcccctggctggaatcacagattcaggagggatgcgaggaacccgccacacacaacgcgttggccaagatatacatcgattctaacaacagccctgagtgcttcctgagagagaatgcatattacgatagcagcgtcgtcgggcggtactgtgagaaaagggatccccatttggcttgtgttgcctacgagagaggtcagtgtgacttggagttaattaaagtgtgcaatgaaaatagtctgttcaaaagtgaggccagatatctcgtctgcaggaaagatcctgagctgtgggcgcatgttctagaagaaactaatcctagtcgaagacaactaattgaccaggtggtccagacagccctttcagaaactagggacccggaggaaatttcggtgacagtgaaggcttttatgactgccgatctgcctaacgagctgatcgaactactcgaaaagatcgtgttggacaatagcgttttcagcgaacaccggaatcttcagaatttactcattctgacagcaatcaaggccgataggactcgtgtgatggagtatatctcgcgtctggacaactacgatgcgttggacatcgcctctattgcagttagcagcgcgttatacgaagaggccttcactgttttccataagtttgacatgaatgcctctgctattcaagtgctgatcgaacatattggaaacctggatagggcctacgagtttgccgagaggtgtaacgagcccgctgtgtggtctcaactggcacaggcccagctacagaaggacctcgttaaggaagccataaactcatatatccggggtgacgatccatcctcttatctggaagtggttcagagtgcaagtcggagtaacaactgggaggacctggttaaattcctgcagatggcacgtaagaagggccgtgagtcgtacatagaaacggaactgatctttgccctcgcaaaaacttctcgggtaagtgaactagaggacttcatcaatggacccaataacgctcacatccaacaagtgggggacagatgttatgaggaaggtatgtatgaggcagctaaactgttgtactctaatgtctccaatttcgcacgccttgcaagcaccctggtgcacctgggcgagtaccaggcagctgtagataacagtcgaaaggcatcttctaccagaacctggaaggaggtttgttttgcttgtatggacgggcaggaattcagatttgctcagctctgcggcctacacattgtaatccacgccgacgagctggaggagctcatgtgctactaccaggacagaggatactttgaagagcttatattactcctggaagcggccctcggactcgaacgcgcacacatgggcatgttcaccgagctggccatactttatagtaagttcaagccccaaaagatgctcgagcatttggagctgttctggagccgcgtgaacatccctaaggtactccgggctgctgaacaggcccacttatgggccgaactagtatttctgtacgacaagtacgaggaatatgataatgccgtcctgactatgatgagccaccccaccgaggcctggaaagagggacagttcaaagacatcattacaaaagttgcaaatgtcgagctttgttacagagccctgcagttttacctagattataaacccctgctgatcaatgatctgctgctggtcttatccccccggctcgaccatacctggaccgtgagcttcttcagcaaggcaggccagctgccactggtgaagccatatctgaggtcagtacagtcccacaacaacaagagcgttaatgaggccctgaaccatctgttaaccgaggaggaagattaccaggatgccatgcagcacgctgcagaatcccgcgacgctgagctggctcaaaaactattacaatggtttctcgaagaaggcaaaagggaatgtttcgcagcatgtctgttcacgtgctatgatctgctgcgcccggatatggtcctggagttggcctggcgacacaacctcgtcgatctcgcgatgccttacttcattcaggtgatgagagaatatctgagtaaggtggacaagctcgacgcactggaaagcctcagaaagcaagaggaacatgtaaccgagcccgcacctctggtcttcgattttgatggccacgaatag

SEQ ID NO: 121522 - DNA, 4752 bp, Artificial Sequence
  derived and/or modified sequence
atggctcaaattctgccggtcaggttccaggagcacttccagctccaaaatttaggcattaatcccgcaaatatcggcttttcgacgctgaccatggagtccgataagttcatctgcatccgggaaaaagtaggggaacaagctcaggtgactattatcgatatgtccgatccaatggcacccattagaagacccattagcgccgaatccgccattatgaatccagccagcaaagtaatcgccttgaaagccggaaaaacactgcaaatctttaacatcgagatgaagagtaaaatgaaagcccacacaatggcagaggaagtgatcttctggaagtgggtaagtgtaaacacagtggcgcttgtaacagagactgcggtctatcactggagtatggaaggcgactcccagcccatgaaaatgtttgatcgacatacatcactcgtgggttgccaagtcatacactatcgaaccgacgagtaccagaaatggctattgctggttggcatctctgctcagcaaaacagggtagtgggcgctatgcaactgtattctgtggataggaaagtgtcacagcccatcgagggccatgccgctgcgtttgctgagtttaaaatggagggtaacgctaagcctgctacattgttctgcttcgccgtgcgcaaccctactggtggcaagctccatattatagaggttggtcaacctgcagctggtaaccagccatttgtcaaaaaagccgtagacgtgttctttccccctgaggcacagaatgatttccccgtggctatgcaaatcggcgctaagcacggcgtcatctacttaattacgaaatacgggtatctgcatctgtacgacctggaatctggcgtctgtatctgtatgaacaggatcagcgccgacaccatattcgtgacggctccgcataaaccaacttccggtattattggtgttaacaagaagggccaagtattatccgtgtgcgtggaggaagataatatcgtcaactacgcaacaaacgtgctgcagaatcccgacctaggcctaaggctagcagtcagatcaaacctggccggtgcagaaaagctcttcgtgcggaagttcaataccttgtttgcacagggcagctacgccgaggcagcaaaggtggcagcaagtgcgcctaagggaattctgagaaccagggagaccgtccagaagttccagagtattccagcccagtctggccaggccagtcccctactccagtattttggtattctccttgaccagggccagctgaataagctggagtcactggagttatgccacctcgttctgcagcagggccgtaaacagctgttggaaaaatggctgaaggaagataaactggagtgtagcgaagagttgggcgacctggtgaagactactgacccaatgcttgccctgagcgtttatttgagggctaatgtgccttccaaggtgatccagtgcttcgcagagactggccagtttcagaagattgtcctgtatgcaaagaaagtgggctatacacccgactggattttcttgctcagaggtgtgatgaaaatatctcctgagcaggggctccaattctccaggatgttggttcaggatgaggaacccctcgcaaacatatcacaaattgtagatatttttatggagaacagcctcattcagcagtgtaccagtttcctgcttgacgccttaaaaaataacaggcctgccgaggggttactgcaaacatggctgctggaaatgaatctggtacatgcccctcaagtggccgatgctatactgggaaataaaatgtttacccactacgatcgggctcacattgcacaattgtgtgagaaggccggattgctgcagcaggcactggagcattacactgacctctatgatattaaacgtgctgtagtacatactcaccttctcaatccggagtggctggtcaacttcttcggttcactgagcgtggaggattcagtggaatgtctccacgccatgttgtcagccaatattcgccaaaatctccaactttgtgtacaggttgccagcaagtatcatgagcaactggggacacaagcactggttgaactgttcgagtcttttaaatcatacaaggggttgttttatttcctgggatcaattgtgaacttctctcaggaccctgatgtccacctgaaatatattcaagctgcctgtaaaaccggccagatcaaggaggtggaaagaatatgcagggagagctcttgttacaacccagaaagggtaaagaacttcctcaaggaagctaagctaaccgatcagcttccgctgataatagtctgtgatagattcggcttcgttcatgatctggtactctatctgtatcggaataacctccagaggtacatcgagatatatgttcagaaagttaatccatccagaacacctgcggttataggcggactgctggatgttgattgcagtgaggaagtgatcaaacatctgattatggctgtgaggggtcagtttagcacggacgagctagtcgccgaggtggaaaagagaaaccggctgaagcttttactgccatggctggagagtcagattcaggagggctgtgaggagccagcaacacataacgccctggccaaaatttatatagattccaataattccccagagtgctttctgagggagaatgcatactatgacagcagcgttgttggccgttactgcgaaaaacgggatcctcatctggcttgtgttgcttatgaacgcggacagtgcgatttagagctgattaaggtctgtaacgagaactccctgtttaagtcagaggctagatacctggtctgtcggaaagatcctgagttatgggcgcatgttttagaggagactaatccgagccggaggcagttaatcgatcaggtggttcagactgccttatccgagacacgagacccagaagagatatcagttaccgtaaaagcttttatgacagcagaccttccaaacgagctgatcgagctgctggagaaaattgtccttgacaactctgtcttctccgagcaccgtaatttacaaaacctgctgatccttactgcaatcaaagcagaccggacccgagtgatggaatacatcagcagattagataactatgacgctcttgacatcgcctccatcgctgttagcagcgccctatatgaagaggccttcacagtttttcataagtttgatatgaacgcttccgccattcaggtgctcattgaacatatcggcaatttggaccgggcatacgagtttgctgagcgctgcaacgagcccgcagtctggtcccagctggctcaagcacaattgcagaaggacctcgtcaaagaggcaattaattcgtacattcgcggtgatgatccctcatcctacctggaagtggtgcagtcagcaagtagaagtaacaactgggaggatttagtgaaattcctgcaaatggcaaggaagaaaggcagggagagctatatcgagacagaactcatatttgcactggcaaaaacttctcgagtttctgagttggaggacttcatcaatggtcccaacaacgctcatatccagcaagtcggtgatagatgctacgaggagggtatgtatgaggcagcaaagttgttatattccaacgtctccaatttcgcacgactggcatctaccctggtacacctcggagaatatcaagcggcagtggacaattctcgtaaggccagcagcacacggacctggaaagaggtgtgctttgcctgcatggacggccaggaatttcggttcgctcaactatgtggacttcacattgtcatccacgccgatgagcttgaagagctgatgtgttactaccaggaccgaggctactttgaagaactgatcctgctattggaagccgctttggggttggaaagagcgcacatggggatgtttactgagctggcaattctctattccaagttcaaacctcagaagatgctggagcacttagagctcttctggtcccgagtcaatatcccgaaggtgttacgcgctgctgaacaggctcatctttgggctgaactggtgtttctctacgataagtacgaggaatacgacaacgccgtcttaaccatgatgtctcatcctactgaggcttggaaggagggccagtttaaggatatcattacaaaggtggcgaatgtggagctatgctatagggctctgcagttctacctggactacaaacctcttctgattaatgaccttctgttggtcctgtcacctaggctcgatcacacatggacagtgtccttcttttccaaagcagggcaattacctcttgtgaagccctatctacggagcgtacaatcgcataacaataagagcgtcaacgaagccttaaatcatctgctgacagaggaagaggactatcaggatgccatgcagcacgcagccgagtcaagagatgcagagttagcccaaaaactgctgcaatggttcctggaggaaggcaagagggagtgctttgccgcatgcctattcacctgctacgaccttcttcggcctgatatggtgctcgagttggcgtggcgccacaatcttgtggacctggccatgccatacttcattcaagtgatgcgggaatatctgtcaaaggttgataagctggatgcgcttgaaagccttaggaaacaggaagagcacgtgacagaacctgctcctcttgttttcgatttcgatggccacgagtag

SEQ ID NO: 121523 - DNA, 5313 bp, Artificial Sequence
  derived and/or modified sequence
attcctgccgctgccgccgccgccgccgaggtcccgcaccagccatggcgcagatcctccctgttcgctttcaggagcacttccagctccaaaaccttggaattaatccagctaacattggattcagcacactgaccatggaatctgacaagttcatatgtatccgagagaaagttggtgagcaggcacaggtcacgatcattgacatgagtgacccaatggctccgatccgacggcctatctctgcagagagtgccatcatgaatccagcctctaaggtgatagctctgaaagctgggaagacacttcagatctttaatattgagatgaagagtaaaatgaaggctcatactatggcagaagaagtgattttctggaaatgggtttctgtgaacactgttgccttggtgaccgagaccgcggtctaccactggagcatggaaggtgactcccagcccatgaagatgtttgatagacataccagtctggtgggctgccaggtgattcactaccggactgatgagtaccagaagtggctgctgctcgtaggcatctcggctcagcaaaaccgtgtggttggagcaatgcagctctactctgtggataggaaggtttcacaacccatagaaggccatgctgcggcttttgcagagttcaagatggaggggaatgccaagcctgccacccttttctgctttgctgtacgtaatcccacaggaggcaagttgcacatcattgaagttggacagcctgcagcgggaaaccaaccttttgtaaagaaagcagtagatgtgttttttcctccagaggcacagaatgattttccagtggctatgcagattggagctaaacatggtgttatttacttgatcacaaagtatggctatcttcatctgtacgacctagagtctggcgtgtgcatctgcatgaaccgtattagtgctgacacaatatttgtcactgctccacacaaaccaacctctggaattattggtgtcaacaaaaagggacaggtactgtcagtttgtgttgaggaagataacattgtgaattatgcaaccaacgtgcttcagaatccagaccttggtctgcgtttggccgttcgtagtaacctggctggggcagagaagttgtttgtgagaaaattcaataccctctttgcacagggcagctatgctgaagccgccaaagttgcagcgtctgcaccaaagggaatcctgcgtaccagagagacggtccagaaattccagagtatacccgctcagtctggccaggcttctccattgctgcagtacttcggaatcctgctcgaccagggtcagctcaataaacttgaatccttagaactttgccatctggttcttcagcaggggcgtaagcaactcctagagaagtggctgaaagaagataagctggagtgctcagaggagctcggagacttggtcaaaaccactgaccccatgctcgctctgagtgtgtaccttcgggcaaatgtgccaagcaaagtgatccagtgttttgcagaaacaggccaattccagaaaattgtgctctatgccaaaaaggttgggtacaccccagactggatctttctgctgaggggtgtaatgaagatcagtccggaacagggcctgcagttttctcgaatgctagtgcaggacgaggagccgctggccaacattagccagattgtggacattttcatggaaaacagtttaattcagcagtgtacttccttcttattggatgccttgaagaataatcgcccagctgagggactcctgcagacatggctgttggagatgaaccttgttcatgcaccccaggttgcagatgccatccttggaaataaaatgtttactcattacgaccgggcccacattgcccagctctgtgagaaggcaggcctcctgcagcaagcactggagcactacaccgacctctatgacatcaagagggctgtggtccacactcacctcctcaatcccgagtggcttgtcaatttctttggctccttatcggtggaggattctgtggagtgtctgcatgccatgctgtctgctaacatcagacagaaccttcagctgtgtgtgcaggtggcctctaagtaccacgagcagctgggcacgcaggccctggtggagctctttgaatccttcaagagttacaaaggcctcttctacttcctgggctcaatcgtgaacttcagccaagacccagatgtgcatctgaaatacattcaggctgcctgtaagacagggcagatcaaggaggtggagaggatatgccgagagagcagctgctacaacccagagcgtgtgaagaacttcctgaaggaggccaagctcacagaccagcttcccctcatcatcgtgtgtgatcgttttggctttgtccatgaccttgtcctatatttataccgcaacaacctgcagaggtacattgagatctacgtgcagaaggtcaaccctagccggaccccagctgtgattggagggctgcttgatgtggattgttctgaggaagtgattaaacacttaatcatggcagtgagaggacagttctctactgatgagttggtggctgaagtagaaaaaagaaataggctcaagctgctgcttccctggctggagtcccagattcaggaaggctgtgaggagcctgccactcacaatgcactggctaaaatctacatcgacagcaacaacagccccgagtgcttcctgagagagaatgcctactatgacagcagcgtggtgggccgctactgtgagaagcgagacccccatctggcctgtgttgcctatgagcgggggcagtgtgaccttgagctcatcaaggtgtgcaatgagaattctctgttcaaaagcgaggcccgctacctggtatgcagaaaggatccggagctctgggctcacgtccttgaggagaccaacccatccaggagacagctaattgaccaggtggtacagacagcattgtcagaaacacgggatcctgaagagatttcggtcactgtcaaagcctttatgacagccgacctgcctaatgaactgattgaactgctggagaagatagttctggataactctgtcttcagcgagcacaggaatctacagaatctgttgatcctgactgccatcaaggcagaccgcacacgggtcatggagtacatcagccgcctggacaactatgacgcactggacatcgcgagcatcgctgtcagcagcgcactgtatgaggaggccttcaccgttttccacaagtttgatatgaatgcctcagcaatccaggtcctgatcgagcacattggaaacctggaccgggcatatgagtttgcggagagatgcaatgagcctgctgtgtggagtcagctggcccaagcccagctccagaaagatttggtgaaggaagccatcaactcctatatcagaggggacgacccttcctcttacctggaagttgttcagtcagccagcaggagcaacaactgggaggatctagttaaatttctgcagatggccaggaaaaagggccgtgagtcctatatagagactgaacttatttttgccttggctaaaaccagccgtgtttctgagctagaagattttattaatggacccaacaatgcccacatccagcaggttggagaccgctgttacgaggagggaatgtacgaggctgccaagctgctctatagcaatgtttctaactttgcccgcctggcttccaccttggttcacctcggtgagtatcaggcagcagtggacaacagccgcaaggccagcagcacccggacgtggaaggaggtgtgctttgcctgcatggatggacaagagttccgcttcgcacagctgtgtggtcttcacatcgtcattcatgcagatgagctggaggagctgatgtgctattaccaggatcgtggctactttgaggagctgatcttgctgttggaagcggccctgggcctggagcgggcccacatgggcatgttcactgagctggccatcctctactccaaattcaagccacagaagatgctggagcatctggagcttttctggtcccgtgtcaacatcccaaaggtgctgagggctgcagagcaggcacacctgtgggctgagctggtgttcctctatgacaagtacgaggagtatgacaatgctgtgctcaccatgatgagccaccccactgaggcctggaaggagggtcagttcaaggacatcattaccaaggttgccaacgtcgagctctgttacagagccctgcagttctatttggattacaaaccactgctcatcaatgacctgctgctggtgctttcaccccggctggaccacacctggacagtcagtttcttttcaaaggcaggtcagctgcccctggtgaagccttacctgcggtcagtccagagccacaacaacaagagtgtgaatgaggcactcaaccacctgctgacagaggaggaggactatcaggatgccatgcagcatgctgcagagtcgcgggatgctgagctggcccagaagttgctgcagtggttcctggaggaaggcaagagggagtgcttcgcagcttgtctcttcacctgctatgacctgcttcgcccagacatggtgcttgagctggcctggaggcacaacctcgtggacttggccatgccctacttcatccaggtgatgagggagtacctgagcaaggtggacaaactggatgccttggagagtctgcgcaagcaagaggagcatgtgacagagcctgcccctctcgtgtttgattttgatgggcatgaatgagacccagctgattgcactaagccctgccgtgggcccagcccctgccagcttcccctatggatatgcctctgctcccaacttcgccagcctccaatgtacaacttccgcgtgtagtgggcgttgtcaccacccaccctacctgcagagttactaacttctccaaggagcatgtcactccagcagcacaggggacgcaatgggaggcagggacacctggacaatatttatttttgctgaaacccaatgacggcaacctctgagccatcccagagcctggggaggccagggtagaggctgacggcgcaagaccagctttagccgacaacagagactggactgtgggccctcctgctggagccaggccttcctcctgggcgcctccgactggctggagctgccccctccaggccagtttgaagactacatgaacacgtcttgtttggaggtaccggacctcataaaaggactctcagcctcttggcaatcataaatattaaagtcggtttatccaggcaaa

SEQ ID NO: 121524 - DNA, 4752 bp, Artificial Sequence
  derived and/or modified sequence
atggcccagatcctgcccgtgagattccaggagcacttccagctgcagaacctgggcatcaaccccgccaacatcggcttcagcaccctgaccatggagagcgacaagttcatctgcatcagagagaaggtgggcgagcaggcccaggtgaccatcatcgacatgagcgaccccatggcccccatcagaagacccatcagcgccgagagcgccatcatgaaccccgccagcaaggtgatcgccctgaaggccggcaagaccctgcagatcttcaacatcgagatgaagagcaagatgaaggcccacaccatggccgaggaggtgatcttctggaagtgggtgagcgtgaacaccgtggccctggtgaccgagaccgccgtgtaccactggagcatggagggcgacagccagcccatgaagatgttcgacagacacaccagcctggtgggctgccaggtgatccactacagaaccgacgagtaccagaagtggctgctgctggtgggcatcagcgcccagcagaacagagtggtgggcgccatgcagctgtacagcgtggacagaaaggtgagccagcccatcgagggccacgccgccgccttcgccgagttcaagatggagggcaacgccaagcccgccaccctgttctgcttcgccgtgagaaaccccaccggcggcaagctgcacatcatcgaggtgggccagcccgccgccggcaaccagcccttcgtgaagaaggccgtggacgtgttcttcccccccgaggcccagaacgacttccccgtggccatgcagatcggcgccaagcacggcgtgatctacctgatcaccaagtacggctacctgcacctgtacgacctggagagcggcgtgtgcatctgcatgaacagaatcagcgccgacaccatcttcgtgaccgccccccacaagcccaccagcggcatcatcggcgtgaacaagaagggccaggtgctgagcgtgtgcgtggaggaggacaacatcgtgaactacgccaccaacgtgctgcagaaccccgacctgggcctgagactggccgtgagaagcaacctggccggcgccgagaagctgttcgtgagaaagttcaacaccctgttcgcccagggcagctacgccgaggccgccaaggtggccgccagcgcccccaagggcatcctgagaaccagagagaccgtgcagaagttccagagcatccccgcccagagcggccaggccagccccctgctgcagtacttcggcatcctgctggaccagggccagctgaacaagctggagagcctggagctgtgccacctggtgctgcagcagggcagaaagcagctgctggagaagtggctgaaggaggacaagctggagtgcagcgaggagctgggcgacctggtgaagaccaccgaccccatgctggccctgagcgtgtacctgagagccaacgtgcccagcaaggtgatccagtgcttcgccgagaccggccagttccagaagatcgtgctgtacgccaagaaggtgggctacacccccgactggatcttcctgctgagaggcgtgatgaagatcagccccgagcagggcctgcagttcagcagaatgctggtgcaggacgaggagcccctggccaacatcagccagatcgtggacatcttcatggagaacagcctgatccagcagtgcaccagcttcctgctggacgccctgaagaacaacagacccgccgagggcctgctgcagacctggctgctggagatgaacctggtgcacgccccccaggtggccgacgccatcctgggcaacaagatgttcacccactacgacagagcccacatcgcccagctgtgcgagaaggccggcctgctgcagcaggccctggagcactacaccgacctgtacgacatcaagagagccgtggtgcacacccacctgctgaaccccgagtggctggtgaacttcttcggcagcctgagcgtggaggacagcgtggagtgcctgcacgccatgctgagcgccaacatcagacagaacctgcagctgtgcgtgcaggtggccagcaagtaccacgagcagctgggcacccaggccctggtggagctgttcgagagcttcaagagctacaagggcctgttctacttcctgggcagcatcgtgaacttcagccaggaccccgacgtgcacctgaagtacatccaggccgcctgcaagaccggccagatcaaggaggtggagagaatctgcagagagagcagctgctacaaccccgagagagtgaagaacttcctgaaggaggccaagctgaccgaccagctgcccctgatcatcgtgtgcgacagattcggcttcgtgcacgacctggtgctgtacctgtacagaaacaacctgcagagatacatcgagatctacgtgcagaaggtgaaccccagcagaacccccgccgtgatcggcggcctgctggacgtggactgcagcgaggaggtgatcaagcacctgatcatggccgtgagaggccagttcagcaccgacgagctggtggccgaggtggagaagagaaacagactgaagctgctgctgccctggctggagagccagatccaggagggctgcgaggagcccgccacccacaacgccctggccaagatctacatcgacagcaacaacagccccgagtgcttcctgagagagaacgcctactacgacagcagcgtggtgggcagatactgcgagaagagagacccccacctggcctgcgtggcctacgagagaggccagtgcgacctggagctgatcaaggtgtgcaacgagaacagcctgttcaagagcgaggccagatacctggtgtgcagaaaggaccccgagctgtgggcccacgtgctggaggagaccaaccccagcagaagacagctgatcgaccaggtggtgcagaccgccctgagcgagaccagagaccccgaggagatcagcgtgaccgtgaaggccttcatgaccgccgacctgcccaacgagctgatcgagctgctggagaagatcgtgctggacaacagcgtgttcagcgagcacagaaacctgcagaacctgctgatcctgaccgccatcaaggccgacagaaccagagtgatggagtacatcagcagactggacaactacgacgccctggacatcgccagcatcgccgtgagcagcgccctgtacgaggaggccttcaccgtgttccacaagttcgacatgaacgccagcgccatccaggtgctgatcgagcacatcggcaacctggacagagcctacgagttcgccgagagatgcaacgagcccgccgtgtggagccagctggcccaggcccagctgcagaaggacctggtgaaggaggccatcaacagctacatcagaggcgacgaccccagcagctacctggaggtggtgcagagcgccagcagaagcaacaactgggaggacctggtgaagttcctgcagatggccagaaagaagggcagagagagctacatcgagaccgagctgatcttcgccctggccaagaccagcagagtgagcgagctggaggacttcatcaacggccccaacaacgcccacatccagcaggtgggcgacagatgctacgaggagggcatgtacgaggccgccaagctgctgtacagcaacgtgagcaacttcgccagactggccagcaccctggtgcacctgggcgagtaccaggccgccgtggacaacagcagaaaggccagcagcaccagaacctggaaggaggtgtgcttcgcctgcatggacggccaggagttcagattcgcccagctgtgcggcctgcacatcgtgatccacgccgacgagctggaggagctgatgtgctactaccaggacagaggctacttcgaggagctgatcctgctgctggaggccgccctgggcctggagagagcccacatgggcatgttcaccgagctggccatcctgtacagcaagttcaagccccagaagatgctggagcacctggagctgttctggagcagagtgaacatccccaaggtgctgagagccgccgagcaggcccacctgtgggccgagctggtgttcctgtacgacaagtacgaggagtacgacaacgccgtgctgaccatgatgagccaccccaccgaggcctggaaggagggccagttcaaggacatcatcaccaaggtggccaacgtggagctgtgctacagagccctgcagttctacctggactacaagcccctgctgatcaacgacctgctgctggtgctgagccccagactggaccacacctggaccgtgagcttcttcagcaaggccggccagctgcccctggtgaagccctacctgagaagcgtgcagagccacaacaacaagagcgtgaacgaggccctgaaccacctgctgaccgaggaggaggactaccaggacgccatgcagcacgccgccgagagcagagacgccgagctggcccagaagctgctgcagtggttcctggaggagggcaagagagagtgcttcgccgcctgcctgttcacctgctacgacctgctgagacccgacatggtgctggagctggcctggagacacaacctggtggacctggccatgccctacttcatccaggtgatgagagagtacctgagcaaggtggacaagctggacgccctggagagcctgagaaagcaggaggagcacgtgaccgagcccgcccccctggtgttcgacttcgacggccacgagtag

SEQ ID NO: 121525 - protein, 136 aa, Artificial Sequence
  derived and/or modified sequence
MLLKLKEKASLTLAVGTLPFPSQFNFVPPGRMCRVAGWGRTGVLKPGSDTLQEVKLRLMDPQACSHFRDFDHNLQLCVGNPRKTKSAFKGDSGGPLLCAGVAQGIVSYGRSDAKPPAVFTRISHYRPWINQILQAN

SEQ ID NO: 121526 - protein, 247 aa, Artificial Sequence
  derived and/or modified sequence
MLLLPLPLLLFLLCSRAEAGEIIGGTECKPHSRPYMAYLEIVTSNGPSKFCGGFLIRRNFVLTAAHCAGRSITVTLGAHNITEEEDTWQKLEVIKQFRHPKYNTSTLHHDIMLLKLKEKASLTLAVGTLPFPSQFNFVPPGRMCRVAGWGRTGVLKPGSDTLQEVKLRLMDPQACSHFRDFDHNLQLCVGNPRKTKSAFKGDSGGPLLCAGVAQGIVSYGRSDAKPPAVFTRISHYRPWINQILQAN

SEQ ID NO: 121527 - DNA, 744 bp, Artificial Sequence
  derived and/or modified sequence
atgctactcctacccctccccctgctgctttttctgctctgttcccgagctgaggcaggagagataattgggggcaccgagtgtaagccgcacagtaggccatatatggcctacctggagattgtcacatcgaacggacccagcaaattctgcggcggattcctgattcgccgaaactttgtgctcacagccgcccattgcgccggacgatctattactgtgactctgggagcccacaacatcacagaggaggaggacacatggcagaaacttgaagtgataaaacaatttcgccatccaaaatacaacacctctaccctgcaccacgatataatgctgctgaagctgaaagaaaaggccagtctcaccctcgcagtgggaacgctaccttttccttcacagttcaactttgttcctcctgggcgcatgtgccgggtggcaggctggggaaggacaggggtcctgaagccaggctcggacaccctgcaggaggttaaactgaggctgatggatccccaggcctgctcgcactttagggacttcgatcacaacctgcagctttgtgtaggaaatccaaggaaaactaagagtgcgtttaaaggagactctggaggtccgttgctatgtgccggggtagcgcagggaatcgtgtcctacggtagatcagacgctaaaccacctgcagtgtttaccagaatcagtcattataggccctggataaatcagatcctacaggccaactag

SEQ ID NO: 121528 - DNA, 744 bp, Artificial Sequence
  derived and/or modified sequence
atgctgctgctgcccctgcccctgctgctcttcctgctgtgcagcagagctgaggccggggagatcattggaggaacagagtgcaagccccacagccggccctacatggcctacctggagatcgtgaccagcaatggccccagcaagttctgtggcggcttcctgatcagaagaaactttgtgctgacagctgcccactgtgccggccgcagcatcaccgtgaccctgggcgcccacaacatcacagaggaggaggacacctggcagaagctggaggtgatcaagcagttccgccaccccaagtacaacaccagcaccctgcaccacgacatcatgctgctgaagctgaaggagaaggccagcctgaccctggccgtgggcaccctgcccttccccagccagttcaactttgtgcccccaggccgcatgtgccgggtggccggctggggccgcactggagtgctgaagccaggcagtgacaccctgcaggaggtgaagctgcggctgatggacccccaggcctgcagccacttccgggactttgaccacaacctgcagctgtgtgtgggcaaccccaggaagaccaagagcgccttcaagggggacagcggcggccccctgctgtgtgccggcgtggcccagggcatcgtgtcctatggccgcagtgatgccaagcccccagctgtgttcacccgcatcagccactaccggccctggatcaaccagatcctgcaggccaactag

SEQ ID NO: 121529 - DNA, 744 bp, Artificial Sequence
  derived and/or modified sequence
atgctgctgctgcccctgcccctgctgctgttcctgctgtgcagccgagcagaagctggtgagattatcggcgggacggaatgcaagccacattcccgcccatatatggcgtatctggaaatcgtcactagcaatggcccaagcaagttttgcggtggttttctaatacggcggaactttgttctcacagctgctcactgtgcaggcaggtccatcacggtcaccctcggagcccacaatataactgaggaggaagatacctggcaaaagttagaggtgatcaaacaattccggcaccctaaatacaacacgagtactctccaccatgatataatgctcctgaagttgaaagagaaagccagcctgaccctggccgttggaaccctccccttccctagccaattcaacttcgttccacccggacgtatgtgtcgggtggccggctggggcagaaccggagtgcttaaacccgggagtgacacactccaggaggtcaaattgcggctgatggacccccaagcctgttcccattttcgcgacttcgaccacaacttgcagctttgcgtcggcaatccccggaagaccaagagcgctttcaaaggcgatagcggaggcccattgctgtgcgccggcgtggcacaaggtattgtctcttatggacgctcagacgctaaaccacccgcagtgtttactcggatttcccattaccggccctggatcaaccaaattctccaggctaattag

SEQ ID NO: 121530 - DNA, 744 bp, Artificial Sequence
  derived and/or modified sequence
atgttgctcctcccgctgccattactgctctttctgctgtgcagtagagcggaggcgggagaaatcataggcggaaccgaatgtaagcctcactcacgcccttacatggcatacttggaaatcgtcactagcaatggacctagtaaattctgcggaggattcctaattcgcaggaattttgtcctgaccgcagctcattgcgccggaaggtctatcactgtaaccctcggggctcataatattactgaggaagaggatacctggcagaagttggaggtgattaagcaattcagacaccccaagtataacactagcactttacaccacgatataatgctgctaaagctaaaggaaaaggcatcacttacccttgctgtgggcaccctgccttttcctagccaatttaatttcgtccccccaggaagaatgtgtcgggtggccggatggggtagaacaggtgtcctgaagcctggatctgatacactgcaggaagtgaaacttaggctcatggacccacaggcctgttctcattttcgcgacttcgaccacaatcttcagctgtgcgtgggaaacccgcgtaaaaccaaatcagcctttaagggggacagtgggggtccattgctgtgcgcaggcgtggcccagggtattgtttcctacgggaggagtgacgcgaagcctcccgctgtcttcaccagaatcagccattatcgaccctggatcaaccagatcctccaggctaattag

SEQ ID NO: 121531 - DNA, 633 bp, Artificial Sequence
  derived and/or modified sequence
agcatttgctcaggcagcctctctgggaagatgctgcttcttcctctccccctgctgctctttctcttgtgctccagagctgaagctggtctataacagtcacccttggagcccataacataacagaggaagaagacacatggcagaagcttgaggttataaagcaattccgtcatccaaaatataacacttctactcttcaccacgatatcatgttactaaagttgaaggagaaagccagcctgaccctggctgtggggacactccccttcccatcccaattcaactttgtcccacctgggagaatgtgccgggtggctggctggggaagaacaggtgtgttgaagccgggctcagacactctgcaagaggtgaagctgagactcatggatccccaggcctgcagccacttcagagactttgaccacaatcttcagctgtgtgtgggcaatcccaggaagacaaaatctgcatttaagggagactctgggggccctcttctgtgtgctggggtggcccagggcatcgtatcctatggacggtcggatgcaaagccccctgctgtcttcacccgaatctcccattaccggccctggatcaaccagatcctgcaggcaaattaatcctggatcc

SEQ ID NO: 121532 - DNA, 937 bp, Artificial Sequence
  derived and/or modified sequence
agcatttgctcaggcagcctctctgggaagatgctgcttcttcctctccccctgctgctctttctcttgtgctccagagctgaagctggggagatcatcgggggcacagaatgcaagccacattcccgcccctacatggcctacctggaaattgtaacttccaacggtccctcaaaattttgtggtggtttccttataagacggaactttgtgctgacggctgctcattgtgcaggaaggtctataacagtcacccttggagcccataacataacagaggaagaagacacatggcagaagcttgaggttataaagcaattccgtcatccaaaatataacacttctactcttcaccacgatatcatgttactaaagttgaaggagaaagccagcctgaccctggctgtggggacactccccttcccatcccaattcaactttgtcccacctgggagaatgtgccgggtggctggctggggaagaacaggtgtgttgaagccgggctcagacactctgcaagaggtgaagctgagactcatggatccccaggcctgcagccacttcagagactttgaccacaatcttcagctgtgtgtgggcaatcccaggaagacaaaatctgcatttaagggagactctgggggccctcttctgtgtgctggggtggcccagggcatcgtatcctatggacggtcggatgcaaagccccctgctgtcttcacccgaatctcccattaccggccctggatcaaccagatcctgcaggcaaattaatcctggatcctgagccagcctgaaagggaagctggaactggacctgagcagcaaagtgtgtgccactcattctggtctacccttggtccctcagccacaaccctaagcctccagaagtatcctacaggtcacagaactctcaataaacctcagtgaagacaca

SEQ ID NO: 121533 - DNA, 744 bp, Artificial Sequence
  derived and/or modified sequence
atgctgctgctgcccctgcccctgctgctgttcctgctgtgcagcagagccgaggccggcgagatcatcggcggcaccgagtgcaagccccacagcagaccctacatggcctacctggagatcgtgaccagcaacggccccagcaagttctgcggcggcttcctgatcagaagaaacttcgtgctgaccgccgcccactgcgccggcagaagcatcaccgtgaccctgggcgcccacaacatcaccgaggaggaggacacctggcagaagctggaggtgatcaagcagttcagacaccccaagtacaacaccagcaccctgcaccacgacatcatgctgctgaagctgaaggagaaggccagcctgaccctggccgtgggcaccctgcccttccccagccagttcaacttcgtgccccccggcagaatgtgcagagtggccggctggggcagaaccggcgtgctgaagcccggcagcgacaccctgcaggaggtgaagctgagactgatggacccccaggcctgcagccacttcagagacttcgaccacaacctgcagctgtgcgtgggcaaccccagaaagaccaagagcgccttcaagggcgacagcggcggccccctgctgtgcgccggcgtggcccagggcatcgtgagctacggcagaagcgacgccaagccccccgccgtgttcaccagaatcagccactacagaccctggatcaaccagatcctgcaggccaactag

SEQ ID NO: 121534 - protein, 355 aa, Artificial Sequence
  derived and/or modified sequence
MTTSLDTVETFGTTSYYDDVGLLCEKADTRALMAQFVPPLYSLVFTVGLLGNVVVVMILIKYRRLRIMTNIYLLNLAISDLLFLVTLPFWIHYVRGHNWVFGHGMCKLLSGFYHTGLYSEIFFIILLTIDRYLAIVHAVFALRARTVTFGVITSIVTWGLAVLAALPEFIFYETEELFEETLCSALYPEDTVYSWRHFHTLRMTIFCLVLPLLVMAICYTGIIKTLLRCPSKKKYKAIRLIFVIMAVFFIFWTPYNVAILLSSYQSILFGNDCERSKHLDLVMLVTEVIAYSHCCMNPVIYAFVGERFRKYLRHFFHRHLLMHLGRYIPFLPSEKLERTSSVSPSTAEPELSIVF

SEQ ID NO: 121535 - protein, 80 aa, Artificial Sequence
  derived and/or modified sequence
MTTSLDTVETFGTTSYYDDVGLLCEKADTRALMAQFVPPLYSLVFTVGLLGNVVVVMILIKYRRLRIMTNIYLLNLAISD

SEQ ID NO: 121536 - DNA, 1068 bp, Artificial Sequence
  derived and/or modified sequence
atgacgaccagcctggatacagtggaaaccttcggaacaacctcttattacgatgatgtgggcttgctttgcgaaaaggccgatactcgagccctcatggcccagttcgttccacctctctatagcctggtgttcactgtcggactcttaggcaatgtcgtggttgtgatgattctcataaagtatcggcggctgaggattatgacaaatatctacctgctgaatctagctatctcggacttgttatttctggtcactttacccttttggattcactacgtccgggggcacaattgggtgttcgggcatggaatgtgcaaattgctgtccggattctatcacactggcctctactcagagatcttcttcataatcttgctcacaatcgatcggtatcttgccattgttcacgccgtgtttgccttgagggctagaacagtaacattcggcgtcatcacatcaatagtgacctggggcttggcggtgttggccgcactgccagagttcatcttctatgagacagaagagctgttcgaggagaccctttgctctgccttgtatcccgaggacacagtgtactcttggaggcattttcatacgctccgtatgaccatcttctgcctcgtgctccctcttctggtaatggccatctgctacacaggaattattaaaactcttcttcgctgtccatcaaagaaaaaatacaaagccattaggttgatttttgtcataatggctgtattctttatcttctggacaccatataacgttgccattctactgtcttcatatcagtctatattgttcggaaacgactgtgaacgttctaagcacctggacttggtgatgctggtgacagaagttatcgcctattcccattgttgcatgaatcctgtgatctatgcatttgtgggcgaaaggtttcgtaaatacctgcgccacttctttcatcgccacctccttatgcacctgggcagatacataccatttctcccttccgaaaagctggagcgtacgagtagcgtgtcgccttccaccgcagagcccgagctgtctatcgttttctag

SEQ ID NO: 121537 - DNA, 1068 bp, Artificial Sequence
  derived and/or modified sequence
atgaccaccagtctggataccgtagaaaccttcggtactacaagctattacgatgacgttggactcctctgtgagaaggccgacacccgagctcttatggcacagtttgttcctccgctttattcactcgtcttcacagtggggctgttagggaacgtggttgttgtgatgatccttatcaagtacaggaggttacgtatcatgaccaacatatatctcctgaacctcgcgatctcagatttgctcttcctcgtgactctgcccttctggatacactatgttagaggacataactgggtgttcggccacggaatgtgcaaactgctgtctgggttttaccacactggactgtacagcgaaattttcttcatcatcctgctgaccattgaccgctacctggccatcgtgcatgccgtgttcgctctgcgggccagaaccgtgaccttcggggtgatcacaagcatcgttacatggggcttggctgtgttggcggcacttcccgaatttatcttctatgaaacagaggaattgtttgaagaaaccctgtgcagcgccctctaccccgaggatactgtctatagttggaggcactttcacactctgagaatgactattttctgtctggtgcttccactcttggtgatggctatatgctatactgggattatcaaaaccctgctgagatgtccatccaaaaagaaatacaaagccatccgtctgattttcgttatcatggcagtgttttttatattctggactccgtataatgtggcgatactgctaagtagctaccaatccattttatttggcaacgactgcgagagatctaagcacctggatctggtgatgcttgtgacagaagtgattgcttacagccactgttgcatgaatcccgttatctatgctttcgtcggcgaaagatttcggaagtacctcagacattttttccatagacacctgctgatgcacctaggcagatatattccgttcctgccctcagaaaaactggaacggacaagcagtgtttctccctctactgcggagcccgagcttagcatcgtattttag

SEQ ID NO: 121538 - DNA, 1068 bp, Artificial Sequence
  derived and/or modified sequence
atgactacgagtttagacacggtcgaaacattcggaactaccagctactacgatgacgtaggcctgctctgcgagaaggccgacactcgagccttaatggcacagtttgtgccccctctttattcactggtgtttactgttgggcttctgggcaacgtggtggttgtgatgattcttattaagtaccggcgcctccgcattatgacgaatatttacctgttgaaccttgccatctcggacctgctgttcctggtcacgctcccattctggatccattacgttaggggccataattgggtctttggacacggcatgtgcaaactcttatcaggcttttatcatacggggctgtactccgaaattttcttcattatcctgcttacaatagatagatatctagccattgtacatgcagtattcgccctgcgcgcccgaaccgtcacattcggagttatcacctccattgtgacttggggtttagccgtgctcgctgccctccctgagttcatcttctacgagacggaagaactctttgaggaaaccttgtgttcagccttgtaccctgaggacactgtttactcatggcggcatttccacaccctccggatgacaatattttgcctggtcctgccccttctggtcatggccatttgttataccgggattataaaaacactcctcagatgcccttccaagaagaagtataaggcgatccgacttatcttcgtaatcatggccgtcttttttatattttggacaccctacaacgtcgccatccttctgagctcgtaccagagcatcctgtttgggaacgattgcgagcggtcaaaacatctggacctggtcatgctggtaaccgaggtgatcgcttactcccactgctgcatgaatcccgttatatatgcctttgtaggagaaagatttcgcaaatatctgcgccacttctttcacagacacctactcatgcatctgggccggtacatcccgttcctaccatccgaaaagttagaaagaaccagttcagtgtccccttcaaccgcggaacccgaattgtcgattgtgttctag

SEQ ID NO: 121539 - DNA, 243 bp, Artificial Sequence
  derived and/or modified sequence
atgactacaagcttggatacagtggagacattcggaacgacctcttattacgacgatgtagggctgctttgcgagaaggctgatacacgcgctctcatggctcagttcgtgccacccctgtattcgctcgtgttcaccgttgggctcttgggaaatgtggtggttgttatgatcctgatcaagtatcgaaggctccgtatcatgactaatatctatctgctcaaccttgcaatctccgactag

SEQ ID NO: 121540 - DNA, 1068 bp, Artificial Sequence
  derived and/or modified sequence
atgacaacctcccttgacactgtggagacattcggtaccactagctattatgacgatgtcggcctgctctgcgaaaaggccgacacaagagccctcatggcccagtttgtgcctcccctttattctctggtgttcactgtgggcttgctggggaacgtggttgtagtaatgatattgatcaaataccgccggcttcgtattatgacaaacatataccttcttaacctggccataagtgacctcttgtttttggtgaccttacctttctggattcactatgtgaggggacacaactgggtctttgggcatggaatgtgcaaactgctgtctgggttttatcatacaggactctattccgaaatctttttcattattctcttgaccatcgacagatatctggccatcgttcatgctgtctttgccctaagggctagaacagtgaccttcggagtcatcacaagtattgttacctggggcttggccgtattggccgcacttcctgagtttatcttttatgaaactgaggagttgttcgaagaaaccctttgctctgcactgtaccctgaagacacagtatacagctggaggcacttccacactctgaggatgaccatcttttgtctggtactgcctttgctggtgatggctatctgctatacgggtatcattaaaaccttactccgctgtccctctaaaaagaagtacaaagctattcgcttgatcttcgtcatcatggctgtgttctttatattctggacaccctacaacgtcgccattctactcagctcttaccagtccatcttattcggtaatgattgtgagaggtctaagcacttggatctggtcatgcttgttacagaggtgatagcatactcgcactgttgcatgaatcccgtgatctatgcctttgtgggagagagatttcgaaagtatctgaggcacttcttccaccggcacttactaatgcacctggggcgctatattccttttctcccctctgagaagctcgagcgcacaagcagtgtgagcccttctacggctgaacccgaactttccattgtgttctag

SEQ ID NO: 121541 - DNA, 1068 bp, Artificial Sequence
  derived and/or modified sequence
atgaccaccagcctggacacagtggagaccttcggcaccaccagctactatgatgatgtgggcctgctgtgtgagaaggctgacacccgggccctgatggcccagtttgtgccccccctgtacagcctggtgttcaccgtgggcctgctgggcaatgtggtggtggtgatgatcctgatcaagtacagaaggctgcgcatcatgaccaacatctacctgctgaacctggccatcagtgacctgctcttcctggtgaccctgcccttctggatccactacgtgcggggccacaactgggtgtttggacatggcatgtgcaagctgctgagcggcttctaccacacaggcctgtacagcgagatcttcttcatcatcctgctgaccatcgaccgctacctggccatcgtgcatgctgtgtttgccctgcgggccaggacagtgacctttggagtcatcaccagcatcgtgacctggggcctggccgtgctggccgccctgcctgagttcatcttctatgaaacagaggagctgtttgaggagaccctgtgcagcgccctgtacccagaagatactgtgtacagctggaggcacttccacaccctgaggatgaccatcttctgcctggtgctgcccctgctggtgatggccatctgctacacaggcatcatcaagaccctgctgcgctgccccagcaagaagaagtacaaggccatccgcctcatcttcgtcatcatggctgtgttcttcatcttctggaccccctacaacgtggccatcctgctgagcagctaccagagcatcctgtttggaaatgactgtgagaggagcaagcacctggacctggtgatgctggtgacagaggtgattgcctacagccactgctgcatgaaccctgtgatctatgcctttgtgggggagcgcttcaggaagtacctgcggcacttcttccaccgccacctgctgatgcacctgggccgctacatccccttcctgcccagcgagaagctggagaggaccagctctgtgagccccagcacagctgagcctgagctgagcatcgtgttctag

SEQ ID NO: 121542 - DNA, 243 bp, Artificial Sequence
  derived and/or modified sequence
atgaccaccagcctggacacagtggagaccttcggcaccaccagctactatgatgatgtgggcctgctgtgtgagaaggctgacacccgggccctgatggcccagtttgtgccccccctgtacagcctggtgttcaccgtgggcctgctgggcaatgtggtggtggtgatgatcctgatcaagtacagaaggctgcgcatcatgaccaacatctacctgctgaacctggccatcagtgactag

SEQ ID NO: 121543 - DNA, 1068 bp, Artificial Sequence
  derived and/or modified sequence
atgaccaccagcctggacaccgtggagaccttcggcaccaccagctattacgatgatgtcggcctcctttgcgagaaagcagacacacgcgcactcatggcccagttcgtaccgccactctacagcctggtgttcaccgtaggactactcggcaatgtcgtcgtcgtgatgattttaatcaaatacaggagactaaggattatgacaaacatatatctgttgaaccttgcaatctctgatttacttttcctggtaacgctcccattctggattcactatgtgcgtggccacaattgggtgttcggtcacggtatgtgtaaacttctgagcggtttttatcacaccggcctatattcggagatctttttcatcatccttctgaccatcgatagataccttgctatcgtccacgccgtttttgcgctgagggcacgtacagtgactttcggagtgattacatcaattgtgacctggggtctcgctgtgcttgcagccctgcctgaattcatattttacgaaacagaggagctttttgaagagaccttatgcagtgccctgtacccagaagatactgtgtatagttggcgccacttccatactctccgcatgacaatcttctgtctagtgttgcccctgctggtgatggcaatatgttacacaggtattatcaagactctcctgagatgcccaagcaaaaagaaatacaaagctattcgcctgatcttcgtgattatggcagtgttctttattttttggaccccttacaacgtggctattttgctgtcttcataccagtccattctcttcggcaatgactgcgagcggagtaaacaccttgacttggtgatgctcgtgacagaagtgattgcttatagtcattgttgtatgaacccagtcatctatgcctttgttggggagcgctttcgaaaatatctccgccatttcttccaccgtcatctattgatgcatctggggaggtacatcccattccttccttcagagaaactggagaggaccagctcggtgtcaccatctaccgctgaaccagagctctcaatagttttctag

SEQ ID NO: 121544 - DNA, 1068 bp, Artificial Sequence
  derived and/or modified sequence
atgaccaccagcctggacaccgtggagaccttcggcaccaccagctattatgacgacgtcggcctcctatgcgagaaagctgacacacgtgccctcatggcccagttcgtcccacctctgtacagccttgtattcacagtcggtctgttagggaacgtggtggtggttatgatcctcatcaagtatcggcggcttcgaattatgaccaatatctacttgctgaacttggcgattagtgaccttctgtttctggtgacgctccctttttggattcactatgtgaggggccacaattgggtgttcggtcacgggatgtgtaagttgctttcagggttttatcacactgggctgtattcagaaatattctttatcatccttcttaccatagaccggtacctggctatcgtgcacgccgtcttcgccctgcgggctagaacagtgacttttggcgtaatcaccagcatcgtcacatggggcttagccgtactggccgctctgcctgaattcattttctatgagaccgaagagctgtttgaggaaaccctctgttcagcgctgtatcccgaggacaccgtgtacagttggaggcattttcacactcttcgcatgacaatcttttgtctggttctacccctgctggtgatggcgatctgttatacggggatcatcaaaacactccttcgatgtccctctaagaaaaaatataaagctatccgcttaatttttgtcataatggctgtgttcttcatcttttggactccttataatgtggccatcctcctgtcttcttatcagagtatactgtttgggaacgactgcgagcggtccaagcacttggacctggtcatgctcgtaaccgaggttatcgcttatagccactgctgcatgaaccctgtgatttatgcttttgtaggcgaacgcttccggaagtacctgcggcattttttccaccgacacctcttaatgcacctcggccggtatattccctttctgccgtctgagaagctcgagaggacctcgtcagtgtccccaagtacggcggaacccgagttatccattgtgttctag

SEQ ID NO: 121545 - DNA, 1068 bp, Artificial Sequence
  derived and/or modified sequence
atgaccaccagcctggacaccgtggagaccttcggcaccaccagctattacgacgacgtgggactgctgtgcgagaaagcggataccagagcactcatggcccaattcgtcccccctctctactccctggtgttcacagtcggactcctgggaaatgtcgttgttgtgatgatcctcatcaagtaccggaggttaaggatcatgaccaacatctatctgttgaacttggccatatctgacctccttttcctggttaccttaccgttttggatacactacgtccgcggccacaattgggtgttcgggcatggcatgtgcaagctgctatccgggttctatcacaccggactgtatagcgagatattctttatcattctcctaacgattgatcggtacttggccatcgtccatgctgtcttcgcactgcgggcccggaccgtgacattcggcgtgatcaccagcattgtgacttggggactagcagttctggcggccctgccggagtttattttctacgaaactgaggagctatttgaggagacactgtgcagcgccctgtaccctgaagacacagtatactcatggaggcactttcacactctgcggatgacgatattttgccttgtgttaccactccttgtaatggccatctgctataccggcatcatcaagactttgcttagatgtcctagtaagaagaagtataaggccattcggctgatttttgtgatcatggctgtcttctttattttttggaccccttataacgttgcaatcttgctgtccagctatcagtctatcctgttcggtaatgattgtgaacggtctaagcatctcgatcttgttatgctagtcaccgaggtcatagcctactcccactgctgtatgaatcccgtgatctatgccttcgtaggagagcgctttagaaagtacctcagacacttcttccacaggcatctgttgatgcacctcggccggtatattccctttctgccaagtgagaaactagagcggacctcctcagtgtccccgtctaccgccgaacctgagctgagtattgtattttag

SEQ ID NO: 121546 - DNA, 243 bp, Artificial Sequence
  derived and/or modified sequence
atgaccaccagcctggacaccgtggagaccttcggcaccaccagctattacgacgacgttgggctactttgcgagaaggccgacaccagagccctaatggcccagtttgtaccacccctgtacagcctggtattcacagtaggcctcctgggcaatgttgtggtagtcatgatactgatcaaatatcgccgccttaggattatgactaacatttacctgctcaatttggcaatctcagactag

SEQ ID NO: 121547 - DNA, 1068 bp, Artificial Sequence
  derived and/or modified sequence
atgaccaccagcctggacaccgtggagaccttcggcaccaccagctactatgatgacgtggggctgctttgtgagaaggcagacacccgggctctgatggctcagttcgtcccccctctgtacagcttggtttttacagtcggtttactcggcaacgtggttgtagtaatgatcctgatcaagtaccggcgactcaggataatgaccaacatttacctgctcaacctggccatctctgatctgctattcctggtgaccctgcccttctggatccactacgtcagaggccataactgggtctttgggcacggaatgtgtaaacttctgtcgggcttttatcataccgggctgtacagcgagatcttctttatcattcttttgacaatagacagatacctggcaattgtccacgctgtgttcgccctgcgggctcgtaccgtgaccttcggagttatcacatcaatagttacttgggggctcgcagtgctggcagccctccctgaattcatcttttatgagacagaggaactctttgaagaaactctgtgctcggcactgtacccagaggatacagtatatagctggaggcactttcacacccttaggatgactattttttgcctggtgcttcctctgctggtcatggccatttgttacactggaatcataaagacgctcctgcggtgtcccagtaagaaaaagtataaagccataagactgatctttgtgataatggccgtgttttttatcttctggacaccttataatgtggccatcctgttgagctcttatcagtccatcctgtttggtaatgattgtgaaaggagcaaacacctcgacttagtgatgctggtgaccgaagtgatagcctactcgcattgttgtatgaaccctgtgatctacgcatttgttggagagcgctttcgtaaatatctccggcactttttccatagacacctcttaatgcacctaggcagatacatcccatttttaccctccgaaaaactggaaagaacctccagcgtctccccgtctaccgctgagccagagctaagtatcgtcttttag

SEQ ID NO: 121548 - DNA, 1068 bp, Artificial Sequence
  derived and/or modified sequence
atgacaacttccttagatactgtggagaccttcggtactacatcatactacgacgacgtggggctgctttgtgaaaaggccgacactagagccttaatggcacaattcgtgccacctctctactccttagtgtttacagtcggccttttggggaacgtagttgtggtcatgatcctgatcaagtacaggagactccgcatcatgacaaatatttacctgctcaaccttgccatttccgatctgctgtttctcgtcactctgcctttctggatccattacgtgagaggccacaactgggttttcggtcatggcatgtgcaagctcctcagtggcttctaccacaccggtttgtattctgagatctttttcatcatcctcctgacaatcgatcggtatctcgcgattgtgcatgccgtatttgcgctccgtgctcggaccgtaacatttggagtgatcacctctatcgtgacttggggtctggccgtcctggccgctctgcctgagttcattttttacgaaactgaggagttgttcgaagaaacactttgtagtgccctgtaccctgaagacactgtttacagctggcgtcactttcatacattacgcatgactatcttttgcctcgtattaccgttgctcgtgatggccatttgctacacaggcattattaagactcttctgcggtgcccctctaagaaaaagtacaaagccattaggctcatttttgtaataatggccgtgttcttcattttctggactccctataacgttgctatcctgctgtcgtcttaccaatctatcctgttcggcaatgattgtgagaggagcaagcacctggacctcgttatgctcgtgacagaggttatagcctacagccactgttgcatgaatccagtgatttatgctttcgtaggcgagaggttcaggaagtatctgcgccattttttccacaggcaccttctgatgcatcttggacgctatatcccttttctgccctcggagaaactagagcgcacatctagtgtctccccctcaactgccgagcccgagttgtcgatcgtcttttag

SEQ ID NO: 121549 - DNA, 1068 bp, Artificial Sequence
  derived and/or modified sequence
atgacgactagcctcgataccgtggagaccttcggcaccacctcctactacgatgacgtcggtctgctctgcgagaaggccgacaccagggccctgatggcgcagttcgtcccacctctgtatagcctggtcttcactgtgggcttgctgggaaacgtggtcgtggttatgatcctgatcaagtataggcgcttacggattatgacaaacatctatctgttaaatctggccatcagcgacctgctcttccttgtgaccctccctttctggatacattacgtgcgcggtcacaactgggttttcggacacggtatgtgcaaattactctcagggttctatcacacgggtctttattccgaaattttttttatcatcttgttaaccatcgataggtacttagctattgtgcacgcagtgtttgctctgcgcgctaggacagtgacctttggtgtaattaccagtattgtgacatggggtttggccgtgctggccgcactgccggagttcattttctacgaaacggaagaactgttcgaggaaacactctgtagtgctctttaccctgaagatactgtgtattcttggaggcacttccacacccttagaatgaccatcttttgcttggtgctaccccttctggtcatggcaatatgttatactggaatcataaaaaccctgctgcggtgcccctctaaaaaaaaatataaggccatcagattgatcttcgtgatcatggctgttttttttatattctggactccctataacgtggcaatacttttgtcaagttaccagagtattctattcggcaatgactgcgaacgttccaaacatctcgacctagttatgttggtaacggaggtcatcgcttattcacattgttgcatgaatccagtcatatacgcttttgtcggcgaacggtttcggaaatatctgaggcacttcttccaccgtcacctgctaatgcatctcgggcgatacatcccattcctgcctagtgagaaactggaaagaactagctctgtaagtccctctactgcagaacccgagctctctatagtgttttag

SEQ ID NO: 121550 - DNA, 1068 bp, Artificial Sequence
  derived and/or modified sequence
atgacaacaagtctggataccgtcgagacttttgggactacatcatattacgacgatgttggcctcttatgtgagaaggctgatacaagagccctcatggctcagttcgtacccccactttatagcctggtcttcaccgttggcctccttggcaatgtggtggtcgtaatgatcctgatcaagtatagacggttaagaattatgaccaatatctatttgctgaatctggctattagtgacctgttattcttggttacactgccattttggattcactacgtaagagggcataactgggtgtttgggcatggaatgtgtaaattactgagtggattttatcataccggattgtattcagagatcttttttattatattacttactatcgatcggtacctggctattgttcacgccgtattcgccttacgcgctagaactgtcacgttcggtgttatcaccagcattgtaacctggggcctggctgtgctcgcagcgttgcctgagtttatcttctatgaaaccgaggagctgtttgaggaaactctgtgctctgctctgtacccagaggacacagtttactcttggcggcactttcacaccctgaggatgacaattttttgtctcgtgctgcccctgctagtcatggcgatctgctacacaggcatcattaaaacgttgctccgatgccctagtaagaaaaagtacaaagccatcaggttaattttcgtgatcatggctgttttctttattttctggaccccatacaatgtggcaatcttgctctcaagctaccagtcaattctgtttggaaacgattgcgaacggagtaaacacctggatctcgtgatgttggtgaccgaggtgatagcctacagccattgttgtatgaaccccgtgatctacgccttcgtaggagagagattcagaaaatacctcaggcattttttccatcgccatctgttgatgcatctgggcagatatatccccttcttgccgtcggagaagttagagcgcaccagttcagtcagcccatctaccgccgaacccgagctgagcattgtgttctag

SEQ ID NO: 121551 - DNA, 243 bp, Artificial Sequence
  derived and/or modified sequence
atgactacatctctggataccgtggagaccttcggcacaacttcctattacgacgatgtaggccttctgtgtgagaaagccgacactcgtgcgctcatggctcaatttgtcccacccctctacagtttagtgtttaccgtcggcctgctgggtaacgtggtggtggtcatgattctgattaaatacagaagacttcgcataatgaccaatatatacctcctgaatctcgcaatttcagactag

SEQ ID NO: 121552 - DNA, 1068 bp, Artificial Sequence
  derived and/or modified sequence
atgaccacatccctggatacagtggagaccttcggcactaccagttattacgacgacgtgggcctcctgtgcgagaaggctgatacacgggcacttatggcccagttcgtcccccctctttattcacttgtcttcactgtggggctgctgggaaatgttgtagttgtgatgatcttgattaagtaccggcgactgcgcatcatgactaatatttatctcctcaacctagccatatctgacttgctatttttggtcacacttccattctggattcactatgtcaggggccacaactgggtctttggccatggaatgtgtaaacttctctccggattttaccataccgggctgtactcagagattttcttcataattctgcttaccattgaccgttaccttgctatcgtgcatgccgtctttgctttgagagctaggaccgtgacatttggtgttattacctcaattgtgacatggggcctggccgtgctggccgctctgccggagtttattttctacgagaccgaggagctgttcgaagagactttgtgctcagccctgtaccctgaggacacagtttacagttggcgccacttccatactctgagaatgaccatcttctgcctggtcttgccactcctcgtcatggccatttgctatacgggcatcattaagacactcttgcgttgcccctctaagaagaaatacaaagccatccgtctcatttttgtgattatggcagtgttttttattttttggacgccatacaacgtagcaatcctgctcagcagttaccagtctatcctctttggaaacgactgtgaacggagcaaacatctggatcttgttatgcttgtgactgaggtgatcgcttacagccactgttgcatgaaccctgtgatctatgcttttgttggtgagaggttccggaagtatctgcgccacttttttcatcggcacctccttatgcaccttggccgttatatccccttcctccccagtgaaaagcttgaacgaacatccagtgtgtctccctccacagcagagccagagctctccattgtgttctag

SEQ ID NO: 121553 - DNA, 1068 bp, Artificial Sequence
  derived and/or modified sequence
atgaccaccagcctggacaccgtggagaccttcggcaccaccagctactacgacgacgtgggcctgctgtgcgagaaggccgacaccagagccctgatggcccagttcgtgccccccctgtacagcctggtgttcaccgtgggcctgctgggcaacgtggtggtggtgatgatcctgatcaagtacagaagactgagaatcatgaccaacatctacctgctgaacctggccatcagcgacctgctgttcctggtgaccctgcccttctggatccactacgtgagaggccacaactgggtgttcggccacggcatgtgcaagctgctgagcggcttctaccacaccggcctgtacagcgagatcttcttcatcatcctgctgaccatcgacagatacctggccatcgtgcacgccgtgttcgccctgagagccagaaccgtgaccttcggcgtgatcaccagcatcgtgacctggggcctggccgtgctggccgccctgcccgagttcatcttctacgagaccgaggagctgttcgaggagaccctgtgcagcgccctgtaccccgaggacaccgtgtacagctggagacacttccacaccctgagaatgaccatcttctgcctggtgctgcccctgctggtgatggccatctgctacaccggcatcatcaagaccctgctgagatgccccagcaagaagaagtacaaggccatcagactgatcttcgtgatcatggccgtgttcttcatcttctggaccccctacaacgtggccatcctgctgagcagctaccagagcatcctgttcggcaacgactgcgagagaagcaagcacctggacctggtgatgctggtgaccgaggtgatcgcctacagccactgctgcatgaaccccgtgatctacgccttcgtgggcgagagattcagaaagtacctgagacacttcttccacagacacctgctgatgcacctgggcagatacatccccttcctgcccagcgagaagctggagagaaccagcagcgtgagccccagcaccgccgagcccgagctgagcatcgtgttctag

SEQ ID NO: 121554 - DNA, 243 bp, Artificial Sequence
  derived and/or modified sequence
atgaccaccagcctggacaccgtggagaccttcggcaccaccagctactacgacgacgtgggcctgctgtgcgagaaggccgacaccagagccctgatggcccagttcgtgccccccctgtacagcctggtgttcaccgtgggcctgctgggcaacgtggtggtggtgatgatcctgatcaagtacagaagactgagaatcatgaccaacatctacctgctgaacctggccatcagcgactag

SEQ ID NO: 121555 - protein, 378 aa, Artificial Sequence
  derived and/or modified sequence
MDLGKPMKSVLVVALLVIFQVCLCQDEVTDDYIGDNTTVDYTLFESLCSKKDVRNFKAWFLPIMYSIICFVGLLGNGLVVLTYIYFKRLKTMTDTYLLNLAVADILFLLTLPFWAYSAAKSWVFGVHFCKLIFAIYKMSFFSGMLLLLCISIDRYVAIVQAVSAHRHRARVLLISKLSCVGIWILATVLSIPELLYSDLQRSSSEQAMRCSLITEHVEAFITIQVAQMVIGFLVPLLAMSFCYLVIIRTLLQARNFERNKAIKVIIAVVVVFIVFQLPYNGVVLAQTVANFNITSSTCELSKQLNIAYDVTYSLACVRCCVNPFLYAFIGVKFRNDLFKLFKDLGCLSQEQLRQWSSCRHIRRSSMSVEAETTTTFSP

SEQ ID NO: 121556 - DNA, 1137 bp, Artificial Sequence
  derived and/or modified sequence
atggacctcggcaaaccaatgaaaagtgtgctcgtggtggcgctattggtgatctttcaggtgtgtctgtgtcaggatgaagtgaccgacgattatataggtgacaataccaccgtcgactacaccctgtttgaatcactctgcagtaaaaaggatgtgcggaactttaaggcctggttccttcctattatgtatagcatcatctgctttgtggggctcttaggcaatggcctggtggttttaacttatatctacttcaaaagattgaaaactatgacagacacatacctgctcaacctggctgtggccgacattttattcctccttaccctacctttctgggcctatagcgccgctaaatcttgggtgttcggggttcacttttgcaaattaatcttcgccatttataaaatgtcttttttctccggaatgctactcctgctgtgcatcagcattgatcgttatgttgctatagttcaagccgtctccgcccatcgccaccgagctcgcgtccttttaatctccaaattatcatgtgtgggaatttggattctggcgaccgtgctatctattccggaactgctttattccgaccttcagcggtcgagctctgagcaggctatgcgctgctccctgatcacagagcatgtagaagcttttatcacaattcaggttgcccagatggttattggttttctggtgcccttgctcgctatgtcattttgctacctggttatcatcaggaccctgcttcaagctcgaaatttcgagcgtaacaaggccatcaaagtaatcattgccgtcgtcgtcgtgttcatcgtatttcagttgccttacaacggagtggtgctggcccagaccgttgccaactttaatataacttcctctacatgcgaattgagcaaacaactgaacattgcttacgacgttacttattcactagcgtgtgtacggtgctgcgtcaatccatttctgtacgcctttatcggcgttaaatttaggaatgacctctttaaacttttcaaggaccttggctgtctgtcacaagaacagctgcggcagtggtcaagttgtcgacatatccggcgctcatctatgagtgtcgaagccgaaaccaccaccactttctcaccctag

SEQ ID NO: 121557 - DNA, 1137 bp, Artificial Sequence
  derived and/or modified sequence
atggacctgggcaagcccatgaagtctgtgctggtggtggccctgctggtgatcttccaggtgtgcctgtgccaggatgaggtgacagatgactacatcggggacaacaccaccgtggactacaccctgtttgagagcctgtgcagcaagaaggatgtgaggaacttcaaggcctggttcctgcccatcatgtacagcatcatctgctttgtgggcctgctgggcaatggcctggtggtgctgacctacatctacttcaagaggctgaagaccatgacagacacctacctgctgaacctggccgtggccgacatcctcttcctgctgaccctgcccttctgggcctacagcgctgccaagtcctgggtgtttggagtgcacttctgcaagctgatctttgccatctacaagatgtccttcttcagcggcatgctgctgctgctgtgcatcagcattgacagatatgtggccatcgtgcaggccgtgtctgcccaccgccaccgggcccgggtgctgctgatcagcaagctgagctgtgtgggcatctggatcctggccaccgtgctgagcatccctgagctgctgtacagcgacctgcagaggagcagcagcgagcaggccatgcgctgcagcctcatcacagagcacgtggaggccttcatcaccatccaggtggcccagatggtgattggcttcctggtgcccctgctggccatgtccttctgctacctggtgatcatccgcaccctgctgcaggccaggaactttgagaggaacaaggccatcaaggtgatcatcgctgtggtggtggtgttcatcgtgttccagctgccctacaacggggtggtgctggcccagacagtggccaacttcaacatcaccagcagcacctgtgagctgagcaagcagctgaacatcgcctatgatgtgacctacagcctggcctgtgtgcgctgctgcgtgaaccccttcctgtatgccttcatcggcgtgaagttcagaaatgacctcttcaagctgttcaaggacctgggctgcctgagccaggagcagctgcggcagtggagcagctgccgccacatccgccgcagctccatgtctgtggaggccgagaccaccaccaccttcagcccctag

SEQ ID NO: 121558 - DNA, 1137 bp, Artificial Sequence
  derived and/or modified sequence
atggacctgggcaagcccatgaagagcgtgctggtggtggccctgttagtgatcttccaggtgtgtctatgccaggacgaggtcaccgacgactatattggcgacaacaccaccgtcgattataccctttttgaatccctatgttccaagaaagacgtgcgaaattttaaggcctggtttctgccaattatgtatagcatcatctgtttcgtcggcctgctggggaatgggctggttgttctgacatacatttactttaaaagactgaagacaatgacagatacctatctcctcaatctggcggtagcggacattctgtttctgctcaccttacctttttgggcgtatagtgccgccaaatcctgggtatttggagtacacttctgtaagcttatatttgcgatatataaaatgtccttcttctcaggcatgctcctgctcctgtgtattagtatagatcggtatgtggctatcgttcaagccgtcagcgcccaccggcatagagcccgagtactgctgatctccaagctatcctgcgtgggaatctggatcttggcaactgtgctgtctatacccgagctcctgtacagtgatttacagagaagttccagcgagcaggccatgaggtgctcccttattaccgaacatgtggaggcatttatcaccatccaggtggcacagatggttataggctttctagtcccattgcttgcaatgagcttctgctacctggtgatcattagaaccttgctgcaggctcgaaacttcgagcggaataaggcaattaaggttattattgcggtcgttgttgtgtttatcgtgttccagctcccttacaatggtgttgtgcttgctcagaccgtggccaactttaacatcacatcatctacatgcgaacttagcaagcagctcaacattgcctatgatgtcacatactcactggcatgtgtgagatgctgcgtaaacccattcctttacgctttcatcggcgttaaatttaggaacgatctgttcaagctcttcaaagatttagggtgcctgtcccaagagcagctgcggcagtggtcttcctgccggcatatcaggcggagtagtatgagtgtggaggctgaaacaactaccaccttctcaccttag

SEQ ID NO: 121559 - DNA, 1137 bp, Artificial Sequence
  derived and/or modified sequence
atggatctcgggaagcctatgaagagtgtgctggtggttgccctcttggtgatttttcaggtgtgcttgtgccaggacgaagtgacagatgattatattggcgataacactactgtagactatacattgtttgagagcttatgtagcaagaaggatgtgcgaaactttaaggcctggtttctcccgataatgtactccatcatttgtttcgtggggcttcttggcaatggactagtggtgctcacctatatctacttcaaaagactgaagacgatgactgacacctatctgcttaaccttgcagtggcagatatactgttccttttaactcttcccttttgggcttattctgcggctaaaagctgggtcttcggtgtgcatttttgtaaacttattttcgccatttataaaatgtcgtttttttccggcatgctgcttctgctttgtatttcaattgaccgttacgttgccattgtgcaggctgtgtctgcccatcgccacagagcacgggttctcctgattagcaaactcagctgtgtagggatctggatactcgctaccgtgctatcgattccagaactgctttattctgatctgcagcgtagcagctccgaacaggccatgagatgcagccttatcaccgagcacgtggaagccttcatcaccatccaggtggcccagatggtcataggttttctagtcccgctgctggcaatgtctttctgctatctcgtgattattaggaccctactccaggcccgaaacttcgagcgaaataaagccattaaagtaattatcgcggtcgtggtggtgttcatcgtttttcaacttccctacaacggggtcgtgcttgcccagaccgtggccaatttcaatattacatctagcacgtgcgagctgagtaaacaattaaatatcgcttatgacgtaacctactctctggcatgtgtgaggtgttgcgtcaacccgttcctgtatgctttcattggcgtaaaatttcgtaatgacctctttaagctctttaaagatctcggctgcctctcccaggaacaactccgccagtggtcttcctgtcgacatattcgtcgctcatccatgtcagtggaagccgagaccacaactaccttttctccctag

SEQ ID NO: 121560 - DNA, 2173 bp, Artificial Sequence
  derived and/or modified sequence
agacaggggtagtgcgaggccgggcacagccttcctgtgtggttttaccgcccagagagcgtcatggacctggggaaaccaatgaaaagcgtgctggtggtggctctccttgtcattttccaggtatgcctgtgtcaagatgaggtcacggacgattacatcggagacaacaccacagtggactacactttgttcgagtctttgtgctccaagaaggacgtgcggaactttaaagcctggttcctccctatcatgtactccatcatttgtttcgtgggcctactgggcaatgggctggtcgtgttgacctatatctatttcaagaggctcaagaccatgaccgatacctacctgctcaacctggcggtggcagacatcctcttcctcctgacccttcccttctgggcctacagcgcggccaagtcctgggtcttcggtgtccacttttgcaagctcatctttgccatctacaagatgagcttcttcagtggcatgctcctacttctttgcatcagcattgaccgctacgtggccatcgtccaggctgtctcagctcaccgccaccgtgcccgcgtccttctcatcagcaagctgtcctgtgtgggcatctggatactagccacagtgctctccatcccagagctcctgtacagtgacctccagaggagcagcagtgagcaagcgatgcgatgctctctcatcacagagcatgtggaggcctttatcaccatccaggtggcccagatggtgatcggctttctggtccccctgctggccatgagcttctgttaccttgtcatcatccgcaccctgctccaggcacgcaactttgagcgcaacaaggccatcaaggtgatcatcgctgtggtcgtggtcttcatagtcttccagctgccctacaatggggtggtcctggcccagacggtggccaacttcaacatcaccagtagcacctgtgagctcagtaagcaactcaacatcgcctacgacgtcacctacagcctggcctgcgtccgctgctgcgtcaaccctttcttgtacgccttcatcggcgtcaagttccgcaacgatctcttcaagctcttcaaggacctgggctgcctcagccaggagcagctccggcagtggtcttcctgtcggcacatccggcgctcctccatgagtgtggaggccgagaccaccaccaccttctccccataggcgactcttctgcctggactagagggacctctcccagggtccctggggtggggatagggagcagatgcaatgactcaggacatccccccgccaaaagctgctcagggaaaagcagctctcccctcagagtgcaagcccctgctccagaagatagcttcaccccaatcccagctacctcaaccaatgccaaaaaaagacagggctgataagctaacaccagacagacaacactgggaaacagaggctattgtcccctaaaccaaaaactgaaagtgaaagtccagaaactgttcccacctgctggagtgaaggggccaaggagggtgagtgcaaggggcgtgggagtggcctgaagagtcctctgaatgaaccttctggcctcccacagactcaaatgctcagaccagctcttccgaaaaccaggccttatctccaagaccagagatagtggggagacttcttggcttggtgaggaaaagcggacatcagctggtcaaacaaactctctgaacccctccctccatcgttttcttcactgtcctccaagccagcgggaatggcagctgccacgccgccctaaaagcacactcatcccctcacttgccgcgtcgccctcccaggctctcaacaggggagagtgtggtgtttcctgcaggccaggccagctgcctccgcgtgatcaaagccacactctgggctccagagtggggatgacatgcactcagctcttggctccactgggatgggaggagaggacaagggaaatgtcaggggcggggagggtgacagtggccgcccaaggcccacgagcttgttctttgttctttgtcacagggactgaaaacctctcctcatgttctgctttcgattcgttaagagagcaacattttacccacacacagataaagttttcccttgaggaaacaacagctttaaaagaaaaagaaaaaaaaagtctttggtaaatggcaaa

SEQ ID NO: 121561 - DNA, 1137 bp, Artificial Sequence
  derived and/or modified sequence
atggacctgggcaagcccatgaagagcgtgctggtggtggccctgctggtgatcttccaggtgtgcctgtgccaggacgaggtgaccgacgactacatcggcgacaacaccaccgtggactacaccctgttcgagagcctgtgcagcaagaaggacgtgagaaacttcaaggcctggttcctgcccatcatgtacagcatcatctgcttcgtgggcctgctgggcaacggcctggtggtgctgacctacatctacttcaagagactgaagaccatgaccgacacctacctgctgaacctggccgtggccgacatcctgttcctgctgaccctgcccttctgggcctacagcgccgccaagagctgggtgttcggcgtgcacttctgcaagctgatcttcgccatctacaagatgagcttcttcagcggcatgctgctgctgctgtgcatcagcatcgacagatacgtggccatcgtgcaggccgtgagcgcccacagacacagagccagagtgctgctgatcagcaagctgagctgcgtgggcatctggatcctggccaccgtgctgagcatccccgagctgctgtacagcgacctgcagagaagcagcagcgagcaggccatgagatgcagcctgatcaccgagcacgtggaggccttcatcaccatccaggtggcccagatggtgatcggcttcctggtgcccctgctggccatgagcttctgctacctggtgatcatcagaaccctgctgcaggccagaaacttcgagagaaacaaggccatcaaggtgatcatcgccgtggtggtggtgttcatcgtgttccagctgccctacaacggcgtggtgctggcccagaccgtggccaacttcaacatcaccagcagcacctgcgagctgagcaagcagctgaacatcgcctacgacgtgacctacagcctggcctgcgtgagatgctgcgtgaaccccttcctgtacgccttcatcggcgtgaagttcagaaacgacctgttcaagctgttcaaggacctgggctgcctgagccaggagcagctgagacagtggagcagctgcagacacatcagaagaagcagcatgagcgtggaggccgagaccaccaccaccttcagcccctag

SEQ ID NO: 121562 - protein, 1487 aa, Artificial Sequence
  derived and/or modified sequence
MIRLGAPQTLVLLTLLVAAVLRCQGQDVQEAGSCVQDGQRYNDKDVWKPEPCRICVCDTGTVLCDDIICEDVKDCLSPEIPFGECCPICPTDLATASGQPGPKGQKGEPGDIKDIVGPKGPPGPQGPAGEQGPRGDRGDKGEKGAPGPRGRDGEPGTPGNPGPPGPPGPPGPPGLGGNFAAQMAGGFDEKAGGAQLGVMQGPMGPMGPRGPPGPAGAPGPQGFQGNPGEPGEPGVSGPMGPRGPPGPPGKPGDDGEAGKPGKAGERGPPGPQGARGFPGTPGLPGVKGHRGYPGLDGAKGEAGAPGVKGESGSPGENGSPGPMGPRGLPGERGRTGPAGAAGARGNDGQPGPAGPPGPVGPAGGPGFPGAPGAKGEAGPTGARGPEGAQGPRGEPGTPGSPGPAGASGNPGTDGIPGAKGSAGAPGIAGAPGFPGPRGPPGPQGATGPLGPKGQTGEPGIAGFKGEQGPKGEPGPAGPQGAPGPAGEEGKRGARGEPGGVGPIGPPGERGAPGNRGFPGQDGLAGPKGAPGERGPSGLAGPKGANGDPGRPGEPGLPGARGLTGRPGDAGPQGKVGPSGAPGEDGRPGPPGPQGARGQPGVMGFPGPKGANGEPGKAGEKGLPGAPGLRGLPGKDGETGAAGPPGPAGPAGERGEQGAPGPSGFQGLPGPPGPPGEGGKPGDQGVPGEAGAPGLVGPRGERGFPGERGSPGAQGLQGPRGLPGTPGTDGPKGASGPAGPPGAQGPPGLQGMPGERGAAGIAGPKGDRGDVGEKGPEGAPGKDGGRGLTGPIGPPGPAGANGEKGEVGPPGPAGSAGARGAPGERGETGPPGPAGFAGPPGADGQPGAKGEQGEAGQKGDAGAPGPQGPSGAPGPQGPTGVTGPKGARGAQGPPGATGFPGAAGRVGPPGSNGNPGPPGPPGPSGKDGPKGARGDSGPPGRAGEPGLQGPAGPPGEKGEPGDDGPSGAEGPPGPQGLAGQRGIVGLPGQRGERGFPGLPGPSGEPGKQGAPGASGDRGPPGPVGPPGLTGPAGEPGREGSPGADGPPGRDGAAGVKGDRGETGAVGAPGAPGPPGSPGPAGPTGKQGDRGEAGAQGPMGPSGPAGARGIQGPQGPRGDKGEAGEPGERGLKGHRGFTGLQGLPGPPGPSGDQGASGPAGPSGPRGPPGPVGPSGKDGANGIPGPIGPPGPRGRSGETGPAGPPGNPGPPGPPGPPGPGIDMSAFAGLGPREKGPDPLQYMRADQAAGGLRQHDAEVDATLKSLNNQIESIRSPEGSRKNPARTCRDLKLCHPEWKSGDYWIDPNQGCTLDAMKVFCNMETGETCVYPNPANVPKKNWWSSKSKEKKHIWFGETINGGFHFSYGDDNLAPNTANVQMTFLRLLSTEGSQNITYHCKNSIAYLDEAAGNLKKALLIQGSNDVEIRAEGNSRFTYTALKDGCTKHTGKWGKTVIEYRSQKTSRLPIIDIAPMDIGGPEQEFGVDIGPVCFL

SEQ ID NO: 121563 - protein, 1312 aa, Artificial Sequence
  derived and/or modified sequence
MGPRLSVWLLLLPAALLLHEEHSRAAAKGGCAGSGCGKCDCHGVKGQKGERGLPGLQGVIGFPGMQGPEGPQGPPGQKGDTGEPGLPGTKGTRGPPGASGYPGNPGLPGIPGQDGPPGPPGIPGCNGTKGERGPLGPPGLPGFAGNPGDPGEILGHVPGMLLKGERGFPGIPGTPGPPGLPGLQGPVGPPGFTGPPVSFGGCLSEFGHGGISFPLTKRRQGDQGVSGPPGVPGQAQVQEKGDFATKGEKGQKGEPGFQGMPGVGEKGEPGKPGPRGKPGKDGDKGEKGSPGFPGEPGYPGLIGRQGPQVNAGTIAYPLPPCPVIGTGPLGEKGERGYPGTPGPRGEPGPKGSFLAFFPPPPTPPPFAGLPVPGQAGAPGFPGERGEKGDRGFPGTSLPGPSGRDGLPGPPGSPGPPGQPGYTNGIVECQPGPPGDQGPPGIPGQPGFIGEIGEKGQKGESCLICDIDGYRGPPGPQGPPGEIGFPGQPGAKGLPGITGQSGLPGLPGQQGAPGIPGFPGSKGEMGVMGTPGQPGSPGPVGAPGLPGEKGDHGFPGSSGPRGDPGLKGDKGDVGLPGKPGSMDKVDMGSMKGQKGDQGEKGQIGPIGEKGSRGDPGTPGVPGKDGQAGQPGQPGPKGDPGISGTPGAPGLPGPKGSVGGMGLPGTPGEKGVPGIPGPQGSPGLPGDKGAKGEKGQAGPPGIGIPGLRGEKGDQGIAGFPGSPGEKGEKGSIGIPGMPGSPGLKGSPGSVGYPGSPGLPGEKGDKGLPGLDGIPGVKGEAGLPGTPGPTGPAGQKGEPGSDGIPGSAGEKGEPGLPGRGFPGFPGAKGDKGSKGEVGFPGLAGSPGIPGSKGEQGFMGPPGPQGQPGLPGSPGHATEGPKGDRGPQGQPGLPGLPGPMGPPGLPGIDGVKGDKGNPGWPGAPGVPGPKGDPGFQGMPGIGGSPGITGSKGDMGPPGVPGFQGPKGLPGLQGIKGDQGDQGVPGAKGLPGPPGPPGPYDIIKGEPGLPGPEGPPGLKGLQGLPGPKGQQGVTGLVGIPGPPGIPGFDGAPGQKGEMGPAGPTGPRGFPGPPGPDGLPGSMGPPGTPSVDHGFLVTRHSQTIDDPQCPSGTKILYHGYSLLYVQGNERAHGQDLGTAGSCLRKFSTMPFLFCNINNVCNFASRNDYSYWLSTPEPMPMSMAPITGENIRPFISRCAVCEAPAMVMAVHSQTIQIPPCPSGWSSLWIGYSFVMHTSAGAEGSGQALASPGSCLEEFRSAPFIECHGRGTCNYYANAYSFWLATIERSEMFKKPTPSTLKAGELRTHVSRCQVCMRRT

SEQ ID NO: 121564 - protein, 1669 aa, Artificial Sequence
  derived and/or modified sequence
MGPRLSVWLLLLPAALLLHEEHSRAAAKGGCAGSGCGKCDCHGVKGQKGERGLPGLQGVIGFPGMQGPEGPQGPPGQKGDTGEPGLPGTKGTRGPPGASGYPGNPGLPGIPGQDGPPGPPGIPGCNGTKGERGPLGPPGLPGFAGNPGPPGLPGMKGDPGEILGHVPGMLLKGERGFPGIPGTPGPPGLPGLQGPVGPPGFTGPPGPPGPPGPPGEKGQMGLSFQGPKGDKGDQGVSGPPGVPGQAQVQEKGDFATKGEKGQKGEPGFQGMPGVGEKGEPGKPGPRGKPGKDGDKGEKGSPGFPGEPGYPGLIGRQGPQGEKGEAGPPGPPGIVIGTGPLGEKGERGYPGTPGPRGEPGPKGFPGLPGQPGPPGLPVPGQAGAPGFPGERGEKGDRGFPGTSLPGPSGRDGLPGPPGSPGPPGQPGYTNGIVECQPGPPGDQGPPGIPGQPGFIGEIGEKGQKGESCLICDIDGYRGPPGPQGPPGEIGFPGQPGAKGDRGLPGRDGVAGVPGPQGTPGLIGQPGAKGEPGEFYFDLRLKGDKGDPGFPGQPGMTGRAGSPGRDGHPGLPGPKGSPGSVGLKGERGPPGGVGFPGSRGDTGPPGPPGYGPAGPIGDKGQAGFPGGPGSPGLPGPKGEPGKIVPLPGPPGAEGLPGSPGFPGPQGDRGFPGTPGRPGLPGEKGAVGQPGIGFPGPPGPKGVDGLPGDMGPPGTPGRPGFNGLPGNPGVQGQKGEPGVGLPGLKGLPGLPGIPGTPGEKGSIGVPGVPGEHGAIGPPGLQGIRGEPGPPGLPGSVGSPGVPGIGPPGARGPPGGQGPPGLSGPPGIKGEKGFPGFPGLDMPGPKGDKGAQGLPGITGQSGLPGLPGQQGAPGIPGFPGSKGEMGVMGTPGQPGSPGPVGAPGLPGEKGDHGFPGSSGPRGDPGLKGDKGDVGLPGKPGSMDKVDMGSMKGQKGDQGEKGQIGPIGEKGSRGDPGTPGVPGKDGQAGQPGQPGPKGDPGISGTPGAPGLPGPKGSVGGMGLPGTPGEKGVPGIPGPQGSPGLPGDKGAKGEKGQAGPPGIGIPGLRGEKGDQGIAGFPGSPGEKGEKGSIGIPGMPGSPGLKGSPGSVGYPGSPGLPGEKGDKGLPGLDGIPGVKGEAGLPGTPGPTGPAGQKGEPGSDGIPGSAGEKGEPGLPGRGFPGFPGAKGDKGSKGEVGFPGLAGSPGIPGSKGEQGFMGPPGPQGQPGLPGSPGHATEGPKGDRGPQGQPGLPGLPGPMGPPGLPGIDGVKGDKGNPGWPGAPGVPGPKGDPGFQGMPGIGGSPGITGSKGDMGPPGVPGFQGPKGLPGLQGIKGDQGDQGVPGAKGLPGPPGPPGPYDIIKGEPGLPGPEGPPGLKGLQGLPGPKGQQGVTGLVGIPGPPGIPGFDGAPGQKGEMGPAGPTGPRGFPGPPGPDGLPGSMGPPGTPSVDHGFLVTRHSQTIDDPQCPSGTKILYHGYSLLYVQGNERAHGQDLGTAGSCLRKFSTMPFLFCNINNVCNFASRNDYSYWLSTPEPMPMSMAPITGENIRPFISRCAVCEAPAMVMAVHSQTIQIPPCPSGWSSLWIGYSFVMHTSAGAEGSGQALASPGSCLEEFRSAPFIECHGRGTCNYYANAYSFWLATIERSEMFKKPTPSTLKAGELRTHVSRCQVCMRRT

SEQ ID NO: 121565 - protein, 1318 aa, Artificial Sequence
  derived and/or modified sequence
MGPRLSVWLLLLPAALLLHEEHSRAAAKGGCAGSGCGKCDCHGVKGQKGERGLPGLQGVIGFPGMQGPEGPQGPPGQKGDTGEPGLPGTKGTRGPPGASGYPGNPGLPGIPGQDGPPGPPGIPGCNGTKGERGPLGPPGLPGFAGNPGPPGLPGMKGDPGEILGHVPGMLLKGERGFPGIPGTPGPPGLPGLQGPVGPPGFTGPPGPPGPPGPPGEKGQMGLSFQGPKGDKGDQGVSGPPGVPGQAQVQEKGDFATKGEKGQKGEPGFQGMPGVGEKGEPGKPGPRGKPGKDGDKGEKGSPGFPGEPGYPGLIGRQGPQGEKGEAGPPGPPGIVIGTGPLGEKGERGYPGTPGPRGEPGPKGFPGLPGQPGPPGLPVPGQAGAPGFPGERGEKGDRGFPGTSLPGPSGRDGLPGPPGSPGPPGQPGYTNGIVECQPGPPGDQGPPGIPGQPGFIGEIGEKGQKGESCLICDIDGYRGPPGPQGPPGEIGFPGQPGAKGLPGITGQSGLPGLPGQQGAPGIPGFPGSKGEMGVMGTPGQPGSPGPVGAPGLPGEKGDHGFPGSSGPRGDPGLKGDKGDVGLPGKPGSMDKVDMGSMKGQKGDQGEKGQIGPIGEKGSRGDPGTPGVPGKDGQAGQPGQPGPKGDPGISGTPGAPGLPGPKGSVGGMGLPGTPGEKGVPGIPGPQGSPGLPGDKGAKGEKGQAGPPGIGIPGLRGEKGDQGIAGFPGSPGEKGEKGSIGIPGMPGSPGLKGSPGSVGYPGSPGLPGEKGDKGLPGLDGIPGVKGEAGLPGTPGPTGPAGQKGEPGSDGIPGSAGEKGEPGLPGRGFPGFPGAKGDKGSKGEVGFPGLAGSPGIPGSKGEQGFMGPPGPQGQPGLPGSPGHATEGPKGDRGPQGQPGLPGLPGPMGPPGLPGIDGVKGDKGNPGWPGAPGVPGPKGDPGFQGMPGIGGSPGITGSKGDMGPPGVPGFQGPKGLPGLQGIKGDQGDQGVPGAKGLPGPPGPPGPYDIIKGEPGLPGPEGPPGLKGLQGLPGPKGQQGVTGLVGIPGPPGIPGFDGAPGQKGEMGPAGPTGPRGFPGPPGPDGLPGSMGPPGTPSVDHGFLVTRHSQTIDDPQCPSGTKILYHGYSLLYVQGNERAHGQDLGTAGSCLRKFSTMPFLFCNINNVCNFASRNDYSYWLSTPEPMPMSMAPITGENIRPFISRCAVCEAPAMVMAVHSQTIQIPPCPSGWSSLWIGYSFVMHTSAGAEGSGQALASPGSCLEEFRSAPFIECHGRGTCNYYANAYSFWLATIERSEMFKKPTPSTLKAGELRTHVSRCQVCMRRT

SEQ ID NO: 121566 - protein, 146 aa, Artificial Sequence
  derived and/or modified sequence
PGPPGRPGKPGFPKPGGPGGPAIPGAPGRPFVPGIPGWPGAPAAPGFPMPSGPRSPGGPWGPGGPIGPISPGPGIPGGPGGPRGPGRPAGPTSPFGPYGPLSPGFPGSPGTPGFPTADGPGGPGNPGSPWSPGLPYPRGPAGPGGP

SEQ ID NO: 121567 - DNA, 3939 bp, Artificial Sequence
  derived and/or modified sequence
atgggccccagactgagcgtgtggctgctgctgctgcccgccgccctgctgctgcacgaggagcacagcagagccgccgccaagggcggctgcgccggcagcggctgcggcaagtgcgactgccacggcgtgaagggccagaagggcgagagaggcctgcccggcctgcagggcgtgatcggcttccccggcatgcagggccccgagggcccccagggcccccccggccagaagggcgacaccggcgagcccggcctgcccggcaccaagggcaccagaggcccccccggcgccagcggctaccccggcaaccccggcctgcccggcatccccggccaggacggcccccccggcccccccggcatccccggctgcaacggcaccaagggcgagagaggccccctgggcccccccggcctgcccggcttcgccggcaaccccggcgaccccggcgagatcctgggccacgtgcccggcatgctgctgaagggcgagagaggcttccccggcatccccggcacccccggcccccccggcctgcccggcctgcagggccccgtgggcccccccggcttcaccggcccccccgtgagcttcggcggctgcctgagcgagttcggccacggcggcatcagcttccccctgaccaagagaagacagggcgaccagggcgtgagcggcccccccggcgtgcccggccaggcccaggtgcaggagaagggcgacttcgccaccaagggcgagaagggccagaagggcgagcccggcttccagggcatgcccggcgtgggcgagaagggcgagcccggcaagcccggccccagaggcaagcccggcaaggacggcgacaagggcgagaagggcagccccggcttccccggcgagcccggctaccccggcctgatcggcagacagggcccccaggtgaacgccggcaccatcgcctaccccctgcccccctgccccgtgatcggcaccggccccctgggcgagaagggcgagagaggctaccccggcacccccggccccagaggcgagcccggccccaagggcagcttcctggccttcttcccccccccccccacccccccccccttcgccggcctgcccgtgcccggccaggccggcgcccccggcttccccggcgagagaggcgagaagggcgacagaggcttccccggcaccagcctgcccggccccagcggcagagacggcctgcccggcccccccggcagccccggcccccccggccagcccggctacaccaacggcatcgtggagtgccagcccggcccccccggcgaccagggcccccccggcatccccggccagcccggcttcatcggcgagatcggcgagaagggccagaagggcgagagctgcctgatctgcgacatcgacggctacagaggcccccccggcccccagggcccccccggcgagatcggcttccccggccagcccggcgccaagggcctgcccggcatcaccggccagagcggcctgcccggcctgcccggccagcagggcgcccccggcatccccggcttccccggcagcaagggcgagatgggcgtgatgggcacccccggccagcccggcagccccggccccgtgggcgcccccggcctgcccggcgagaagggcgaccacggcttccccggcagcagcggccccagaggcgaccccggcctgaagggcgacaagggcgacgtgggcctgcccggcaagcccggcagcatggacaaggtggacatgggcagcatgaagggccagaagggcgaccagggcgagaagggccagatcggccccatcggcgagaagggcagcagaggcgaccccggcacccccggcgtgcccggcaaggacggccaggccggccagcccggccagcccggccccaagggcgaccccggcatcagcggcacccccggcgcccccggcctgcccggccccaagggcagcgtgggcggcatgggcctgcccggcacccccggcgagaagggcgtgcccggcatccccggcccccagggcagccccggcctgcccggcgacaagggcgccaagggcgagaagggccaggccggcccccccggcatcggcatccccggcctgagaggcgagaagggcgaccagggcatcgccggcttccccggcagccccggcgagaagggcgagaagggcagcatcggcatccccggcatgcccggcagccccggcctgaagggcagccccggcagcgtgggctaccccggcagccccggcctgcccggcgagaagggcgacaagggcctgcccggcctggacggcatccccggcgtgaagggcgaggccggcctgcccggcacccccggccccaccggccccgccggccagaagggcgagcccggcagcgacggcatccccggcagcgccggcgagaagggcgagcccggcctgcccggcagaggcttccccggcttccccggcgccaagggcgacaagggcagcaagggcgaggtgggcttccccggcctggccggcagccccggcatccccggcagcaagggcgagcagggcttcatgggcccccccggcccccagggccagcccggcctgcccggcagccccggccacgccaccgagggccccaagggcgacagaggcccccagggccagcccggcctgcccggcctgcccggccccatgggcccccccggcctgcccggcatcgacggcgtgaagggcgacaagggcaaccccggctggcccggcgcccccggcgtgcccggccccaagggcgaccccggcttccagggcatgcccggcatcggcggcagccccggcatcaccggcagcaagggcgacatgggcccccccggcgtgcccggcttccagggccccaagggcctgcccggcctgcagggcatcaagggcgaccagggcgaccagggcgtgcccggcgccaagggcctgcccggcccccccggcccccccggcccctacgacatcatcaagggcgagcccggcctgcccggccccgagggcccccccggcctgaagggcctgcagggcctgcccggccccaagggccagcagggcgtgaccggcctggtgggcatccccggcccccccggcatccccggcttcgacggcgcccccggccagaagggcgagatgggccccgccggccccaccggccccagaggcttccccggcccccccggccccgacggcctgcccggcagcatgggcccccccggcacccccagcgtggaccacggcttcctggtgaccagacacagccagaccatcgacgacccccagtgccccagcggcaccaagatcctgtaccacggctacagcctgctgtacgtgcagggcaacgagagagcccacggccaggacctgggcaccgccggcagctgcctgagaaagttcagcaccatgcccttcctgttctgcaacatcaacaacgtgtgcaacttcgccagcagaaacgactacagctactggctgagcacccccgagcccatgcccatgagcatggcccccatcaccggcgagaacatcagacccttcatcagcagatgcgccgtgtgcgaggcccccgccatggtgatggccgtgcacagccagaccatccagatccccccctgccccagcggctggagcagcctgtggatcggctacagcttcgtgatgcacaccagcgccggcgccgagggcagcggccaggccctggccagccccggcagctgcctggaggagttcagaagcgcccccttcatcgagtgccacggcagaggcacctgcaactactacgccaacgcctacagcttctggctggccaccatcgagagaagcgagatgttcaagaagcccacccccagcaccctgaaggccggcgagctgagaacccacgtgagcagatgccaggtgtgcatgagaagaacctag

SEQ ID NO: 121568 - DNA, 5010 bp, Artificial Sequence
  derived and/or modified sequence
atgggccccagactgagcgtgtggctgctgctgctgcccgccgccctgctgctgcacgaggagcacagcagagccgccgccaagggcggctgcgccggcagcggctgcggcaagtgcgactgccacggcgtgaagggccagaagggcgagagaggcctgcccggcctgcagggcgtgatcggcttccccggcatgcagggccccgagggcccccagggcccccccggccagaagggcgacaccggcgagcccggcctgcccggcaccaagggcaccagaggcccccccggcgccagcggctaccccggcaaccccggcctgcccggcatccccggccaggacggcccccccggcccccccggcatccccggctgcaacggcaccaagggcgagagaggccccctgggcccccccggcctgcccggcttcgccggcaaccccggcccccccggcctgcccggcatgaagggcgaccccggcgagatcctgggccacgtgcccggcatgctgctgaagggcgagagaggcttccccggcatccccggcacccccggcccccccggcctgcccggcctgcagggccccgtgggcccccccggcttcaccggcccccccggcccccccggcccccccggcccccccggcgagaagggccagatgggcctgagcttccagggccccaagggcgacaagggcgaccagggcgtgagcggcccccccggcgtgcccggccaggcccaggtgcaggagaagggcgacttcgccaccaagggcgagaagggccagaagggcgagcccggcttccagggcatgcccggcgtgggcgagaagggcgagcccggcaagcccggccccagaggcaagcccggcaaggacggcgacaagggcgagaagggcagccccggcttccccggcgagcccggctaccccggcctgatcggcagacagggcccccagggcgagaagggcgaggccggcccccccggcccccccggcatcgtgatcggcaccggccccctgggcgagaagggcgagagaggctaccccggcacccccggccccagaggcgagcccggccccaagggcttccccggcctgcccggccagcccggcccccccggcctgcccgtgcccggccaggccggcgcccccggcttccccggcgagagaggcgagaagggcgacagaggcttccccggcaccagcctgcccggccccagcggcagagacggcctgcccggcccccccggcagccccggcccccccggccagcccggctacaccaacggcatcgtggagtgccagcccggcccccccggcgaccagggcccccccggcatccccggccagcccggcttcatcggcgagatcggcgagaagggccagaagggcgagagctgcctgatctgcgacatcgacggctacagaggcccccccggcccccagggcccccccggcgagatcggcttccccggccagcccggcgccaagggcgacagaggcctgcccggcagagacggcgtggccggcgtgcccggcccccagggcacccccggcctgatcggccagcccggcgccaagggcgagcccggcgagttctacttcgacctgagactgaagggcgacaagggcgaccccggcttccccggccagcccggcatgaccggcagagccggcagccccggcagagacggccaccccggcctgcccggccccaagggcagccccggcagcgtgggcctgaagggcgagagaggcccccccggcggcgtgggcttccccggcagcagaggcgacaccggcccccccggcccccccggctacggccccgccggccccatcggcgacaagggccaggccggcttccccggcggccccggcagccccggcctgcccggccccaagggcgagcccggcaagatcgtgcccctgcccggcccccccggcgccgagggcctgcccggcagccccggcttccccggcccccagggcgacagaggcttccccggcacccccggcagacccggcctgcccggcgagaagggcgccgtgggccagcccggcatcggcttccccggcccccccggccccaagggcgtggacggcctgcccggcgacatgggcccccccggcacccccggcagacccggcttcaacggcctgcccggcaaccccggcgtgcagggccagaagggcgagcccggcgtgggcctgcccggcctgaagggcctgcccggcctgcccggcatccccggcacccccggcgagaagggcagcatcggcgtgcccggcgtgcccggcgagcacggcgccatcggcccccccggcctgcagggcatcagaggcgagcccggcccccccggcctgcccggcagcgtgggcagccccggcgtgcccggcatcggcccccccggcgccagaggcccccccggcggccagggcccccccggcctgagcggcccccccggcatcaagggcgagaagggcttccccggcttccccggcctggacatgcccggccccaagggcgacaagggcgcccagggcctgcccggcatcaccggccagagcggcctgcccggcctgcccggccagcagggcgcccccggcatccccggcttccccggcagcaagggcgagatgggcgtgatgggcacccccggccagcccggcagccccggccccgtgggcgcccccggcctgcccggcgagaagggcgaccacggcttccccggcagcagcggccccagaggcgaccccggcctgaagggcgacaagggcgacgtgggcctgcccggcaagcccggcagcatggacaaggtggacatgggcagcatgaagggccagaagggcgaccagggcgagaagggccagatcggccccatcggcgagaagggcagcagaggcgaccccggcacccccggcgtgcccggcaaggacggccaggccggccagcccggccagcccggccccaagggcgaccccggcatcagcggcacccccggcgcccccggcctgcccggccccaagggcagcgtgggcggcatgggcctgcccggcacccccggcgagaagggcgtgcccggcatccccggcccccagggcagccccggcctgcccggcgacaagggcgccaagggcgagaagggccaggccggcccccccggcatcggcatccccggcctgagaggcgagaagggcgaccagggcatcgccggcttccccggcagccccggcgagaagggcgagaagggcagcatcggcatccccggcatgcccggcagccccggcctgaagggcagccccggcagcgtgggctaccccggcagccccggcctgcccggcgagaagggcgacaagggcctgcccggcctggacggcatccccggcgtgaagggcgaggccggcctgcccggcacccccggccccaccggccccgccggccagaagggcgagcccggcagcgacggcatccccggcagcgccggcgagaagggcgagcccggcctgcccggcagaggcttccccggcttccccggcgccaagggcgacaagggcagcaagggcgaggtgggcttccccggcctggccggcagccccggcatccccggcagcaagggcgagcagggcttcatgggcccccccggcccccagggccagcccggcctgcccggcagccccggccacgccaccgagggccccaagggcgacagaggcccccagggccagcccggcctgcccggcctgcccggccccatgggcccccccggcctgcccggcatcgacggcgtgaagggcgacaagggcaaccccggctggcccggcgcccccggcgtgcccggccccaagggcgaccccggcttccagggcatgcccggcatcggcggcagccccggcatcaccggcagcaagggcgacatgggcccccccggcgtgcccggcttccagggccccaagggcctgcccggcctgcagggcatcaagggcgaccagggcgaccagggcgtgcccggcgccaagggcctgcccggcccccccggcccccccggcccctacgacatcatcaagggcgagcccggcctgcccggccccgagggcccccccggcctgaagggcctgcagggcctgcccggccccaagggccagcagggcgtgaccggcctggtgggcatccccggcccccccggcatccccggcttcgacggcgcccccggccagaagggcgagatgggccccgccggccccaccggccccagaggcttccccggcccccccggccccgacggcctgcccggcagcatgggcccccccggcacccccagcgtggaccacggcttcctggtgaccagacacagccagaccatcgacgacccccagtgccccagcggcaccaagatcctgtaccacggctacagcctgctgtacgtgcagggcaacgagagagcccacggccaggacctgggcaccgccggcagctgcctgagaaagttcagcaccatgcccttcctgttctgcaacatcaacaacgtgtgcaacttcgccagcagaaacgactacagctactggctgagcacccccgagcccatgcccatgagcatggcccccatcaccggcgagaacatcagacccttcatcagcagatgcgccgtgtgcgaggcccccgccatggtgatggccgtgcacagccagaccatccagatccccccctgccccagcggctggagcagcctgtggatcggctacagcttcgtgatgcacaccagcgccggcgccgagggcagcggccaggccctggccagccccggcagctgcctggaggagttcagaagcgcccccttcatcgagtgccacggcagaggcacctgcaactactacgccaacgcctacagcttctggctggccaccatcgagagaagcgagatgttcaagaagcccacccccagcaccctgaaggccggcgagctgagaacccacgtgagcagatgccaggtgtgcatgagaagaacctag

SEQ ID NO: 121569 - DNA, 3957 bp, Artificial Sequence
  derived and/or modified sequence
atgggccccagactgagcgtgtggctgctgctgctgcccgccgccctgctgctgcacgaggagcacagcagagccgccgccaagggcggctgcgccggcagcggctgcggcaagtgcgactgccacggcgtgaagggccagaagggcgagagaggcctgcccggcctgcagggcgtgatcggcttccccggcatgcagggccccgagggcccccagggcccccccggccagaagggcgacaccggcgagcccggcctgcccggcaccaagggcaccagaggcccccccggcgccagcggctaccccggcaaccccggcctgcccggcatccccggccaggacggcccccccggcccccccggcatccccggctgcaacggcaccaagggcgagagaggccccctgggcccccccggcctgcccggcttcgccggcaaccccggcccccccggcctgcccggcatgaagggcgaccccggcgagatcctgggccacgtgcccggcatgctgctgaagggcgagagaggcttccccggcatccccggcacccccggcccccccggcctgcccggcctgcagggccccgtgggcccccccggcttcaccggcccccccggcccccccggcccccccggcccccccggcgagaagggccagatgggcctgagcttccagggccccaagggcgacaagggcgaccagggcgtgagcggcccccccggcgtgcccggccaggcccaggtgcaggagaagggcgacttcgccaccaagggcgagaagggccagaagggcgagcccggcttccagggcatgcccggcgtgggcgagaagggcgagcccggcaagcccggccccagaggcaagcccggcaaggacggcgacaagggcgagaagggcagccccggcttccccggcgagcccggctaccccggcctgatcggcagacagggcccccagggcgagaagggcgaggccggcccccccggcccccccggcatcgtgatcggcaccggccccctgggcgagaagggcgagagaggctaccccggcacccccggccccagaggcgagcccggccccaagggcttccccggcctgcccggccagcccggcccccccggcctgcccgtgcccggccaggccggcgcccccggcttccccggcgagagaggcgagaagggcgacagaggcttccccggcaccagcctgcccggccccagcggcagagacggcctgcccggcccccccggcagccccggcccccccggccagcccggctacaccaacggcatcgtggagtgccagcccggcccccccggcgaccagggcccccccggcatccccggccagcccggcttcatcggcgagatcggcgagaagggccagaagggcgagagctgcctgatctgcgacatcgacggctacagaggcccccccggcccccagggcccccccggcgagatcggcttccccggccagcccggcgccaagggcctgcccggcatcaccggccagagcggcctgcccggcctgcccggccagcagggcgcccccggcatccccggcttccccggcagcaagggcgagatgggcgtgatgggcacccccggccagcccggcagccccggccccgtgggcgcccccggcctgcccggcgagaagggcgaccacggcttccccggcagcagcggccccagaggcgaccccggcctgaagggcgacaagggcgacgtgggcctgcccggcaagcccggcagcatggacaaggtggacatgggcagcatgaagggccagaagggcgaccagggcgagaagggccagatcggccccatcggcgagaagggcagcagaggcgaccccggcacccccggcgtgcccggcaaggacggccaggccggccagcccggccagcccggccccaagggcgaccccggcatcagcggcacccccggcgcccccggcctgcccggccccaagggcagcgtgggcggcatgggcctgcccggcacccccggcgagaagggcgtgcccggcatccccggcccccagggcagccccggcctgcccggcgacaagggcgccaagggcgagaagggccaggccggcccccccggcatcggcatccccggcctgagaggcgagaagggcgaccagggcatcgccggcttccccggcagccccggcgagaagggcgagaagggcagcatcggcatccccggcatgcccggcagccccggcctgaagggcagccccggcagcgtgggctaccccggcagccccggcctgcccggcgagaagggcgacaagggcctgcccggcctggacggcatccccggcgtgaagggcgaggccggcctgcccggcacccccggccccaccggccccgccggccagaagggcgagcccggcagcgacggcatccccggcagcgccggcgagaagggcgagcccggcctgcccggcagaggcttccccggcttccccggcgccaagggcgacaagggcagcaagggcgaggtgggcttccccggcctggccggcagccccggcatccccggcagcaagggcgagcagggcttcatgggcccccccggcccccagggccagcccggcctgcccggcagccccggccacgccaccgagggccccaagggcgacagaggcccccagggccagcccggcctgcccggcctgcccggccccatgggcccccccggcctgcccggcatcgacggcgtgaagggcgacaagggcaaccccggctggcccggcgcccccggcgtgcccggccccaagggcgaccccggcttccagggcatgcccggcatcggcggcagccccggcatcaccggcagcaagggcgacatgggcccccccggcgtgcccggcttccagggccccaagggcctgcccggcctgcagggcatcaagggcgaccagggcgaccagggcgtgcccggcgccaagggcctgcccggcccccccggcccccccggcccctacgacatcatcaagggcgagcccggcctgcccggccccgagggcccccccggcctgaagggcctgcagggcctgcccggccccaagggccagcagggcgtgaccggcctggtgggcatccccggcccccccggcatccccggcttcgacggcgcccccggccagaagggcgagatgggccccgccggccccaccggccccagaggcttccccggcccccccggccccgacggcctgcccggcagcatgggcccccccggcacccccagcgtggaccacggcttcctggtgaccagacacagccagaccatcgacgacccccagtgccccagcggcaccaagatcctgtaccacggctacagcctgctgtacgtgcagggcaacgagagagcccacggccaggacctgggcaccgccggcagctgcctgagaaagttcagcaccatgcccttcctgttctgcaacatcaacaacgtgtgcaacttcgccagcagaaacgactacagctactggctgagcacccccgagcccatgcccatgagcatggcccccatcaccggcgagaacatcagacccttcatcagcagatgcgccgtgtgcgaggcccccgccatggtgatggccgtgcacagccagaccatccagatccccccctgccccagcggctggagcagcctgtggatcggctacagcttcgtgatgcacaccagcgccggcgccgagggcagcggccaggccctggccagccccggcagctgcctggaggagttcagaagcgcccccttcatcgagtgccacggcagaggcacctgcaactactacgccaacgcctacagcttctggctggccaccatcgagagaagcgagatgttcaagaagcccacccccagcaccctgaaggccggcgagctgagaacccacgtgagcagatgccaggtgtgcatgagaagaacctag

SEQ ID NO: 121570 - DNA, 3939 bp, Artificial Sequence
  derived and/or modified sequence
atgggtccaagattgagcgtgtggttactcttactgcctgcagccctactcctgcatgaagagcactcacgtgccgccgccaaggggggctgcgccggatcgggttgcgggaagtgcgactgccatggcgttaagggtcagaagggcgaacgggggttacccggcctgcagggggtcatcggctttcccggcatgcaggggcctgaggggccacagggacctccggggcagaaaggcgataccggtgaaccaggcctgcccggcaccaagggaactcggggtcctccaggggcttcggggtaccccggcaatccgggattacccggaatccccggccaggatggaccccctggaccccccggcatccccggctgcaatggcaccaagggggagcgcggcccccttggccccccagggctgcccggcttcgccggcaaccccggagatccaggcgagatactcggacatgtgcccggcatgctgctgaaaggggagcgggggttccctggaattcccggaactccgggcccgcctggtctgccaggactgcaaggccctgtggggccgcccggtttcactggaccccccgtatccttcggagggtgcttgtcagagtttggccacggcgggatcagctttccactcaccaagagacgccaaggggatcagggagtttcgggacctccaggcgtcccggggcaggcccaggtccaggagaagggcgacttcgccaccaagggggaaaaggggcagaagggagaaccgggctttcagggcatgcctggagtaggtgagaagggagagcccgggaaacccgggccccgaggaaagcctggaaaggacggagacaagggggagaaagggagccctgggtttcctggagaaccaggctatccggggctcattggcagacagggcccccaggtgaatgccggaaccattgcctacccactgccgccctgtcctgtgattgggaccgggccgttgggggagaaaggcgaaaggggttatccgggtaccccaggacccaggggtgaacctggcccaaagggctccttcctggccttttttccccctccacccacacctcctccattcgctggcttgcctgtccccgggcaggcaggggcgccggggttcccgggcgagagaggtgagaaaggtgacaggggattcccaggaactagcctgcctggtccatccgggagagacggccttcccggtcctccagggagtccaggccccccagggcagcccggctacaccaacggcatcgtggaatgccagcccggcccacctggcgatcagggcccacctggtataccgggacagcccggctttattggcgaaatcggtgagaaggggcagaagggcgagtcttgcctgatctgtgacatagacggctatcgaggtcccccaggaccccagggcccaccaggcgagattggtttccctggccagcccggagcgaaaggactccctggaatcaccggtcagtccggtttacccggcctgcctggccagcagggagcgcctggcattccgggtttccccggttcaaaaggcgagatgggggtcatggggaccccgggccagcctgggtctccaggtccagtcggggcacctggcctccccggagagaaaggcgatcacggttttcctggatcatccggccctcggggcgatccagggttgaaaggagacaaaggcgatgtggggctaccgggcaaacctgggtccatggacaaggtggacatggggtctatgaaaggtcaaaagggggaccagggagagaagggccagatcgggcccattggcgaaaaaggatccagaggggatcctggcacacctggggtcccgggcaaggatggacaggccggtcagccaggccagccggggcctaagggcgatccgggcatcagtgggactcctggcgccccggggctgcccggccccaaaggctcagttggaggaatggggctccccggtacacctggcgagaaaggggtcccaggcatcccaggtcctcagggaagccccggactgcctggtgacaagggggctaaaggggagaagggccaggcgggaccaccggggatcgggatcccagggctccgtggagaaaagggcgaccaggggatagcgggtttccctggatcccccggcgaaaagggagagaaaggtagcattggcattccaggcatgccgggttcaccaggactgaagggcagtccaggttctgtgggatacccaggctcgcctggtctccccggggagaagggtgacaaaggcctgcctggcctggatggaattccgggagtgaaaggagaagccggcttgccgggaacacctgggcctacaggcccagcgggtcagaaaggcgagccagggagtgatggtatccccggcagcgcaggagagaaaggggagcccggccttcccggcagaggctttcccggttttcctggagctaagggggacaaagggagtaagggtgaagttggatttcccggcctggctggtagccctgggattcctggatccaagggggagcagggattcatgggaccaccagggccccagggccagcctggattgcccggtagtcccggccacgccactgaaggaccaaagggagatagaggcccacaaggacagcccgggctccctggattgccaggccccatggggccaccaggcctgcccggcatcgatggagtgaagggcgataaggggaaccctggctggcccggggctcctggagtgcccggtcccaagggagatcccgggttccagggaatgcctggtataggcgggagtcctgggattacaggctctaaaggggacatggggcctccgggggtgcccggcttccagggccccaagggactgcctggcctgcaggggattaaaggcgatcaaggagatcaaggtgtgccaggcgcaaagggtttgcctggtccacccggcccacctgggccatacgatatcatcaagggagagccaggccttccaggcccagaagggcctcctggcctgaaaggtctgcaaggccttccaggcccgaagggtcagcagggagtcacaggcttagtcggaatcccaggcccaccgggtatccctgggttcgacggggctcctgggcagaaaggggaaatgggaccagccggacctacgggtcctaggggcttccctggacccccagggcccgacggtcttcccgggtctatgggcccgcctggcaccccatccgtggaccatggattcctggtcacaagacatagtcaaactatagacgacccacagtgcccgtccggcaccaagatattgtaccacggctattccttattgtatgtgcagggtaatgagagggcccacggccaggacctgggcactgctggaagttgtttacgtaagttcagcacaatgccttttctgttctgtaacatcaataacgtttgcaatttcgcctcaagaaatgattattcttattggctgtctacgccagaacccatgcctatgtccatggccccaatcactggcgaaaacattaggcccttcatcagccggtgcgccgtttgtgaggctccggcgatggtgatggctgtgcactctcagactatacaaattccaccttgcccgtccggatggagttctttgtggatcggctattcctttgtgatgcacactagtgccggggcagagggttcggggcaggctctcgcctcccccggatcttgcctagaggagttcaggtcggcaccattcattgaatgtcacggtcggggtacatgtaactactatgccaatgcgtactctttctggctcgcaaccatagagcgttctgaaatgttcaagaaaccaaccccatccacactaaaggccggggagctgcggactcacgtgtctcggtgtcaagtgtgcatgaggcgcacttag

SEQ ID NO: 121571 - DNA, 5010 bp, Artificial Sequence
  derived and/or modified sequence
atggggcctcggctgtcagtgtggttgcttttgcttccagcggcactgcttctccacgaagagcactcacgggcagcggccaaaggtgggtgcgccgggtcaggatgtgggaaatgtgactgtcacggagtgaaggggcagaagggcgagagaggacttccagggttgcagggcgtgataggctttccaggcatgcagggtcccgagggacctcagggtcctcccgggcagaaaggggatacaggggaacccggccttcccggcactaaaggaacacgagggcctcctggggccagcggctatccaggaaatcctgggctccccggcattccggggcaggacggtccaccaggtccaccaggtatccccgggtgtaacggaacgaagggtgagagagggcctcttgggccacccggactgcctgggttcgccgggaatcctggcccccctgggcttccaggtatgaaaggtgatcccggggagattctaggtcacgtgcccggcatgcttctgaaaggcgagcgcggctttcctggcatccccggcacccccggccccccaggcttgccaggtttacagggccctgtgggtcccccaggattcactggaccacctggaccccctggcccacctggtccgcctggagagaaggggcagatggggctcagttttcaggggccaaaaggggataagggggaccaaggggtaagcggcccaccaggtgtacccggccaggcacaggtgcaggaaaagggggacttcgcaactaagggggaaaaggggcagaagggagagcctggttttcagggaatgcctggcgtgggcgaaaagggggaaccaggaaagcccggcccgagagggaagcctggcaaagacggagacaagggcgaaaaggggtctcccggtttcccaggggagcccggctacccagggctgatcggacgccaagggcctcaaggggagaaaggggaggccgggcctccgggccctccgggaattgtgattgggacaggccccctcggcgaaaaaggggagcggggctatccaggaacccctggaccaagaggcgaaccagggcctaaaggtttcccaggacttcccggccagccaggcccccccggtttgcccgtaccaggccaggccggcgctccagggttccccggagaaagaggcgaaaagggagaccgcgggtttccggggacaagtttacctggcccatctggtagggacgggctgcctggtcctccaggctctccagggccacctggccaacccgggtacaccaatggaattgtagaatgccagccaggtcctcccggtgaccagggacctccgggcattcccggccagccggggtttatcggggagataggtgagaaaggccagaaaggcgagtcttgcctcatctgcgacattgatggctaccggggccccccaggacctcaagggccacccggagaaatagggtttccaggtcagcccggagctaagggcgatcgcggacttcccggccgcgatggtgttgccggagtccctggcccccaaggcacaccagggttgatcggacagccaggggcaaagggcgaacctggtgagttttacttcgatctgaggctgaagggcgataaaggagaccccggatttcctgggcagcccggtatgactggacgcgccggttccccggggcgcgacggccatcccggcttgcctggccctaaaggatcccctgggtctgtagggcttaaaggggaaagaggtccaccaggtggtgtcggctttccaggctctcggggcgacacaggtccgccaggcccccccgggtacggtccagcagggcccattggggacaaaggacaggctgggttcccaggggggccgggctccccaggattacctgggcctaaaggcgagcccggcaaaattgtcccactgccggggccaccaggagctgaagggctcccgggaagccctggattccccggcccacagggagaccgaggcttccccggaacacctggtagacccggcctgcccggagaaaaaggcgcagtggggcagccaggcatcggctttcctgggccccccggaccaaaaggggtggacgggttgcccggcgatatgggtccgcccggtacccctggccggcctggcttcaacggacttccagggaatccaggcgtccagggacagaagggcgaaccaggagtcgggttacctggactcaagggacttcctggcctacccggtatacctggaaccccaggggaaaagggcagcatcggggtgccaggcgtgcccggtgaacacggcgccataggcccgccaggcctacaagggatcagaggtgagccgggccctcctggcttaccaggcagtgtgggcagccctggcgtaccaggtattggaccacccggggccagaggaccaccaggcggccagggtccaccaggtctgtctggcccaccaggcattaagggagagaaggggtttcctggatttccaggccttgatatgcccggacccaagggggataaaggcgcgcaaggattacccggaatcaccggccagtcaggattacccggcttacccgggcagcagggcgcacccggaatccctggctttccaggcagtaaaggagaaatgggcgtgatgggcactcctgggcaacctggcagcccgggaccagtcggagctcccggcctcccaggtgagaagggagaccatggttttcccggcagtagtggtccccggggggatcctgggctgaagggcgataagggtgacgttggactgcctggtaagcccggtagcatggacaaggttgacatgggcagtatgaagggccagaagggtgatcagggcgagaaagggcaaattgggcctatcggagagaagggctctaggggagacccagggactcccggagtacccgggaaggacgggcaggccgggcaaccggggcagccaggccctaaaggagacccaggaataagcggaacccccggagcacctggtctccctgggcctaagggttcagtggggggaatggggctgcccggtacacccggcgagaaaggggtgcccgggatccctggaccgcagggatctcccgggctacccggagataaaggtgccaagggcgaaaaaggacaggccggcccccccggaatcggaattcccggccttcggggcgaaaagggtgatcagggaatcgccggctttcccggaagtcccggggagaagggggaaaagggctcgatcggaatcccaggaatgcccggctctccaggtttgaaggggagtccgggatcagtgggctaccctggctccccagggctgcccggcgaaaagggcgataagggtcttcctggtcttgacgggataccgggagtgaagggagaggctgggctgcctggaaccccaggccctaccggaccagctgggcagaagggcgagcccgggtctgatggaattcctggaagtgcaggggagaagggggaaccaggactgcctggaagaggatttcctggatttcccggagccaagggagacaaaggcagtaagggggaggtggggttcccgggtcttgcaggtagccctggcatcccgggttctaagggcgagcagggctttatgggaccccctggtcctcagggccagcctgggctccctggcagccccggccacgcgaccgagggccctaagggagatcggggtcctcaggggcagcccgggctgcccgggcttccagggccaatgggacccccaggtctgccaggcattgacggcgtgaagggggataagggcaatcctggctggcccggggctccgggcgttcctggcccaaaaggtgaccccggctttcaggggatgccaggcatcggcgggtcgcccggcattacaggctctaaaggtgacatgggaccgcccggtgtgccaggattccaggggcctaagggcctgccaggactgcagggcatcaagggtgatcaaggagaccagggagttccgggagccaagggattacctggaccccctggtcctccgggtccttacgatatcattaagggcgagcccggccttcctggtcctgaaggtcctcctgggctaaagggcctacagggcttaccaggaccaaagggtcagcagggagtaacagggcttgttggtatccctggtccacctggaatccccggatttgacggcgccccaggccagaagggtgagatggggcccgctggacctacagggccaaggggctttcccggaccaccaggacctgacggcctgcccggatccatgggtccccctggcacgccaagcgttgaccacgggtttctggttactaggcattcccagactatcgatgatccacagtgtcctagcgggactaagatcctctatcacggttattctctgttgtatgtccaggggaacgagcgggcacacgggcaagacctaggcaccgccggtagctgcctaaggaagttctctactatgccgttcctgttctgtaacatcaataatgtttgcaactttgcctctcggaacgactattcttactggttgagtacacccgagcccatgccaatgtccatggcacccatcaccggagaaaatattcggccttttatttcccgctgcgctgtgtgtgaggctccggccatggtgatggccgtccactcccagacgatccagatccccccatgcccatcaggatggtcaagtctgtggattgggtactcgtttgtgatgcatacttccgctggggctgaaggttctggccaagctcttgccagtcccgggtcttgtcttgaggaatttcgttctgctccgtttattgagtgtcacggacgaggaacctgtaattactacgcaaacgcatactccttctggctggcgacgatcgaaagaagtgagatgttcaaaaaacctaccccctccaccttaaaggccggggagctcaggacacacgtgtccaggtgtcaggtgtgtatgcgccggacatag

SEQ ID NO: 121572 - DNA, 3957 bp, Artificial Sequence
  derived and/or modified sequence
atgggccctcgcctgtctgtctggctgttgctgcttcctgctgcattattgttgcacgaagagcattcacgggcagctgctaaaggaggatgtgcaggttccggatgcggaaagtgcgactgtcatggtgtgaaaggacaaaaaggtgagagaggactgcctggcttgcaaggtgtgatagggttcccaggcatgcagggaccggaaggtccccaaggcccaccggggcagaaaggcgacacgggagagccgggactgccagggacaaagggaaccagaggacctcccggcgcatccgggtacccaggaaatcctggattgcccggtattcccggtcaggacggtcctccaggccctcccggcatccccggatgcaatgggaccaaaggcgaacgcggacccctggggccgccagggctgccgggtttcgccgggaacccaggcccacctgggctacccggaatgaagggagaccctggagagatccttgggcacgtgccaggcatgttgctgaagggggagcgcggattcccgggcattcctgggacccctggaccccccggactgcctgggcttcaaggacccgtcgggcccccaggattcacagggccaccgggacctcccggaccacccggtccccccggcgaaaagggtcagatgggtctatcatttcagggtcccaagggtgacaagggtgatcaaggcgtcagtggcccgcccggcgttccaggccaggcccaggtccaagagaagggcgatttcgccaccaagggcgagaaaggtcagaagggggagcccggttttcaggggatgcccggcgtgggggaaaagggggagccgggtaaacctggaccaagaggcaagcccggcaaggacggggataaaggagagaaaggttcacccggctttccgggggaacccgggtatcccgggctgattgggcgccaggggccacaaggcgagaaaggcgaagctggaccgccgggaccacccggaatcgtcattggtaccggaccgttgggcgaaaagggcgaacgtgggtaccccggaactcctgggccccggggggaacccggtccaaaagggttcccggggctcccagggcagccgggacctccaggcctccctgtgccaggccaggcaggagcccctgggttcccgggagagcgcggcgaaaaaggcgacaggggattccccgggacatccctgcccgggccctcaggcagagacggattacctgggcctcccggttccccgggtccgcctgggcagccagggtacacgaatgggattgtcgaatgccagccgggacctccaggcgaccaaggtcctcccggtatccctggccagcccggatttatcggcgagataggagaaaagggccagaaaggggagtcctgtctcatctgtgacattgacggatatagggggccgcctgggccccaggggcctccgggggagatcggcttccccggccagcccggtgcaaagggacttcccggtattacggggcagtccgggttacctggactgccaggtcagcagggcgctccaggtattcccggcttccccggaagcaaaggcgaaatgggggtgatgggtactcctggacagcctggatcccccggcccagttggcgctccaggcttgccgggcgagaaaggcgaccacggttttcctgggagcagcggcccaaggggcgatcccggcctgaagggtgataaaggagatgtggggttgcccgggaagccgggatctatggataaggtcgatatgggctccatgaaaggacagaagggggaccagggtgagaagggccagataggtcctatcggagagaaaggtagtaggggagatcctggtactcccggtgtgcctgggaaggatggccaggccggtcaacccggacaacccggacccaagggagaccccggtataagcggtacccccggcgccccaggcctccctggccccaagggaagcgtgggcggtatgggcctgcctggcacccccggggaaaagggtgtcccaggaatacccgggccccagggttcgcccgggctgccgggggataaaggagccaaaggggaaaagggacaagccgggccaccagggattgggattccaggactccggggcgaaaagggggatcagggcatcgccggcttccctggctcgcccggcgagaagggtgaaaaaggctctattggcatccccggcatgcccgggtcaccaggcctgaagggctctccggggtccgtcggctatcccggatcccctggactccccggcgaaaagggagataaaggactgcccggtttggacgggatcccaggcgtgaaaggcgaggccggactgccaggcacaccaggccccacggggcctgcggggcaaaagggggagcccggcagtgatggcattcccgggtccgcaggtgaaaaaggtgaaccgggtctgccgggacgaggctttccaggttttcctggcgcaaaaggtgataaggggagcaagggcgaggtggggtttccgggactcgctgggtcgcccggaatcccgggcagtaagggggaacaggggtttatgggcccccctggtccccagggccaacccgggttgccaggctccccgggccatgccaccgaaggaccgaaaggagacagaggaccacaggggcaacccggattaccgggacttcctggccctatgggcccgcctggtctccccggtatcgatggggtcaagggggacaagggtaatcccgggtggcctggtgccccgggcgtgcctggtcccaaaggggatcccggctttcagggcatgccggggattggtgggtccccaggaatcaccggatccaaaggcgatatggggccacccggcgtgcccggcttccaagggcctaagggacttcctggcctccaaggaattaagggggaccaaggcgaccaaggagttcctggtgccaagggcctacccggaccaccgggacccccggggccttatgatatcattaagggggagccaggtttaccagggcctgagggcccgcccggtcttaagggcctccaaggtttgccagggcccaaagggcagcagggcgtgacaggcctcgtagggattccgggcccacccggcatccctgggttcgacggcgctcctggacagaaaggtgaaatgggccccgctggccctaccggccctcgcggattcccaggacccccgggtcctgacggtctgcccggttctatgggtcctccggggactccaagtgttgaccacgggttcctcgtgactcgacacagccagacaatcgacgatccccagtgccccagcggtactaagattttgtatcatggatacagcctcctgtatgtgcaggggaatgaacgggctcatgggcaggacctgggaacagcagggtcttgtttacggaagttctcgaccatgccattcctgttctgcaacattaataacgtttgcaactttgcatccagaaatgactatagttattggctttccacacctgagcccatgccgatgtccatggccccaatcacgggagagaatatcaggcctttcatatctcgttgcgccgtgtgtgaggcccctgccatggttatggcagtccacagtcagaccattcagataccaccatgtccaagtggctggagcagcctgtggatcggctactcctttgtcatgcatacaagtgcaggggccgagggcagcggccaggccctggccagcccgggttcatgcctggaggagtttagatctgccccttttatcgaatgccatgggcgaggtacttgtaattattatgcgaatgcctattctttttggttggcgacaattgaacgtagcgaaatgtttaagaagccaacgccgtccacgctgaaggccggcgagcttcgaacacacgtgtcccgttgtcaggtctgcatgcgtaggacatag

SEQ ID NO: 121573 - DNA, 5460 bp, Artificial Sequence
  derived and/or modified sequence
gcttggagccgccgcacccgggacggtgcgtagcgctggaagtccggccttccgagagctagctgtccgccgcggcccccgcacgccgggcagccgtccctcgccgcctcgggcgcgccaccatggggccccggctcagcgtctggctgctgctgctgcccgccgcccttctgctccacgaggagcacagccgggccgctgcgaagggtggctgtgctggctctggctgtggcaaatgtgactgccatggagtgaagggacaaaagggtgaaagaggcctcccggggttacaaggtgtcattgggtttcctggaatgcaaggacctgaggggccacagggaccaccaggacaaaagggtgatactggagaaccaggactacctggaacaaaagggacaagaggacctccgggagcatctggctaccctggaaacccaggacttcccggaattcctggccaagacggcccgccaggccccccaggtattccaggatgcaatggcacaaagggggagagagggccgctcgggcctcctggcttgcctggtttcgctggaaatcccggtgatccaggtgagatacttggccatgtgcccgggatgctgttgaaaggtgaaagaggatttcccggaatcccagggactccaggcccaccaggactgccagggcttcaaggtcctgttgggcctccaggatttaccggaccaccagtaagttttgggggctgtctctccgagtttggacatggcggaatcagcttccctcttactaaacgtcgacagggtgaccaaggggtcagtgggcctccaggagtaccaggacaagctcaagttcaagaaaaaggagacttcgccaccaagggagaaaagggccaaaaaggtgaacctggatttcaggggatgccaggggtcggagagaaaggtgaacccggaaaaccaggacccagaggcaaacccggaaaagatggtgacaaaggggaaaaagggagtcccggttttcctggtgaacccgggtacccaggactcataggccgccagggcccgcaggtaaacgctggcactattgcttatccccttcctccttgtccggttataggcacaggacctttgggagaaaaaggagagaggggctaccctggaactccggggccaagaggagagccaggcccaaaaggtagctttcttgcctttttcccccctcctcctactccccctccttttgcaggcctccctgtacctgggcaggctggtgcccctggcttccctggtgaaagaggagaaaaaggtgaccgaggatttcctggtacatctctgccaggaccaagtggaagagatgggctcccgggtcctcctggttcccctgggccccctgggcagcctggctacacaaatggaattgtggaatgtcagcccggacctccaggtgaccagggtcctcctggaattccagggcagccaggatttataggcgaaattggagagaaaggtcaaaaaggagagagttgcctcatctgtgatatagacggatatcgggggcctcccgggccacagggacccccgggagaaataggtttcccagggcagccaggggccaaaggactccctggcataacgggacagtcggggctccctggccttcctggacagcagggggctcctgggattcctgggtttccaggttccaagggagaaatgggcgtcatggggacccccgggcagccgggctcaccaggaccagtgggtgctcctggattaccgggtgaaaaaggggaccatggctttccgggctcctcaggacccaggggagaccctggcttgaaaggtgataagggggatgtcggtctccctggcaagcctggctccatggataaggtggacatgggcagcatgaagggccagaaaggagaccaaggagagaaaggacaaattggaccaattggtgagaagggatcccgaggagaccctgggaccccaggagtgcctggaaaggacgggcaggcaggacagcctgggcagccaggacctaaaggtgatccaggtataagtggaaccccaggtgctccaggacttccgggaccaaaaggatctgttggtggaatgggcttgccaggaacacctggagagaaaggtgtgcctggcatccctggcccacaaggttcacctggcttacctggagacaaaggtgcaaaaggagagaaagggcaggcaggcccacctggcataggcatcccagggctgcgaggtgaaaagggagatcaagggatagcgggtttcccaggaagccctggagagaagggagaaaaaggaagcattgggatcccaggaatgccagggtccccaggccttaaagggtctcccgggagtgttggctatccaggaagtcctgggctacctggagaaaaaggtgacaaaggcctcccaggattggatggcatccctggtgtcaaaggagaagcaggtcttcctgggactcctggccccacaggcccagctggccagaaaggggagccaggcagtgatggaatcccggggtcagcaggagagaagggtgaaccaggtctaccaggaagaggattcccagggtttccaggggccaaaggagacaaaggttcaaagggtgaggtgggtttcccaggattagccgggagcccaggaattcctggatccaaaggagagcaaggattcatgggtcctccggggccccagggacagccggggttaccgggatccccaggccatgccacggaggggcccaaaggagaccgcggacctcagggccagcctggcctgccaggacttccgggacccatggggcctccagggcttcctgggattgatggagttaaaggtgacaaaggaaatccaggctggccaggagcacccggtgtcccagggcccaagggagaccctggattccagggcatgcctggtattggtggctctccaggaatcacaggctctaagggtgatatggggcctccaggagttccaggatttcaaggtccaaaaggtcttcctggcctccagggaattaaaggtgatcaaggcgatcaaggcgtcccgggagctaaaggtctcccgggtcctcctggccccccaggtccttacgacatcatcaaaggggagcccgggctccctggtcctgagggccccccagggctgaaagggcttcagggactgccaggcccgaaaggccagcaaggtgttacaggattggtgggtatacctggacctccaggtattcctgggtttgacggtgcccctggccagaaaggagagatgggacctgccgggcctactggtccaagaggatttccaggtccaccaggccccgatgggttgccaggatccatggggcccccaggcaccccatctgttgatcacggcttccttgtgaccaggcatagtcaaacaatagatgacccacagtgtccttctgggaccaaaattctttaccacgggtactctttgctctacgtgcaaggcaatgaacgggcccatggccaggacttgggcacggccggcagctgcctgcgcaagttcagcacaatgcccttcctgttctgcaatattaacaacgtgtgcaactttgcatcacgaaatgactactcgtactggctgtccacccctgagcccatgcccatgtcaatggcacccatcacgggggaaaacataagaccatttattagtaggtgtgctgtgtgtgaggcgcctgccatggtgatggccgtgcacagccagaccattcagatcccaccgtgccccagcgggtggtcctcgctgtggatcggctactcttttgtgatgcacaccagcgctggtgcagaaggctctggccaagccctggcgtcccccggctcctgcctggaggagtttagaagtgcgccattcatcgagtgtcacggccgtgggacctgcaattactacgcaaacgcttacagcttttggctcgccaccatagagaggagcgagatgttcaagaagcctacgccgtccaccttgaaggcaggggagctgcgcacgcacgtcagccgctgccaagtctgtatgagaagaacataatgaagcctgactcagctaatgtcacaacatggtgctacttcttcttctttttgttaacagcaacgaaccctagaaatatatcctgtgtacctcactgtccaatatgaaaaccgtaaagtgccttataggaatttgcgtaactaacacaccctgcttcattgacctctacttgctgaaggagaaaaagacagcgataagctttcaatagtggcataccaaatggcacttttgatgaaataaaatatcaatattttctgcaatccaatgcactgatgtgtgaagtgagaactccatcagaaaaccaaagggtgctaggaggtgtgggtgccttccatactgtttgcccattttcattcttgtattataattaattttctacccccagagataaatgtttgtttatatcactgtctagctgtttcaaaatttaggtcccttggtctgtacaaataatagcaatgtaaaaatggttttttgaacctccaaatggaattacagactcagtagccatatcttccaaccccccagtataaatttctgtctttctgctatgtgtggtactttgcagctgcttttgcagaaatcacaattttcctgtggaataaagatggtccaaaaatagtcaaaaattaaatatatatatatattagtaatttatatagatgtcagcaattaggcagatcaaggtttagtttaacttccactgttaaaataaagcttacatagttttcttcctttgaaagactgtgctgtcctttaacataggtttttaaagactaggatattgaatgtgaaacatccgttttcattgttcacttctaaaccaaaaattatgtgttgccaaaaccaaacccaggttcatgaatatggtgtctattatagtgaaacatgtactttgagcttattgtttttattctgtattaaatattttcagggttttaaacactaatcacaaactgaatgacttgacttcaaaagcaacaaccttaaaggccgtcatttcattagtattcctcattctgcatcctggcttgaaaaacagctctgttgaatcacagtatcagtattttcacacgtaagcacattcgggccatttccgtggtttctcatgagctgtgttcacagacctcagcagggcatcgcatggaccgcaggagggcagattcggaccactaggcctgaaatgacatttcactaaaagtctccaaaacatttctaagactactaaggccttttatgtaatttctttaaatgtgtatttcttaagaattcaaatttgtaataaaactatttgtataaaaattaagcttttattaatttgttgctagtattgccacagacgcattaaaagaaacttactgcacaagctgctaataaatttgtaagctttgcatacctt

SEQ ID NO: 121574 - DNA, 6524 bp, Artificial Sequence
  derived and/or modified sequence
gcttggagccgccgcacccgggacggtgcgtagcgctggaagtccggccttccgagagctagctgtccgccgcggcccccgcacgccgggcagccgtccctcgccgcctcgggcgcgccaccatggggccccggctcagcgtctggctgctgctgctgcccgccgcccttctgctccacgaggagcacagccgggccgctgcgaagggtggctgtgctggctctggctgtggcaaatgtgactgccatggagtgaagggacaaaagggtgaaagaggcctcccggggttacaaggtgtcattgggtttcctggaatgcaaggacctgaggggccacagggaccaccaggacaaaagggtgatactggagaaccaggactacctggaacaaaagggacaagaggacctccgggagcatctggctaccctggaaacccaggacttcccggaattcctggccaagacggcccgccaggccccccaggtattccaggatgcaatggcacaaagggggagagagggccgctcgggcctcctggcttgcctggtttcgctggaaatcccggaccaccaggcttaccagggatgaagggtgatccaggtgagatacttggccatgtgcccgggatgctgttgaaaggtgaaagaggatttcccggaatcccagggactccaggcccaccaggactgccagggcttcaaggtcctgttgggcctccaggatttaccggaccaccaggtcccccaggccctcccggccctccaggtgaaaagggacaaatgggcttaagttttcaaggaccaaaaggtgacaagggtgaccaaggggtcagtgggcctccaggagtaccaggacaagctcaagttcaagaaaaaggagacttcgccaccaagggagaaaagggccaaaaaggtgaacctggatttcaggggatgccaggggtcggagagaaaggtgaacccggaaaaccaggacccagaggcaaacccggaaaagatggtgacaaaggggaaaaagggagtcccggttttcctggtgaacccgggtacccaggactcataggccgccagggcccgcagggagaaaagggtgaagcaggtcctcctggcccacctggaattgttataggcacaggacctttgggagaaaaaggagagaggggctaccctggaactccggggccaagaggagagccaggcccaaaaggtttcccaggactaccaggccaacccggacctccaggcctccctgtacctgggcaggctggtgcccctggcttccctggtgaaagaggagaaaaaggtgaccgaggatttcctggtacatctctgccaggaccaagtggaagagatgggctcccgggtcctcctggttcccctgggccccctgggcagcctggctacacaaatggaattgtggaatgtcagcccggacctccaggtgaccagggtcctcctggaattccagggcagccaggatttataggcgaaattggagagaaaggtcaaaaaggagagagttgcctcatctgtgatatagacggatatcgggggcctcccgggccacagggacccccgggagaaataggtttcccagggcagccaggggccaagggcgacagaggtttgcctggcagagatggtgttgcaggagtgccaggccctcaaggtacaccagggctgataggccagccaggagccaagggggagcctggtgagttttatttcgacttgcggctcaaaggtgacaaaggagacccaggctttccaggacagcccggcatgacagggagagcgggttctcctggaagagatggccatccgggtcttcctggccccaagggctcgccgggttctgtaggattgaaaggagagcgtggcccccctggaggagttggattcccaggcagtcgtggtgacaccggcccccctgggcctccaggatatggtcctgctggtcccattggtgacaaaggacaagcaggctttcctggaggccctggatccccaggcctgccaggtccaaagggtgaaccaggaaaaattgttcctttaccaggcccccctggagcagaaggactgccggggtccccaggcttcccaggtccccaaggagaccgaggctttcccggaaccccaggaaggccaggcctgccaggagagaagggcgctgtgggccagccaggcattggatttccagggccccccggccccaaaggtgttgacggcttacctggagacatggggccaccggggactccaggtcgcccgggatttaatggcttacctgggaacccaggtgtgcagggccagaagggagagcctggagttggtctaccgggactcaaaggtttgccaggtcttcccggcattcctggcacacccggggagaaggggagcattggggtaccaggcgttcctggagaacatggagcgatcggaccccctgggcttcaggggatcagaggtgaaccgggacctcctggattgccaggctccgtggggtctccaggagttccaggaataggcccccctggagctaggggtccccctggaggacagggaccaccggggttgtcaggccctcctggaataaaaggagagaagggtttccccggattccctggactggacatgccgggccctaaaggagataaaggggctcaaggactccctggcataacgggacagtcggggctccctggccttcctggacagcagggggctcctgggattcctgggtttccaggttccaagggagaaatgggcgtcatggggacccccgggcagccgggctcaccaggaccagtgggtgctcctggattaccgggtgaaaaaggggaccatggctttccgggctcctcaggacccaggggagaccctggcttgaaaggtgataagggggatgtcggtctccctggcaagcctggctccatggataaggtggacatgggcagcatgaagggccagaaaggagaccaaggagagaaaggacaaattggaccaattggtgagaagggatcccgaggagaccctgggaccccaggagtgcctggaaaggacgggcaggcaggacagcctgggcagccaggacctaaaggtgatccaggtataagtggaaccccaggtgctccaggacttccgggaccaaaaggatctgttggtggaatgggcttgccaggaacacctggagagaaaggtgtgcctggcatccctggcccacaaggttcacctggcttacctggagacaaaggtgcaaaaggagagaaagggcaggcaggcccacctggcataggcatcccagggctgcgaggtgaaaagggagatcaagggatagcgggtttcccaggaagccctggagagaagggagaaaaaggaagcattgggatcccaggaatgccagggtccccaggccttaaagggtctcccgggagtgttggctatccaggaagtcctgggctacctggagaaaaaggtgacaaaggcctcccaggattggatggcatccctggtgtcaaaggagaagcaggtcttcctgggactcctggccccacaggcccagctggccagaaaggggagccaggcagtgatggaatcccggggtcagcaggagagaagggtgaaccaggtctaccaggaagaggattcccagggtttccaggggccaaaggagacaaaggttcaaagggtgaggtgggtttcccaggattagccgggagcccaggaattcctggatccaaaggagagcaaggattcatgggtcctccggggccccagggacagccggggttaccgggatccccaggccatgccacggaggggcccaaaggagaccgcggacctcagggccagcctggcctgccaggacttccgggacccatggggcctccagggcttcctgggattgatggagttaaaggtgacaaaggaaatccaggctggccaggagcacccggtgtcccagggcccaagggagaccctggattccagggcatgcctggtattggtggctctccaggaatcacaggctctaagggtgatatggggcctccaggagttccaggatttcaaggtccaaaaggtcttcctggcctccagggaattaaaggtgatcaaggcgatcaaggcgtcccgggagctaaaggtctcccgggtcctcctggccccccaggtccttacgacatcatcaaaggggagcccgggctccctggtcctgagggccccccagggctgaaagggcttcagggactgccaggcccgaaaggccagcaaggtgttacaggattggtgggtatacctggacctccaggtattcctgggtttgacggtgcccctggccagaaaggagagatgggacctgccgggcctactggtccaagaggatttccaggtccaccaggccccgatgggttgccaggatccatggggcccccaggcaccccatctgttgatcacggcttccttgtgaccaggcatagtcaaacaatagatgacccacagtgtccttctgggaccaaaattctttaccacgggtactctttgctctacgtgcaaggcaatgaacgggcccatggccaggacttgggcacggccggcagctgcctgcgcaagttcagcacaatgcccttcctgttctgcaatattaacaacgtgtgcaactttgcatcacgaaatgactactcgtactggctgtccacccctgagcccatgcccatgtcaatggcacccatcacgggggaaaacataagaccatttattagtaggtgtgctgtgtgtgaggcgcctgccatggtgatggccgtgcacagccagaccattcagatcccaccgtgccccagcgggtggtcctcgctgtggatcggctactcttttgtgatgcacaccagcgctggtgcagaaggctctggccaagccctggcgtcccccggctcctgcctggaggagtttagaagtgcgccattcatcgagtgtcacggccgtgggacctgcaattactacgcaaacgcttacagcttttggctcgccaccatagagaggagcgagatgttcaagaagcctacgccgtccaccttgaaggcaggggagctgcgcacgcacgtcagccgctgccaagtctgtatgagaagaacataatgaagcctgactcagctaatgtcacaacatggtgctacttcttcttctttttgttaacagcaacgaaccctagaaatatatcctgtgtacctcactgtccaatatgaaaaccgtaaagtgccttataggaatttgcgtaactaacacaccctgcttcattgacctctacttgctgaaggagaaaaagacagcgataagctttcaatagtggcataccaaatggcacttttgatgaaataaaatatcaatattttctgcaatccaatgcactgatgtgtgaagtgagaactccatcagaaaaccaaagggtgctaggaggtgtgggtgccttccatactgtttgcccattttcattcttgtattataattaattttctacccccagagataaatgtttgtttatatcactgtctagctgtttcaaaatttaggtcccttggtctgtacaaataatagcaatgtaaaaatggttttttgaacctccaaatggaattacagactcagtagccatatcttccaaccccccagtataaatttctgtctttctgctatgtgtggtactttgcagctgcttttgcagaaatcacaattttcctgtggaataaagatggtccaaaaatagtcaaaaattaaatatatatatatattagtaatttatatagatgtcagcaattaggcagatcaaggtttagtttaacttccactgttaaaataaagcttacatagttttcttcctttgaaagactgtgctgtcctttaacataggtttttaaagactaggatattgaatgtgaaacatccgttttcattgttcacttctaaaccaaaaattatgtgttgccaaaaccaaacccaggttcatgaatatggtgtctattatagtgaaacatgtactttgagcttattgtttttattctgtattaaatattttcagggttttaaacactaatcacaaactgaatgacttgacttcaaaagcaacaaccttaaaggccgtcatttcattagtattcctcattctgcatcctggcttgaaaaacagctctgttgaatcacagtatcagtattttcacacgtaagcacattcgggccatttccgtggtttctcatgagctgtgttcacagacctcagcagggcatcgcatggaccgcaggagggcagattcggaccactaggcctgaaatgacatttcactaaaagtctccaaaacatttctaagactactaaggccttttatgtaatttctttaaatgtgtatttcttaagaattcaaatttgtaataaaactatttgtataaaaattaagcttttattaatttgttgctagtattgccacagacgcattaaaagaaacttactgcacaagctgctaataaatttgtaagctttgc

SEQ ID NO: 121575 - DNA, 5471 bp, Artificial Sequence
  derived and/or modified sequence
gcttggagccgccgcacccgggacggtgcgtagcgctggaagtccggccttccgagagctagctgtccgccgcggcccccgcacgccgggcagccgtccctcgccgcctcgggcgcgccaccatggggccccggctcagcgtctggctgctgctgctgcccgccgcccttctgctccacgaggagcacagccgggccgctgcgaagggtggctgtgctggctctggctgtggcaaatgtgactgccatggagtgaagggacaaaagggtgaaagaggcctcccggggttacaaggtgtcattgggtttcctggaatgcaaggacctgaggggccacagggaccaccaggacaaaagggtgatactggagaaccaggactacctggaacaaaagggacaagaggacctccgggagcatctggctaccctggaaacccaggacttcccggaattcctggccaagacggcccgccaggccccccaggtattccaggatgcaatggcacaaagggggagagagggccgctcgggcctcctggcttgcctggtttcgctggaaatcccggaccaccaggcttaccagggatgaagggtgatccaggtgagatacttggccatgtgcccgggatgctgttgaaaggtgaaagaggatttcccggaatcccagggactccaggcccaccaggactgccagggcttcaaggtcctgttgggcctccaggatttaccggaccaccaggtcccccaggccctcccggccctccaggtgaaaagggacaaatgggcttaagttttcaaggaccaaaaggtgacaagggtgaccaaggggtcagtgggcctccaggagtaccaggacaagctcaagttcaagaaaaaggagacttcgccaccaagggagaaaagggccaaaaaggtgaacctggatttcaggggatgccaggggtcggagagaaaggtgaacccggaaaaccaggacccagaggcaaacccggaaaagatggtgacaaaggggaaaaagggagtcccggttttcctggtgaacccgggtacccaggactcataggccgccagggcccgcagggagaaaagggtgaagcaggtcctcctggcccacctggaattgttataggcacaggacctttgggagaaaaaggagagaggggctaccctggaactccggggccaagaggagagccaggcccaaaaggtttcccaggactaccaggccaacccggacctccaggcctccctgtacctgggcaggctggtgcccctggcttccctggtgaaagaggagaaaaaggtgaccgaggatttcctggtacatctctgccaggaccaagtggaagagatgggctcccgggtcctcctggttcccctgggccccctgggcagcctggctacacaaatggaattgtggaatgtcagcccggacctccaggtgaccagggtcctcctggaattccagggcagccaggatttataggcgaaattggagagaaaggtcaaaaaggagagagttgcctcatctgtgatatagacggatatcgggggcctcccgggccacagggacccccgggagaaataggtttcccagggcagccaggggccaagggactccctggcataacgggacagtcggggctccctggccttcctggacagcagggggctcctgggattcctgggtttccaggttccaagggagaaatgggcgtcatggggacccccgggcagccgggctcaccaggaccagtgggtgctcctggattaccgggtgaaaaaggggaccatggctttccgggctcctcaggacccaggggagaccctggcttgaaaggtgataagggggatgtcggtctccctggcaagcctggctccatggataaggtggacatgggcagcatgaagggccagaaaggagaccaaggagagaaaggacaaattggaccaattggtgagaagggatcccgaggagaccctgggaccccaggagtgcctggaaaggacgggcaggcaggacagcctgggcagccaggacctaaaggtgatccaggtataagtggaaccccaggtgctccaggacttccgggaccaaaaggatctgttggtggaatgggcttgccaggaacacctggagagaaaggtgtgcctggcatccctggcccacaaggttcacctggcttacctggagacaaaggtgcaaaaggagagaaagggcaggcaggcccacctggcataggcatcccagggctgcgaggtgaaaagggagatcaagggatagcgggtttcccaggaagccctggagagaagggagaaaaaggaagcattgggatcccaggaatgccagggtccccaggccttaaagggtctcccgggagtgttggctatccaggaagtcctgggctacctggagaaaaaggtgacaaaggcctcccaggattggatggcatccctggtgtcaaaggagaagcaggtcttcctgggactcctggccccacaggcccagctggccagaaaggggagccaggcagtgatggaatcccggggtcagcaggagagaagggtgaaccaggtctaccaggaagaggattcccagggtttccaggggccaaaggagacaaaggttcaaagggtgaggtgggtttcccaggattagccgggagcccaggaattcctggatccaaaggagagcaaggattcatgggtcctccggggccccagggacagccggggttaccgggatccccaggccatgccacggaggggcccaaaggagaccgcggacctcagggccagcctggcctgccaggacttccgggacccatggggcctccagggcttcctgggattgatggagttaaaggtgacaaaggaaatccaggctggccaggagcacccggtgtcccagggcccaagggagaccctggattccagggcatgcctggtattggtggctctccaggaatcacaggctctaagggtgatatggggcctccaggagttccaggatttcaaggtccaaaaggtcttcctggcctccagggaattaaaggtgatcaaggcgatcaaggcgtcccgggagctaaaggtctcccgggtcctcctggccccccaggtccttacgacatcatcaaaggggagcccgggctccctggtcctgagggccccccagggctgaaagggcttcagggactgccaggcccgaaaggccagcaaggtgttacaggattggtgggtatacctggacctccaggtattcctgggtttgacggtgcccctggccagaaaggagagatgggacctgccgggcctactggtccaagaggatttccaggtccaccaggccccgatgggttgccaggatccatggggcccccaggcaccccatctgttgatcacggcttccttgtgaccaggcatagtcaaacaatagatgacccacagtgtccttctgggaccaaaattctttaccacgggtactctttgctctacgtgcaaggcaatgaacgggcccatggccaggacttgggcacggccggcagctgcctgcgcaagttcagcacaatgcccttcctgttctgcaatattaacaacgtgtgcaactttgcatcacgaaatgactactcgtactggctgtccacccctgagcccatgcccatgtcaatggcacccatcacgggggaaaacataagaccatttattagtaggtgtgctgtgtgtgaggcgcctgccatggtgatggccgtgcacagccagaccattcagatcccaccgtgccccagcgggtggtcctcgctgtggatcggctactcttttgtgatgcacaccagcgctggtgcagaaggctctggccaagccctggcgtcccccggctcctgcctggaggagtttagaagtgcgccattcatcgagtgtcacggccgtgggacctgcaattactacgcaaacgcttacagcttttggctcgccaccatagagaggagcgagatgttcaagaagcctacgccgtccaccttgaaggcaggggagctgcgcacgcacgtcagccgctgccaagtctgtatgagaagaacataatgaagcctgactcagctaatgtcacaacatggtgctacttcttcttctttttgttaacagcaacgaaccctagaaatatatcctgtgtacctcactgtccaatatgaaaaccgtaaagtgccttataggaatttgcgtaactaacacaccctgcttcattgacctctacttgctgaaggagaaaaagacagcgataagctttcaatagtggcataccaaatggcacttttgatgaaataaaatatcaatattttctgcaatccaatgcactgatgtgtgaagtgagaactccatcagaaaaccaaagggtgctaggaggtgtgggtgccttccatactgtttgcccattttcattcttgtattataattaattttctacccccagagataaatgtttgtttatatcactgtctagctgtttcaaaatttaggtcccttggtctgtacaaataatagcaatgtaaaaatggttttttgaacctccaaatggaattacagactcagtagccatatcttccaaccccccagtataaatttctgtctttctgctatgtgtggtactttgcagctgcttttgcagaaatcacaattttcctgtggaataaagatggtccaaaaatagtcaaaaattaaatatatatatatattagtaatttatatagatgtcagcaattaggcagatcaaggtttagtttaacttccactgttaaaataaagcttacatagttttcttcctttgaaagactgtgctgtcctttaacataggtttttaaagactaggatattgaatgtgaaacatccgttttcattgttcacttctaaaccaaaaattatgtgttgccaaaaccaaacccaggttcatgaatatggtgtctattatagtgaaacatgtactttgagcttattgtttttattctgtattaaatattttcagggttttaaacactaatcacaaactgaatgacttgacttcaaaagcaacaaccttaaaggccgtcatttcattagtattcctcattctgcatcctggcttgaaaaacagctctgttgaatcacagtatcagtattttcacacgtaagcacattcgggccatttccgtggtttctcatgagctgtgttcacagacctcagcagggcatcgcatggaccgcaggagggcagattcggaccactaggcctgaaatgacatttcactaaaagtctccaaaacatttctaagactactaaggccttttatgtaatttctttaaatgtgtatttcttaagaattcaaatttgtaataaaactatttgtataaaaattaagcttttattaatttgttgctagtattgccacagacgcattaaaagaaacttactgcacaagctgctaataaatttgtaagctttgc

SEQ ID NO: 121576 - DNA, 3939 bp, Artificial Sequence
  derived and/or modified sequence
atgggcccccggctgtctgtgtggctgctgctgctgcctgctgccctgctgctgcacgaggagcacagcagagctgctgccaagggcggctgtgccggcagcggctgtgggaaatgtgactgccacggcgtgaagggccagaagggggagcggggcctgcccggcctgcagggcgtcatcggcttccctggcatgcagggccctgagggcccccagggccccccaggccagaagggggacacaggagagcccggcctgcccggcaccaagggcacccggggccccccaggggccagcggctacccaggcaaccctggcctgcccggcatccctggccaggacggccccccaggccccccaggcatccctggctgcaatggcaccaagggggagcggggccccctgggccccccaggcctgcccggctttgctggcaaccctggggaccccggggagatcctgggccacgtgcccggcatgctgctgaagggggagcggggcttccctggcatccctggcaccccaggccccccaggcctgcccggcctgcagggccctgtgggccccccaggcttcaccggcccccctgtgtcctttggaggctgcctgtctgaatttggccacggcggcatctccttccccctgaccaagaggcggcagggcgaccagggcgtgtctggccccccaggagtgcccggccaggcccaggtgcaggagaagggggactttgccaccaagggggagaagggccagaagggggagcccggcttccagggcatgcctggggtgggggagaagggggagcccgggaagccaggcccccggggcaagccaggcaaggatggagacaagggggagaagggcagccctggcttccctggagagcccggctacccaggcctcatcggccggcagggcccccaggtgaatgccggcaccatcgcctaccccctgcccccctgccctgtgattggcaccggccccctgggggagaagggggagcggggctacccaggcaccccaggccccagaggagagcccggccccaagggcagcttcctggccttcttccccccaccacccaccccacctccatttgctggcctgcctgtgcccggccaggccggggcccctggcttccctggagagcggggggagaagggggaccggggcttccctggcaccagcctgcccggccccagcggcagagatggcctgcccggccccccaggcagccctggccccccaggccagcccggctacaccaatggaattgtggagtgccagcccggccccccaggggaccagggccccccaggcatccctggccagcccggcttcatcggggagattggagagaagggccagaagggggagagctgcctgatctgtgacattgatggctaccggggccccccaggcccccagggccccccaggagagatcggcttccctggccagcccggggccaagggcctgcccggcatcaccggccagagcggcctgcccggcctgcccggccagcagggcgcccctggcatccctggcttccctggcagcaaaggagagatgggcgtgatgggcaccccaggccagcccggcagccctggccctgtgggcgcccctggcctgcctggagagaagggggaccacggcttccctggcagcagcggccccaggggggaccccggcctgaagggggacaagggagatgtgggcctgcccgggaagccaggctccatggacaaggtggacatgggctccatgaagggccagaagggggaccagggcgagaagggccagatcggccccatcggggagaagggcagcagaggagaccccggcaccccaggagtgcctgggaaggatggccaggccggccagcccggccagcccggccccaagggggaccccggcatcagcggcacccctggggcccctggcctgcccggccccaagggctctgtgggcggcatgggcctgcccggcaccccaggagagaagggcgtgcccggcatccctggcccccagggcagccctggcctgcccggggacaagggggccaagggggagaagggccaggccggccccccaggcatcggcatccctggcctgcggggggagaagggggaccagggcattgctggcttccctggcagccctggagagaagggggagaagggcagcatcggcatccctggcatgcctggcagccctggcctgaagggcagccctggctctgtgggctacccaggcagccctggcctgcctggagagaagggggacaagggcctgcccggcctggatggcatccctggggtgaagggggaggccggcctgcccggcaccccaggccccactggacctgctggccagaagggggagcccggcagtgatggcatccctggcagcgctggggagaagggggagcccggcctgcccggccggggcttccctggcttccctggggccaagggggacaagggcagcaaaggagaggtgggcttccctggcctggccggcagccctggcatccctggcagcaaaggagagcagggcttcatgggccccccaggcccccagggccagcccggcctgcccggcagccctggccacgccacagagggccccaagggggaccggggcccccagggccagcccggcctgcccggcctgcccggccccatgggccccccaggcctgcccggcattgatggagtgaagggggacaagggcaaccctggctggccaggggcccctggggtgcccggccccaagggggaccccggcttccagggcatgcctggcattggaggcagccctggcatcaccggcagcaaaggagacatgggccccccaggagtgcccggcttccagggccccaagggcctgcccggcctgcagggcatcaagggggaccagggcgaccagggcgtgcctggggccaagggcctgcccggccccccaggccccccaggcccctatgacatcatcaagggggagcccggcctgcccggccctgagggccccccaggcctgaagggcctgcagggcctgcccggccccaagggccagcagggcgtgacaggcctggtgggcatccctggccccccaggcatccctggctttgatggagcccctggccagaagggggagatgggccctgctggccccaccggcccccggggcttccctggccccccaggcccagatggcctgcccggctccatgggccccccaggcacccccagcgtggaccacggcttcctggtgaccaggcacagccagaccattgatgacccccagtgccccagcggcaccaagatcctgtaccacggctacagcctgctgtatgtgcagggcaatgaaagagcccacggccaggacctgggcacagctggcagctgcctgaggaagttcagcaccatgcccttcctgttctgcaacatcaacaacgtgtgcaactttgccagcagaaatgactacagctactggctgagcaccccagagcccatgcccatgtccatggcccccatcaccggggagaacatccggcccttcatcagccgctgtgctgtgtgtgaggccccagccatggtgatggctgtgcacagccagaccatccagatccccccctgccccagcggctggagcagcctgtggattggctacagctttgtgatgcacaccagcgctggagctgagggcagcggccaggccctggccagccctggcagctgcctggaggagttccgcagcgcccccttcatcgagtgccacggccggggcacctgcaactactatgccaatgcctacagcttctggctggccaccatcgagaggtctgagatgttcaagaagcccacccccagcaccctgaaggccggggagctgcggacccacgtgagccgctgccaggtgtgcatgagaagaacatag

SEQ ID NO: 121577 - DNA, 5010 bp, Artificial Sequence
  derived and/or modified sequence
atgggcccccggctgtctgtgtggctgctgctgctgcctgctgccctgctgctgcacgaggagcacagcagagctgctgccaagggcggctgtgccggcagcggctgtgggaaatgtgactgccacggcgtgaagggccagaagggggagcggggcctgcccggcctgcagggcgtcatcggcttccctggcatgcagggccctgagggcccccagggccccccaggccagaagggggacacaggagagcccggcctgcccggcaccaagggcacccggggccccccaggggccagcggctacccaggcaaccctggcctgcccggcatccctggccaggacggccccccaggccccccaggcatccctggctgcaatggcaccaagggggagcggggccccctgggccccccaggcctgcccggctttgctggcaaccctggccccccaggcctgcccggcatgaagggggaccctggagagatcctgggccacgtgcccggcatgctgctgaagggggagcggggcttccctggcatccctggcaccccaggccccccaggcctgcccggcctgcagggccctgtgggccccccaggcttcaccggccccccaggccccccaggccccccaggccccccaggagagaagggccagatgggcctgtccttccagggccccaagggggacaagggggaccagggcgtgtctggccccccaggagtgcccggccaggcccaggtgcaggagaagggggactttgccaccaagggggagaagggccagaagggggagcccggcttccagggcatgcctggggtgggggagaagggggagcccgggaagccaggcccccggggcaagccaggcaaggatggagacaagggggagaagggcagccctggcttccctggagagcccggctacccaggcctgattggccggcagggcccccagggcgagaagggggaggccggccccccaggccccccaggcatcgtgattggaacaggccccctgggggagaagggggagcggggctacccaggcaccccaggccccagaggagagcccggccccaagggcttccctggcctgcccggccagcccggccccccaggcctgcctgtgcccggccaggccggggcccctggcttccctggagagcggggggagaagggggaccggggcttccctggcaccagcctgcccggccccagcggcagagatggcctgcccggccccccaggcagccctggccccccaggccagcccggctacaccaatggaattgtggagtgccagcccggccccccaggggaccagggccccccaggcatccctggccagcccggcttcatcggggagattggagagaagggccagaagggggagagctgcctgatctgtgacattgatggctaccggggccccccaggcccccagggccccccaggagagatcggcttccctggccagcccggggccaagggggaccggggcctgcccggcagagatggagtggccggcgtgcccggcccccagggcaccccaggcctgattggccagcccggggccaagggggagcccggggagttctactttgacctgcggctgaagggggacaagggggaccccggcttccctggccagcccggcatgacaggccgggccggcagccctggaagagatggccaccctggcctgcccggccccaagggcagccctggctctgtgggcctgaagggggagcggggccccccaggcggcgtgggcttccctggcagcagaggagacaccggccccccaggccccccaggctacggccctgctggccccatcggggacaagggccaggccggcttccctgggggccctggcagccctggcctgcccggccccaagggggagcccgggaagatcgtgcccctgcccggccccccaggagctgagggcctgcccggcagccctggcttccctggcccccagggcgaccggggcttccctggcaccccaggccggcccggcctgcccggggagaagggagctgtgggccagcccggcatcggcttccctggccccccaggccccaagggcgtggatggcctgcccggggacatgggccccccaggcaccccaggccggcccggcttcaacggcctgcccggcaaccctggggtgcagggccagaagggggagcccggggtgggcctgcccggcctgaagggcctgcccggcctgcccggcatccctggcaccccaggagagaagggcagcattggagtgcctggggtgcctggagaacatggagccatcggccccccaggcctgcagggcatccggggggagcccggccccccaggcctgcccggctctgtgggcagccctggggtgcccggcatcggccccccaggggcccggggccccccaggcggccagggccccccaggcctgagcggccccccaggcatcaagggggagaagggcttccctggcttccctggcctggacatgcctggccccaagggggacaagggggcccagggcctgcccggcatcaccggccagagcggcctgcccggcctgcccggccagcagggcgcccctggcatccctggcttccctggcagcaagggggagatgggcgtgatgggcaccccaggccagcccggcagccctggccctgtgggcgcccctggcctgcccggggagaagggggaccacggcttccctggcagcagcggccccaggggggaccccggcctgaagggggacaagggagatgtgggcctgcccgggaagccaggctccatggacaaggtggacatgggctccatgaagggccagaagggggaccagggcgagaagggccagatcggccccatcggggagaagggcagcagaggagaccccggcaccccaggagtgcctgggaaggatggccaggccggccagcccggccagcccggccccaagggggaccccggcatcagcggcacccctggggcccctggcctgcccggccccaagggctctgtgggcggcatgggcctgcccggcaccccaggagagaagggcgtgcccggcatccctggcccccagggcagccctggcctgcccggggacaagggggccaagggggagaagggccaggccggccccccaggcatcggcatccctggcctgcggggggagaagggggaccagggcattgctggcttccctggcagccctggagagaagggggagaagggcagcatcggcatccctggcatgcctggcagccctggcctgaagggcagccctggctctgtgggctacccaggcagccctggcctgcccggggagaagggggacaagggcctgcccggcctggatggcatccctggggtgaagggggaggccggcctgcccggcaccccaggccccaccggccctgctggccagaagggggagcccggcagtgatggcatccctggcagcgctggggagaagggggagcccggcctgcccggccggggcttccctggcttccctggggccaagggggacaagggcagcaagggggaggtgggcttccctggcctggccggcagccctggcatccctggcagcaagggggagcagggcttcatgggccccccaggcccccagggccagcccggcctgcccggcagccctggccacgccacagagggccccaagggggaccggggcccccagggccagcccggcctgcccggcctgcccggccccatgggccccccaggcctgcccggcattgatggagtgaagggggacaagggcaaccctggctggccaggggcccctggggtgcccggccccaagggggaccccggcttccagggcatgcctggcatcggcggcagccctggcatcaccggcagcaagggggacatgggccccccaggagtgcccggcttccagggccccaagggcctgcccggcctgcagggcatcaagggggaccagggcgaccagggcgtgcctggggccaagggcctgcccggccccccaggccccccaggcccctatgacatcatcaagggggagcccggcctgcccggccctgagggccccccaggcctgaagggcctgcagggcctgcccggccccaagggccagcagggcgtgacaggcctggtgggcatccctggccccccaggcatccctggctttgatggagcccctggccagaagggggagatgggccctgctggccccaccggcccccggggcttccctggccccccaggcccagatggcctgcccggctccatgggccccccaggcaccccatctgtggaccacggcttcctggtgaccaggcacagccagaccattgatgacccccagtgccccagcggcaccaagatcctgtaccacggctacagcctgctgtatgtgcagggcaatgaaagagcccacggccaggacctgggcacagctggcagctgcctgaggaagttcagcaccatgcccttcctgttctgcaacatcaacaacgtgtgcaactttgccagcagaaatgactacagctactggctgagcaccccagagcccatgcccatgtccatggcccccatcactggagagaacatccggcccttcatcagccgctgtgctgtgtgtgaggccccagccatggtgatggctgtgcacagccagaccatccagatccccccctgccccagcggctggagcagcctgtggattggctacagctttgtgatgcacaccagcgctggagctgagggcagcggccaggccctggccagccctggcagctgcctggaggagttccgcagcgcccccttcattgaatgtcatggccggggcacctgcaactactatgccaatgcctacagcttctggctggccaccatcgagaggtctgagatgttcaagaagcccacccccagcaccctgaaggccggggagctgcggacccacgtgagccgctgccaggtgtgcatgagaagaacatag

SEQ ID NO: 121578 - DNA, 3957 bp, Artificial Sequence
  derived and/or modified sequence
atgggcccccggctgtctgtgtggctgctgctgctgcctgctgccctgctgctgcacgaggagcacagcagagctgctgccaagggcggctgtgccggcagcggctgtgggaaatgtgactgccacggcgtgaagggccagaagggggagcggggcctgcccggcctgcagggcgtcatcggcttccctggcatgcagggccctgagggcccccagggccccccaggccagaagggggacacaggagagcccggcctgcccggcaccaagggcacccggggccccccaggggccagcggctacccaggcaaccctggcctgcccggcatccctggccaggacggccccccaggccccccaggcatccctggctgcaatggcaccaagggggagcggggccccctgggccccccaggcctgcccggctttgctggcaaccctggccccccaggcctgcccggcatgaagggggaccctggagagatcctgggccacgtgcccggcatgctgctgaagggggagcggggcttccctggcatccctggcaccccaggccccccaggcctgcccggcctgcagggccctgtgggccccccaggcttcaccggccccccaggccccccaggccccccaggccccccaggagagaagggccagatgggcctgtccttccagggccccaagggggacaagggggaccagggcgtgtctggccccccaggagtgcccggccaggcccaggtgcaggagaagggggactttgccaccaagggggagaagggccagaagggggagcccggcttccagggcatgcctggggtgggggagaagggggagcccgggaagccaggcccccggggcaagccaggcaaggatggagacaagggggagaagggcagccctggcttccctggagagcccggctacccaggcctgattggccggcagggcccccagggcgagaagggggaggccggccccccaggccccccaggcatcgtgattggaacaggccccctgggggagaagggggagcggggctacccaggcaccccaggccccagaggagagcccggccccaagggcttccctggcctgcccggccagcccggccccccaggcctgcctgtgcccggccaggccggggcccctggcttccctggagagcggggggagaagggggaccggggcttccctggcaccagcctgcccggccccagcggcagagatggcctgcccggccccccaggcagccctggccccccaggccagcccggctacaccaatggaattgtggagtgccagcccggccccccaggggaccagggccccccaggcatccctggccagcccggcttcatcggggagattggagagaagggccagaagggggagagctgcctgatctgtgacattgatggctaccggggccccccaggcccccagggccccccaggagagatcggcttccctggccagcccggggccaagggcctgcccggcatcaccggccagagcggcctgcccggcctgcccggccagcagggcgcccctggcatccctggcttccctggcagcaaaggagagatgggcgtgatgggcaccccaggccagcccggcagccctggccctgtgggcgcccctggcctgcctggagagaagggggaccacggcttccctggcagcagcggccccaggggggaccccggcctgaagggggacaagggagatgtgggcctgcccgggaagccaggctccatggacaaggtggacatgggctccatgaagggccagaagggggaccagggcgagaagggccagatcggccccatcggggagaagggcagcagaggagaccccggcaccccaggagtgcctgggaaggatggccaggccggccagcccggccagcccggccccaagggggaccccggcatcagcggcacccctggggcccctggcctgcccggccccaagggctctgtgggcggcatgggcctgcccggcaccccaggagagaagggcgtgcccggcatccctggcccccagggcagccctggcctgcccggggacaagggggccaagggggagaagggccaggccggccccccaggcatcggcatccctggcctgcggggggagaagggggaccagggcattgctggcttccctggcagccctggagagaagggggagaagggcagcatcggcatccctggcatgcctggcagccctggcctgaagggcagccctggctctgtgggctacccaggcagccctggcctgcctggagagaagggggacaagggcctgcccggcctggatggcatccctggggtgaagggggaggccggcctgcccggcaccccaggccccactggacctgctggccagaagggggagcccggcagtgatggcatccctggcagcgctggggagaagggggagcccggcctgcccggccggggcttccctggcttccctggggccaagggggacaagggcagcaaaggagaggtgggcttccctggcctggccggcagccctggcatccctggcagcaaaggagagcagggcttcatgggccccccaggcccccagggccagcccggcctgcccggcagccctggccacgccacagagggccccaagggggaccggggcccccagggccagcccggcctgcccggcctgcccggccccatgggccccccaggcctgcccggcattgatggagtgaagggggacaagggcaaccctggctggccaggggcccctggggtgcccggccccaagggggaccccggcttccagggcatgcctggcattggaggcagccctggcatcaccggcagcaaaggagacatgggccccccaggagtgcccggcttccagggccccaagggcctgcccggcctgcagggcatcaagggggaccagggcgaccagggcgtgcctggggccaagggcctgcccggccccccaggccccccaggcccctatgacatcatcaagggggagcccggcctgcccggccctgagggccccccaggcctgaagggcctgcagggcctgcccggccccaagggccagcagggcgtgacaggcctggtgggcatccctggccccccaggcatccctggctttgatggagcccctggccagaagggggagatgggccctgctggccccaccggcccccggggcttccctggccccccaggcccagatggcctgcccggctccatgggccccccaggcacccccagcgtggaccacggcttcctggtgaccaggcacagccagaccattgatgacccccagtgccccagcggcaccaagatcctgtaccacggctacagcctgctgtatgtgcagggcaatgaaagagcccacggccaggacctgggcacagctggcagctgcctgaggaagttcagcaccatgcccttcctgttctgcaacatcaacaacgtgtgcaactttgccagcagaaatgactacagctactggctgagcaccccagagcccatgcccatgtccatggcccccatcaccggggagaacatccggcccttcatcagccgctgtgctgtgtgtgaggccccagccatggtgatggctgtgcacagccagaccatccagatccccccctgccccagcggctggagcagcctgtggattggctacagctttgtgatgcacaccagcgctggagctgagggcagcggccaggccctggccagccctggcagctgcctggaggagttccgcagcgcccccttcatcgagtgccacggccggggcacctgcaactactatgccaatgcctacagcttctggctggccaccatcgagaggtctgagatgttcaagaagcccacccccagcaccctgaaggccggggagctgcggacccacgtgagccgctgccaggtgtgcatgagaagaacatag

SEQ ID NO: 121579 - DNA, 3939 bp, Artificial Sequence
  derived and/or modified sequence
atgggcccccggctgagcgtgtggctgctgctgctgcccgccgccctgttgctccatgaagaacactcccgggccgccgccaagggaggatgcgctgggtccggctgcgggaagtgtgactgtcatggagtcaaaggccagaaaggcgagcggggcctgcctgggctccagggtgttattggattcccgggcatgcagggtccagagggccctcagggtcccccaggccagaaaggcgacacaggtgagccagggctcccaggaaccaaggggacacggggcccccccggtgcaagcgggtatccaggaaaccctggcttgcctggcatccccggacaagacggcccaccaggaccaccgggcatacctggatgcaacggtacgaagggcgagcgggggcctctgggaccacctggccttcccggctttgctggcaaccccggtgatcccggcgaaatccttgggcacgtgcctgggatgttgctcaaaggcgagaggggcttccctggtatccccggcaccccaggtccccccggcttgcctggcctgcagggtccagttgggccaccaggctttacgggcccccctgtatcttttgggggctgtttatctgagttcgggcacggaggtatttccttccccttaactaagagacgacagggggaccagggagtgtcaggacccccaggcgttcctggacaggcacaagtgcaagagaagggcgactttgccactaaaggcgaaaagggacagaagggtgaaccgggattccagggcatgcccggcgtcggggagaagggcgaaccaggaaaaccaggccccaggggaaaaccgggtaaggatggggataagggggaaaagggatcacccgggtttcccggggaaccgggctatcccggcctcattggacgccaaggaccccaggttaacgccggcaccatcgcgtatccactacccccatgccctgtgatcggaactgggcccctgggagagaagggagaacggggataccccgggacccccggtccaaggggggagccgggccctaaaggctcgttcctggctttttttccacctccaccaacgccccccccctttgctggcttgccagtgccgggccaggcgggtgccccaggattccctggagagcgcggagagaagggggatagaggcttccctggcacctctctccccggccctagcggccgagacgggctgccaggccctcccggaagtcctggtccccccgggcagcctggttacactaacggcatcgttgagtgccagccgggacctcctggcgaccagggtccccccggcattccaggccagcctgggttcattggcgaaatcggggagaaagggcagaaaggggaaagttgtctgatttgtgatatcgacgggtaccggggccccccagggccccaggggccccctggcgagatcgggtttcctggccagcctggtgccaaaggtctccctggcattactgggcagtctggcctgcccggactcccaggacagcagggagcccccgggatcccaggattccccggatccaaaggggaaatgggcgtgatggggactcctggacagcccggctcccccggccccgtaggcgcaccaggcctcccaggcgagaaaggagatcacggctttccaggatcgtcaggccctcgaggagatcccggcctcaaaggggataagggcgatgtaggtctgcccggtaaacccggctccatggacaaagtggatatgggaagtatgaagggccaaaagggcgaccagggagagaagggccaaattgggcccattggggagaaggggtccagaggcgatcccggaacgccaggcgtgcccgggaaggatggacaagctggccagccaggacagccagggcctaaaggcgacccggggatttccggtacccctggcgctcccggcttgccgggtcccaagggaagcgtgggtggcatggggctcccaggaacaccaggggagaagggtgttcccgggatcccaggcccacaggggagtcctggcctcccgggagataagggggccaagggagaaaaaggccaggcagggcctcctggcataggaatcccaggtcttaggggtgaaaagggcgaccagggtatcgcaggcttcccagggtccccaggtgagaaaggtgagaagggatctatcgggatacccggcatgcctggctccccaggtctgaaagggtcacctggctctgtgggctaccccgggagcccggggctcccgggagaaaagggtgataaggggctcccgggcctcgacgggatccccggagtcaagggcgaggcaggcctccctggcacccctggaccgactgggcccgctggccagaaaggtgagcctggttccgacggaatacccggatctgcaggagaaaaaggagaaccggggttaccaggacgggggtttccgggattcccaggcgccaaaggcgataaagggagcaagggtgaagttggatttccaggccttgccgggagtcctggcatacccggatcaaagggcgagcaaggatttatgggccctcctgggccccagggccagcctggtttgcccggctcccccggccatgcaaccgagggcccgaagggtgataggggcccacaggggcagcccggactgccaggccttcccgggcccatgggcccccccggtcttcccgggatcgatggtgtgaagggcgacaaaggtaaccctggttggcctggggctcccggggtccctggccctaaaggagatcctggcttccagggaatgccaggcatcgggggtagccctggtatcacaggaagcaaaggcgacatggggcctcctggcgtgccggggtttcaggggccaaaaggtctacctggactacagggtatcaaaggtgatcagggagatcagggagtgccaggtgcaaagggtttgccaggtcctcccgggcctcctggaccatatgatatcattaagggcgaaccaggcctccctggtcccgagggcccacccggcctgaaggggctgcagggtctccccgggccaaaaggtcaacagggcgtgaccggcctggtgggtatcccagggcccccaggcatccccggattcgatggtgctcccggtcaaaaaggcgagatgggacctgccggccctacagggccccgcggattccccggccctccgggacccgacggtcttccagggtctatggggcccccgggcaccccttccgtggaccatggctttttagtcacaagacactcccagactattgacgatcctcagtgccctagcggcacaaagatactgtatcatggttactccctgctgtacgttcaaggaaacgaacgagcccacggccaagatctgggcactgctggttcatgtcttcgaaaattctccacaatgccttttctgttttgtaacatcaataacgtctgcaactttgctagtcgcaacgattattcctattggctgtctacgcctgagcccatgccaatgtccatggcccctatcaccggggaaaacatcagaccattcatatcgagatgcgccgtgtgtgaggccccagcaatggttatggccgtccactcgcagacaatccagatcccgccatgccccagcgggtggtcttccttatggataggttacagtttcgttatgcataccagtgccggtgccgagggttctggccaggccctggccagcccaggcagctgcttggaagaatttcggtcagcgcccttcatcgaatgccacgggcggggaacttgcaactactatgcaaacgcctattccttctggctcgcaacgatcgaaaggtccgaaatgttcaaaaaaccaacaccctcaaccttaaaggctggggagctgagaactcatgtgtcccgatgtcaggtgtgtatgcggcgcacctag

SEQ ID NO: 121580 - DNA, 5010 bp, Artificial Sequence
  derived and/or modified sequence
atgggcccccggctgagcgtgtggctgctgctgctgcccgccgccctgcttctgcacgaagaacactcgagagctgctgctaaaggcgggtgcgccggttctggctgcgggaaatgcgactgccatggtgttaaaggacaaaaaggggaacgaggtctgcctggtctgcagggggtgatagggtttcccgggatgcagggaccagagggccctcaagggccgccaggacagaagggggacacaggcgagcccgggttgccaggaaccaagggcacacgcggtccccccggcgctagcggttatcccgggaaccccggactgccaggcataccagggcaggacggccctcctggtccccccggaatacctggctgtaacggaacgaagggcgagagggggcctcttgggcccccaggtctgccagggtttgcaggaaacccggggccacccggcttacctggtatgaaaggcgacccgggagagatcctcgggcacgtgcccggtatgctgctgaagggcgaacgtgggtttcctggtattcctggcactcctggaccacccggccttcccggcctccagggaccggtgggccctccaggatttaccggcccacccggacctccaggtccgcccggccctccgggcgagaaaggtcagatggggctctccttccagggacctaagggagataagggggatcaaggggtgagtggtcccccgggcgtgcccggccaggcccaggtgcaggaaaaaggcgattttgctaccaagggcgagaagggccaaaaaggtgagcctgggtttcagggcatgcctggtgttggggaaaagggtgaacctgggaagccaggtccaagaggaaaacctgggaaggatggagataagggggaaaaagggagtccaggcttccctggtgagcccggatatcccggtctgatcggccgccaaggtccccagggcgaaaagggagaggcggggccacccggtcctccagggatagttatcggaacgggccctcttggcgagaagggtgagcggggataccccggcacgcccggccctcggggggaaccaggtcctaaagggttccccggactccccgggcagcccggccctccggggttgcctgttcccggacaggctggcgctcccggtttccccggagaacgcggcgagaagggagacaggggcttccctggaaccagcctgcccgggccatccggacgggatgggctgcctggcccaccaggatccccgggtcctcccggtcaacccggctacacaaatgggattgtggaatgccagcccggccccccaggggatcagggaccccctggaatccctgggcagcccggtttcatcggcgaaataggtgaaaaaggacagaaaggcgaatcatgtctaatttgcgatattgatggttatcggggcccgcctggcccccagggcccccccggcgaaattggctttcccggacagccaggagcaaagggggatcggggtctgcccgggcgagacggcgttgctggtgtcccaggcccacaggggaccccagggctgatcggccaacccggtgctaaaggcgaacccggagagttttacttcgacttgagactaaagggtgataaaggcgatcctggttttcctggacagcccgggatgaccggcagagctgggtctcccggccgcgatgggcacccaggtctacccggacctaagggctcaccagggtcagttggtttgaagggtgagagaggcccacccgggggcgtcgggtttcctggttcccgtggagacaccggaccccctggcccgccaggctacggacctgccggtccgatcggcgacaaaggacaggccggattcccgggaggcccggggtcccctggtctgccgggccctaagggcgaacctggaaaaatcgttcctctcccaggaccgccaggagctgaaggtcttccaggatcacctggtttccctggcccacagggagacaggggatttccaggcactcctggccggcccggcctgccaggagagaagggggctgtggggcagccaggaatcggctttcctggccctcctggacccaaaggggtcgacggtttgcccggggacatggggcccccggggacaccagggagacctgggttcaacggtttgcccgggaatccaggggtccagggccaaaaaggagagccaggcgtgggtctcccgggtctaaagggacttcctgggttgcccggaatacccggcacccctggagagaaaggctccatcggggtgccaggcgtgccgggagagcatggggcaattggaccccccggtctccaagggattcgcggcgagcctgggcccccagggctcccagggtccgtggggagcccgggagtgcccggcattggcccaccgggggctagggggccacccgggggccagggtccacccggtctgagcggtccaccgggcatcaagggagagaagggctttcctggatttccaggcctcgacatgccgggacccaagggggacaagggcgcacaaggtcttcccgggataacgggacagtccggcctccccggattacccggccagcaaggagctccaggcatccctggttttcccggaagcaagggagaaatgggggtgatggggacacctggccagcccggatcccccggccccgtcggggcacctggactacctggtgagaagggagaccacggctttccaggttctagtggaccacgtggggaccctggtttgaagggggacaaaggggacgtgggactgcctgggaagcctggtagcatggacaaggtagatatggggtcaatgaagggccagaaaggagatcagggcgaaaaggggcagatagggcccattggagagaaggggtctcggggggaccccgggaccccaggtgtgcccgggaaagatggccaagctgggcaacctggccagcctggcccgaagggggatccagggatttcaggcacgcccggcgcccccggactgcctggaccaaagggctccgttggcgggatggggctgccagggactcctggtgagaagggcgtgcccggcatcccgggcccccaagggtctccagggctacctggagataagggggccaaaggcgaaaaaggtcaggcaggtccccccggcatcgggatcccagggttaaggggggagaagggcgaccagggtattgcgggcttcccggggtcccccggcgaaaagggcgagaaaggatccatagggataccaggaatgccagggtctcctggacttaaaggcagcccaggcagtgtcggttacccgggctcacctggcctgcctggcgagaagggcgacaaaggactccctggcctggatggcattcccggagtgaaaggggaggcaggcctaccgggcacacctgggcctacaggccctgccggccaaaaaggcgagcctggaagcgatggcatccccggctcggccggtgagaagggggagccgggcctgcctggcagaggattccctgggttcccaggggccaagggcgacaagggctcaaaaggggaagtcggcttcccaggacttgccgggagcccagggatccccggctcaaagggagaacaggggttcatgggaccaccaggtccacagggacagccgggacttcccggcagccccggccacgcaacagagggaccgaaaggggaccgaggtccccaggggcagcccggccttccaggcttacctggacccatgggcccaccaggactgcctggaatagacggtgtcaagggcgacaagggaaacccaggatggcctggcgctcccggtgttcccggccccaagggcgatccaggctttcaagggatgccaggcataggcggttcacccgggattaccgggtcaaagggcgatatgggacccccaggagtcccagggttccaaggtcctaagggtctccccggactccagggcatcaaaggtgaccagggcgaccaaggggtgcccggtgccaagggactgccagggcctcctggtcctccagggccctacgatatcattaagggcgagccgggactcccaggacccgaaggcccaccggggttgaaggggctgcagggcctgcccgggcccaaaggccaacagggagtcaccggattggtgggaattcccggaccccctggcatcccgggatttgatggagcccccggtcagaagggggagatggggccggctggacccaccgggccaagaggatttcctggtccccctggccccgatggactgccgggcagtatgggtcctccgggaacaccaagcgtagaccacggattcctagttactagacactctcagactatcgatgatcctcagtgccccagtggcaccaaaattctatatcatggctactcattgctctacgtgcaaggtaacgagagggctcacgggcaggatctcggcacggctgggtcctgcttgagaaagtttagcacgatgccattcctgttctgtaacattaataacgtctgtaacttcgcttcccgcaacgactatagctattggttatctacccctgagccaatgccaatgtcgatggcacccataaccggcgagaacattagacccttcattagccgatgcgccgtatgcgaggcacccgccatggtcatggccgtacactcccagacaatccaaatccccccctgtccaagcgggtggagctcactctggattggctatagttttgttatgcacacgagcgccggcgccgagggctctgggcaagcactggcctcgccaggctcttgtctggaagagtttaggtccgctcccttcattgagtgccatgggagaggtacttgcaactactacgcgaatgcctattcattctggctggcgacaattgaaaggagcgaaatgttcaaaaaacctactccttcaaccctcaaggctggtgagctgcgtactcatgttagccgttgccaggtatgcatgcgaaggacctag

SEQ ID NO: 121581 - DNA, 3957 bp, Artificial Sequence
  derived and/or modified sequence
atgggcccccggctgagcgtgtggctgctgctgctgcccgccgcccttctgctgcacgaggagcactctcgagccgctgcgaagggcggctgcgccggtagcggctgcggcaagtgcgattgccacggagtcaaggggcagaagggagaacgcggccttccggggctacaaggggtcatcgggttcccgggtatgcagggtcccgaagggccccaagggcctcccggccagaagggtgacactggcgaaccaggcctgccgggcactaaggggactaggggtccccctggtgcctcaggttatccaggtaacccagggcttccgggcattcccggacaagatgggcctccaggccctcccgggattccaggttgcaatggcacaaagggcgaacgggggccgctgggcccccccgggctccccggattcgcgggcaaccccggaccgccaggcctgcccggtatgaagggggatccgggagagatactcgggcatgtgccaggaatgctattaaagggcgagagaggttttccaggaattcccggaacaccaggaccacccggtctgccaggcttacagggacccgtggggccaccagggtttaccggcccccccggaccccccggtccacccggaccccccggggagaaggggcagatgggacttagcttccagggcccaaagggagacaagggtgaccaaggggtttctggtccgcctggggtgccaggtcaggctcaggtgcaggagaagggggacttcgccacaaaaggagagaagggtcagaaaggcgaacccggtttccaaggcatgcccggtgtaggagaaaagggcgagcccggaaaacccggacctagaggcaaaccagggaaggatggcgacaaaggagaaaaagggagtccaggtttccctggcgaacctggttatcccggacttatcggcagacagggcccacagggggagaagggggaagcagggccgcccggtccccccggtatagtcataggtaccggcccactgggcgaaaaaggggaaaggggttaccctgggacaccgggccctaggggcgagccaggaccaaaggggtttcctggactacccggacagcctggcccacctggattgcctgtaccagggcaggcaggagcgccaggattccctggcgagagaggggaaaaaggcgaccgtggctttcctggtacgtccctgcctggaccctctggacgagacggcctgccgggcccaccggggtcacctgggccacccggacagcccggctacacaaatggcatagtggagtgccagccagggcccccaggcgaccaaggccctcctggaattcctggacaacctgggttcatcggggagattggcgagaagggacagaagggcgagagctgtttaatctgcgacattgatgggtataggggcccccccggccctcaagggcccccaggcgagatcgggttccctggccagcccggcgcaaaaggactcccaggaatcaccggccagagcggattgcccggcctgccaggacagcagggcgccccgggcatccccggattccccgggtccaaaggcgagatgggggtaatgggcacacccgggcaacctgggtccccagggcccgtgggggccccaggactaccgggggaaaagggggatcatggctttcctggctcgtccggcccccggggagatcctggactgaagggcgacaagggcgacgtgggtctgccaggcaaacctgggagcatggataaagtggatatgggctccatgaaaggtcaaaagggggaccagggcgaaaaaggacagataggcccgataggtgagaagggttcgcgaggtgatccaggcaccccgggtgtgcccggcaaagatggtcaggcgggtcagccaggccagcccggcccaaagggtgatccgggaatctcagggacgccgggggcccctggtcttcccggcccaaagggttccgttggcggaatgggcctacccgggacccccggcgagaagggggtgcctggcatccctgggccccaggggtcaccgggtctgccgggcgataaaggcgcgaaaggagaaaaaggacaagcaggcccccctggaattgggatccctggcctgagaggggaaaagggtgatcaaggcatcgccggcttccctggatcccccggagaaaagggagagaaggggagcatcgggattcctggcatgccaggatctccgggtctgaagggcagcccgggatcggtaggctatcccggctcccccgggttaccaggtgagaaaggggacaagggcctgccgggtctggatggcatccctggtgtaaagggcgaagccggattacctggcactcctggtccaacagggcctgctggccagaaaggcgagcccggcagcgatggaatcccaggcagtgctggggaaaaaggagagcctggactgccaggcagggggttcccgggattccctggcgcaaagggagataaaggctccaaaggggaggtgggcttcccaggtctcgcggggtcccctggtatacctggctcaaagggcgaacaggggtttatgggtccaccaggcccccaagggcagcccggactcccaggatctccaggacacgccactgaagggcccaagggagatcgcggccctcaggggcagccgggtctgccaggactccccgggccgatgggaccccccggtttgccaggaattgatggtgtgaagggcgataaaggtaacccaggatggcctggggcaccaggggtgccaggtcctaagggcgaccccggctttcagggaatgcctggtattgggggctcgccgggcatcaccggatccaaaggtgacatgggaccccctggcgtccccggtttccaaggtccaaaaggtctgcccggcctgcagggtatcaagggcgaccaaggagaccagggggtccccggcgctaaaggcctgcctggacccccaggcccacctgggccctacgacatcatcaagggggaaccgggtttgcctggaccagagggcccaccgggtctgaaaggcctgcagggtctgcctggtcctaaggggcaacagggcgtgactggtctggtgggaatacctggcccacccggaatacctggtttcgatggcgctccgggacagaagggagagatggggcccgccggccccacaggacccaggggatttcccgggcctcccggacccgacgggctccccggaagcatgggcccacccggcacgccctccgtggaccacggtttccttgtgactcggcactcacagacaatagacgatccacagtgcccatcaggcaccaaaatactttatcatggctatagcttgttgtacgtgcagggtaatgagagagcgcacggacaggacctgggcacagccggatcatgcctcagaaaattctcaaccatgcctttcctcttctgcaatatcaacaatgtgtgtaattttgcgtcccggaacgactatagctattggctgagtactcccgaacctatgcctatgagcatggctcccatcacgggcgagaatatacggccctttattagccgctgcgctgtgtgtgaggcccctgccatggtgatggcggtgcacagccagactatccaaatccctccctgccctagtggttggagttccctttggattgggtactcctttgttatgcacacctccgctggggcggaagggagcggacaggccttggcaagccccgggtcatgtcttgaggagtttcggagcgcccctttcattgagtgccacggcagagggacctgcaattactacgcgaatgcttacagcttctggctggctactattgaaaggtccgaaatgttcaagaaacctaccccctcaaccctcaaggcaggcgagctgcgaacacacgtgtctcgctgccaggtatgcatgcgccggacatag

SEQ ID NO: 121582 - DNA, 3939 bp, Artificial Sequence
  derived and/or modified sequence
atgggccctaggctgtcagtgtggctgcttttacttcccgctgccctgctgctccacgaggagcattcacgggcagcagccaagggagggtgtgcgggttctgggtgcgggaagtgtgattgtcacggagtgaagggacagaagggcgaacgcggactccctggtctgcagggcgtaatcgggtttccagggatgcagggccctgaggggcctcaaggtcccccaggccagaagggtgatacaggagagcctggacttccgggaacaaagggaacacgcggtccacctggagcttcagggtacccaggcaatcctggtctgccaggaatccccggtcaggatggccctccagggccacctggcattcctggttgcaatgggactaaaggagaacggggtccccttgggcctccgggactgccaggcttcgctgggaaccctggcgatcctggggagatcctgggccacgttccgggtatgctactgaagggggagcgcggtttccccggtataccaggtacacccggtccacctggactgccgggactccaagggcctgtaggtcctcccggatttaccggacctcccgtgagctttggcggatgcttatccgaatttgggcatggagggatctcttttccgctgaccaaacgacggcaaggggatcagggcgtgagcggcccacccggagtgccgggacaggcccaggtccaggaaaaaggtgatttcgcgactaagggggaaaaggggcaaaaaggcgagcctggattccagggtatgcctggggtcggggagaagggcgaacctggaaaacctggtcctaggggcaaacccggaaaagatggtgacaagggagagaaagggtcacctgggttcccaggcgaacccggatacccgggtctgattgggagacagggccctcaggtgaacgcaggaacaatcgcctatcccctccccccatgcccagtgattggcactggtcctctgggcgaaaaaggagagcgaggatacccaggaacacctggacccaggggtgagccagggcctaaagggtccttcctggccttttttcccccacccccaacacctccaccgttcgctggcctgccagtgccagggcaggcaggcgctcccggttttcctggcgaacgcggagagaaaggtgaccgcggattcccgggaactagcctgcccggaccctctgggcgagacggacttcctgggccacccggatcccccggaccccctggacagcccggatacaccaacggaattgttgaatgccagccaggtccaccaggagatcagggaccgcctggcatcccgggacagccgggatttataggggagatcggagaaaagggccagaagggcgaatcatgcctcatctgcgatatcgacggctacagaggcccacctggaccccaagggcctcccggagaaatcggctttcccggacagccaggcgctaagggcttgcctgggatcactgggcagtccggacttcctggtctccctggccaacaaggggcacctgggatccccggtttcccaggaagcaagggcgagatgggagtaatgggaacacctgggcaacccggaagtccaggacctgtcggcgctccagggttacccggtgaaaaaggcgaccacggcttcccgggtagcagtgggcctcgcggagacccaggcctgaaaggcgacaagggcgacgtcggactgcctggcaagccagggtcgatggacaaagtcgacatgggaagtatgaaaggacagaaaggagatcagggggagaaggggcagataggccctatcggcgaaaaaggctctaggggcgacccaggaacccctggcgtccctgggaaagatggtcaagccggtcagccaggtcaacctggcccaaagggtgacccaggcattagtggtactcccggagcaccaggcctgcccggacccaaaggatccgtgggaggcatgggtctaccgggtacccccggtgagaagggagtgcctggcattcctggacctcagggttcccctggacttcccggtgataagggcgctaaaggagagaagggacaagcaggcccaccaggcattggcatcccagggctgaggggtgagaaaggggaccagggaattgccggatttccagggtcacctggagagaaaggtgagaaaggtagcatcgggattccgggaatgcccggaagccctggactgaaggggtcccctgggtcagtgggatacccagggagtccaggcttgccgggagaaaagggagacaaggggcttcccggactggatggaattcctggtgtcaagggcgaggcagggctgcctggcacgccaggacccaccggcccagccggacagaagggagagccgggatcagacggcattcctgggtctgccggtgagaagggggagccaggattacccggacgcggtttccctggttttccaggcgctaaaggcgacaaaggaagcaagggggaggtgggctttcctgggctggccggttccccaggcattcctggtagtaaaggagagcagggtttcatgggaccccctggtcctcaggggcaaccaggcctacccggatctccagggcatgccaccgagggacccaagggggaccgaggcccacaggggcagcccggtctcccaggcttgcctggccctatgggcccacccggtctgcctggtattgatggggtcaaaggcgataagggaaacccgggttggcccggtgcacccggagtgcccggtcctaagggggaccccggattccagggcatgcccggaatcggaggctcccctggaatcactggctctaagggcgacatgggaccgcctggagtcccgggtttccagggtcctaaaggcttacctgggctgcaggggatcaagggtgatcagggcgaccagggcgtccctggggctaagggcttgccaggacccccagggccaccaggaccctacgacattattaagggagaaccgggtttgcccggacctgaggggccacctggacttaaaggcttgcaagggctgcctggacccaagggccagcagggtgtaaccggtctcgtgggcattccagggcctcctggtattccgggattcgatggtgcccctggccagaagggcgagatgggtcctgctggccctactggcccaagaggcttccctgggccacccggacccgacggcttgcctgggtccatgggcccacccggaacaccttccgtcgaccatggcttcctcgtaactagacattcgcagaccatcgatgatccacagtgtccatcaggcaccaagattttgtaccacggctattccctgctttacgtgcagggtaatgagagggcacatggccaggacctgggtacagccggttcctgcctgagaaaattctccaccatgccctttctgttctgtaacattaacaatgtctgtaatttcgcctcccggaacgattactcctactggttgtctaccccagaaccaatgcccatgagtatggcccctatcactggtgagaatattcgcccatttatctctcgctgcgcagtttgtgaggctcctgcgatggtgatggctgtgcattctcaaaccatccagatccccccatgtccaagtggctggtcaagcctctggatcggatatagcttcgtcatgcatacatctgccggagcggagggctcaggccaggcattggcctccccaggttcatgcctggaagagttcagatctgcccctttcattgaatgtcatgggagaggaacatgtaattactacgctaacgcatactcgttttggttggccaccattgagaggtccgaaatgtttaaaaagccaactccgagtaccctcaaggctggtgagctaagaacacacgtgagcaggtgtcaggtttgtatgagacggacttag

SEQ ID NO: 121583 - DNA, 5009 bp, Artificial Sequence
  derived and/or modified sequence
atggggccacgtctgtcagtttggctgctgttgctgccagcggcacttctgctgcatgaggagcatagccgggctgccgctaaagggggttgcgccggttcagggtgtggaaaatgtgattgccacggcgtgaagggacagaagggcgagagggggctgcctggacttcaaggcgttattgggtttcccggtatgcaaggccctgagggcccacagggcccacctggacaaaagggtgatacaggggaaccaggtcttcctggcaccaagggcactagaggtccccctggggcaagcggttatccaggaaaccccggattgcctggcattccagggcaggatggccctccaggcccaccaggcatccccggatgtaatggtaccaaaggggagcgaggacctctcggaccccctggactgcccggatttgctgggaacccaggaccaccaggcttgcccggtatgaaaggggacccgggagaaattctgggacatgtgcccggtatgctcttgaagggggagagaggcttccctggcattcccggtacccccggtccccctggtttaccaggcttgcaaggacctgttgggccaccaggattcaccggtcccccaggaccacccggtccccctggacccccaggagagaagggccagatgggcctgtccttccagggcccaaaaggcgataagggcgatcagggcgtgagcggccctccaggcgtacctggccaggctcaggtgcaggaaaaaggcgactttgcaactaaaggcgagaaaggacagaagggagagcctgggtttcaggggatgcccggagtcggagaaaagggcgagcctggaaagccaggtcccagggggaagcctggcaaggatggcgacaaaggcgagaagggtagtcccggattcccgggagagcccggatatccagggctgatcggacgtcagggtcctcagggcgaaaaaggcgaagccggacctcccggaccccctggcattgtgattggcaccggcccactaggcgagaagggtgagcgcggttacccgggaacccccggaccacgaggagaacccggtcccaagggcttccccggactaccagggcagccaggcccacctggattaccagtgcccggtcaggcaggagctccaggctttcctggggagcggggagagaagggggacagaggcttccctggcacttcgctgccaggccctagcggacgtgacgggctgccaggtcctcctgggagcccgggtccgcctggccagccaggctataccaatgggatcgtggagtgccaacccggtccaccaggggatcaaggccctcccggtatcccaggacaacctggtttcataggggaaattggagagaaaggccaaaagggagaatcttgtttaatttgtgacatcgatggctaccgcggaccccctgggccacaggggccacccggtgaaataggattccccggacaaccgggagcgaaaggcgaccgaggcttgcccggaagagatggagtggcaggtgtcccgggtccccaaggaactccaggtctcatcggccagccgggagcaaagggcgaacccggtgagttttacttcgacctcaggctaaagggagacaaaggggacccaggtttcccagggcagccagggatgactggaagagccggatcccctggcagggatggacaccctggtctcccgggtcctaagggatctccaggatctgtcggcctgaagggtgaacgtggtcccccagggggagtgggtttccccggatccagaggtgacaccggccctcctggcccacctggttacggtcccgcaggcccaatcggggacaaagggcaggctgggttcccaggaggacccggatctcctggcctgcccggacccaagggggaacctgggaaaatagtgccccttcccggtccccctggggcagaggggcttccaggatcaccaggctttcctggcccacagggcgatcgagggttcccaggtacgcctgggagacctggcctgccgggagagaaaggtgctgttggacagccaggaatagggtttcccggacctcccggaccaaagggagtagacgggctgcccggagatatgggccctccgggaacacccggtcggccaggctttaatgggctgcccggaaatcccggagtgcaaggccagaaaggggaacctggagtcggcctgcccggacttaagggactgcctggactccctggcattccaggcacacctggtgagaaaggctcgattggggtgccaggtgtgccgggtgagcatggcgcaatcggacctcctggattgcaaggcatccgcggtgagccgggtccccctggacttccaggatctgtgggcagccccggtgtaccaggtatcgggccacctggtgcgcgtgggccacccggagggcagggacctccaggtttatctggacctccgggaataaagggcgaaaagggcttcccgggttttccaggactggacatgcctgggcctaaaggcgataagggagctcagggcttgcctggaattaccgggcagtcaggtcttcctggtctgcccggtcagcagggcgcaccaggaataccaggcttccccggaagcaagggtgagatgggtgtaatgggaacaccaggccaacctggctctcccggacccgtgggagcccctgggttgccaggtgagaaaggcgatcacggctttccaggcagcagcggccctcgaggcgaccctggcctgaaaggggacaagggtgatgtgggactgcccggaaagccaggctcaatggataaagtagatatgggaagtatgaagggtcagaagggtgaccagggggaaaaggggcagatcggccctatcggggagaagggatcacgcggagatcccggtacaccaggggtccctggcaaggatgggcaggccggacagccgggtcaacccggtccaaagggggaccctggcattagtgggacacccggagcaccaggcctccctggcccaaagggctctgttggcggtatgggtctgcctggcaccccaggggaaaagggtgtgccgggaatcccgggaccacaggggagccctggacttcctggggataaaggcgctaagggcgaaaaaggtcaggcaggacccccaggtatcggcatccctgggctgagaggagaaaaaggagaccaaggcatcgcaggattcccaggctcacctggagaaaaaggcgagaaaggctctatcgggataccgggaatgcctggcagccccggtctgaagggctcacccggatcagttggctatcccggaagccccggtctaccaggggagaagggtgacaagggattaccgggactagacggcatcccaggggtgaagggcgaggcaggcctgccaggcacccctggaccaactggtccggcaggtcagaagggggaacctggatctgacggcatcccgggatcagccggtgagaaaggggagccagggctgccgggaaggggcttcccaggatttcctggggcaaagggcgacaagggaagcaaaggcgaagtcggattccctggcctggccggtagtcccggaattcctggatccaagggagagcagggctttatgggacctccaggtccccagggccagcccggactccccggttcccccggacatgccaccgagggacccaagggcgaccgaggaccacaaggacagcctgggctgccaggcctgcccggtcccatggggccacctgggttgcccggaatcgacggggtgaagggggacaagggcaatcccggatggccaggtgctcctggagtgcccggacctaaaggcgatcctggtttccaggggatgcccggtataggcggttcacccggaatcacgggctcaaaaggtgacatgggccctcccggagtgcccggttttcaggggcctaagggccttccaggcctgcagggtatcaagggagaccagggggatcagggcgttcctggggcaaagggcctccctggccctccaggtcccccaggcccatacgacatcataaaaggagagcccggattgccaggccctgaagggccacctgggctgaagggtctgcagggtctgccaggcccaaagggacagcaaggcgtcacgggcctggtgggtatccccggaccacccggaatccccggatttgatggcgctcccggtcagaagggagagatggggcctgccggaccaacaggtcccaggggtttccctggaccccctggtccagacggcctgccaggcagtatgggtccacccggtactccatcagtcgatcacggatttttggtcacaagacactcacagaccatagatgacccacagtgcccttcaggtaccaaaatcctgtaccacgggtactcccttttatatgtccaaggaaacgaaagagcccacggccaggatctcggcaccgcaggaagttgcctgcgaaagttcagcaccatgcctttcttattctgtaacatcaataatgtatgtaatttcgcgtcacgaaacgactactcgtattggctgtcaacaccggaaccaatgccaatgagtatggctccaattacaggagaaaacatcaggccattcatttctaggtgcgctgtgtgtgaggcacccgctatggtaatggccgtccacagtcagaccatccaaattcccccatgcccaagcgggtggtccagtctgtggatcggatacagcttcgtgatgcacaccagtgccggtgcagaagggagtggacaggcattggcaagccccggaagctgcctagaggaatttcgttcagccccattcatcgagtgccacggtcggggaacctgtaactattacgctaacgcatactccttctggctcgccactatagaacggtccgaaatgttcaagaaacctactccatctaccctcaaagctggagagctgagaacccacgtgagccgctgccaggtatgtatgcggagaaccta

SEQ ID NO: 121584 - DNA, 3957 bp, Artificial Sequence
  derived and/or modified sequence
atgggacctagactgtctgtgtggcttttgttgctgcctgcagccctattattgcatgaagagcactcgagagccgctgcaaagggcggatgcgcaggatccggatgcgggaaatgcgattgtcacggggttaaaggacagaagggcgaacgcggtctcccaggcctccaaggggtgattggcttcccgggaatgcaagggccagagggtccacaagggccacccggacaaaaaggggatactggtgagccaggcctgccgggaactaaaggtactcgcggtcccccaggcgcaagcgggtatccaggtaacccagggctgccgggaatacctggacaagatggaccacccggacctcctggcatccccggatgcaatggaactaagggggagcggggacccctggggccacccggtcttccgggatttgcaggcaatccaggacctccgggtctgccaggtatgaagggggatcccggtgagatcctcggacacgtgcccggtatgcttctcaagggagagcgtggatttcccggtattccaggtacgcctgggcctcctggactccctggccttcagggacctgtgggccctcccggttttaccggcccacccggtccccctggacctcctgggccacccggtgaaaagggacagatggggctgtcttttcagggccctaagggagacaagggagatcagggcgtgagcgggccacccggagtccccggacaggcccaggtgcaggagaagggggatttcgccaccaagggcgagaaaggccaaaagggggagccaggttttcaagggatgcccggagttggcgaaaaaggagagcccggaaagccaggcccacggggtaaaccgggaaaagacggcgacaagggtgagaagggatcccccggatttccaggagagcctgggtaccccggactgataggtaggcaaggcccacagggtgaaaagggcgaggctggacctcccggacccccagggatcgtaatcggaacaggcccattaggcgagaagggtgagcgcggataccccggtaccccaggtcccaggggagaaccagggcctaagggttttcccggactgcctgggcagcccggtcctccgggactaccagtacctgggcaggccggagctcctgggtttcccggagagcgtggggaaaagggggaccgtggctttcctggcactagtttacctgggccaagcggcagagatggtctcccaggccctcctggctcacccggtcctcccggacagcccggatacaccaatgggattgtggagtgtcagcccggtccgcctggcgaccaggggccacctggcatcccgggacagccagggtttataggtgaaatcggagagaaaggccagaaaggggaaagctgcctcatatgcgacatagatgggtaccggggacccccagggccacaaggcccacctggtgaaatcggctttccaggccaacccggtgccaaaggcctgccaggcatcaccggccagagcgggcttcccggactgcctgggcagcaaggagccccaggcatcccagggtttccgggatcaaagggggaaatgggagtcatgggaaccccaggccagccaggatcgccaggaccagttggagcccctggattaccaggagagaagggtgatcacgggtttcccggttcctctggccctaggggagacccgggtctgaaaggcgataaaggcgacgtggggctgcctgggaaacccggtagcatggataaggttgacatgggttcgatgaaaggtcagaaaggggatcagggagaaaaggggcaaattggccctatcggggaaaaagggtctaggggcgatcccggtacccctggtgttcccggaaaagacggccaggcagggcagcctggacaaccaggacctaagggtgacccaggcatcagtgggaccccaggggctcccggactgcctggcccaaagggcagcgttggcggtatgggattacctggcacgccaggagagaaaggcgtaccgggaatccctggccctcaggggtcccctgggcttcctggcgacaagggggcaaagggggaaaaaggacaggctggccctccgggaatcggcattcccggactccggggagaaaaaggagatcagggaattgctgggttccccggatcaccaggagagaagggggaaaaaggcagcattgggatccccggtatgcccggatcacccggtctaaagggttctccgggatccgttggctaccccggatccccaggcctgcccggagagaaaggcgacaaagggctccctggcctggacggtattccgggagtaaagggcgaggccggactccccggtacacccggacccaccggcccagcgggacagaaaggagagccaggcagtgacggtattcctggaagtgctggtgagaagggggagccaggactgcctgggaggggtttcccaggattccccggagccaagggggataaaggtagtaagggcgaggtgggattccccggactggcaggatcccctggcattccaggttccaagggagagcaggggttcatggggcctcctgggccacagggtcagcccggactccccggttcacctggacacgccaccgagggcccaaaaggggatcgcggaccccagggccagcctgggttgcccggtcttccagggccaatgggcccaccgggactccctgggatcgatggcgtgaaaggagacaaggggaaccccggatggccaggcgcaccaggtgtaccaggccctaaaggagaccctggctttcaggggatgccaggcatcggtggtagcccaggcataaccgggagtaagggcgatatgggccctcccggagtccctgggttccagggccctaaaggcctgcccggtctccagggcatcaagggagaccaaggagaccagggcgtgcctggagctaaaggcctgcccggtccacccggaccgcctggaccgtatgacatcattaagggtgagccaggtcttcctggccctgagggcccaccaggactgaagggacttcaagggcttcccggaccaaaaggccaacagggtgtcactgggcttgtgggaatacccggtcctcctgggatccccggatttgatggtgcacccggtcagaaaggagagatgggcccagctggacctacgggccctaggggtttcccaggtcctcctggacctgacggtttaccaggttcaatgggaccgcctggcacacctagcgtcgaccacgggtttctggttaccagacattctcagaccatagatgacccccaatgtccatccggcacaaaaatactgtatcacggttacagcctgctttacgttcagggcaacgaaagggcacacggccaggatctgggtacggctggttcctgcctccggaagttctcaaccatgccatttcttttttgcaacatcaataacgtatgtaacttcgcttctagaaacgattactcttattggctgtccacacctgaacccatgcccatgagcatggctcccataacaggggagaatatccgcccttttatttcccggtgcgcagtatgcgaggcaccggctatggtgatggccgtccacagtcagaccatccagattcccccttgtccctctggctggtcctcactgtggatcggctattccttcgtaatgcacacatccgcaggggctgagggcagtggccaagctctggcttcccccggttcttgcttagaagagttcagaagcgcgccattcatagagtgtcacggcaggggcacctgcaactactatgctaatgcctattctttctggctggcaactatcgagcggtccgagatgttcaaaaagccaactccaagcactctgaaagctggggaactgagaacccatgtgtcacggtgccaggtgtgtatgcggagaacctag

SEQ ID NO: 121585 - DNA, 3939 bp, Artificial Sequence
  derived and/or modified sequence
atgggtcctcgtctttctgtgtggctccttctcctccccgccgccctgcttctacatgaggaacactcgcgggccgccgccaaaggggggtgcgctggctccggatgtggcaaatgtgactgccacggggtcaaaggacaaaaaggggaacgcgggcttccgggtctccagggagtcattggctttcccggcatgcagggccccgagggaccacagggtcccccaggacaaaaaggcgacacgggggaacccgggctcccaggaaccaaaggcaccaggggcccacccggcgcttctgggtaccctggaaacccgggactcccgggcattcctggtcaggacggtccacccggacctcccggaattcctggctgcaatggcacgaagggggaaagagggcccctaggacccccaggactccccggatttgccggaaaccccggcgatcctggagaaattcttggccatgtacccggaatgctactcaagggcgagagaggtttccccggaatcccaggaacaccaggaccaccaggtctgcctgggctccagggtcccgtcgggccacccggcttcaccggccctcccgtatcctttggtggatgcctgtccgaattcggccacgggggaatctccttcccattgaccaagcgccgacagggggaccagggcgtatcagggccacctggagttcccggccaagcacaggttcaagagaagggggacttcgcaacaaaaggcgaaaaaggacagaagggggagcctggctttcagggcatgccaggtgttggggaaaagggcgaaccaggcaagcctggacctaggggaaagcccgggaaagacggcgacaagggtgagaagggatcaccaggatttccaggcgaacctgggtaccctggtttgatcggccggcaagggccacaagtgaacgctggtacaatcgcataccctctcccaccatgtccagtgatcgggacgggccccctcggcgagaaaggggagcgagggtatccgggaactccaggtccccgtggcgagccaggccctaaggggtcattcctggcttttttcccccctccacccacaccccccccatttgctggcctccctgtcccagggcaggcaggggcccccggcttccccggtgagcggggcgagaaaggagataggggcttccccgggacatcactgcccggccccagcgggagagatggccttccaggtcctccgggatcacccgggcctcccggacaacctggctacacgaacgggatcgttgagtgccaaccaggcccaccaggtgatcagggcccacctggtattcccggtcagccagggtttatcggagaaattggcgagaaaggacagaagggcgaaagttgcttgatctgtgatattgatgggtatcgaggtccccccggtccacagggaccccctggcgagattggctttccgggtcagccaggggcaaagggacttcctgggataaccgggcagtctggcctgcccggtctaccagggcagcagggcgcaccaggcattcctggtttcccggggagcaagggtgagatgggcgttatgggaacacctgggcagcctggatctcccggccccgtcggagctcccggcctgccaggagagaaaggcgaccatggcttccccgggtcttctggccctcgtggtgaccccggcttaaaaggcgacaaaggcgacgtaggcctgccgggcaaacctggatctatggacaaagtggatatggggagcatgaaaggccagaagggggaccagggtgagaaagggcagatcggacccattggtgaaaaaggtagtcggggcgacccgggaacgcccggtgttccagggaaggacgggcaggccggacagcccgggcagccaggtcctaagggtgaccccgggattagcggcacacccggtgccccgggtctgcccggaccgaagggaagtgtcggtggcatgggtcttccaggcacccctggagagaaaggagtccctgggattcctggaccgcagggatcgccaggcctgcccggagacaagggcgccaaaggtgagaagggccaggccgggccaccagggatcggcattccaggattgcgaggagagaagggggatcaaggcatagctgggtttccaggctcacctggtgagaaaggcgagaaaggatcaattggtattccagggatgccaggaagtccaggtctgaagggttctcctggcagcgtgggttacccaggatcgccgggactgcccggggagaaaggcgacaaaggacttccaggattggacggtatcccaggagtcaagggtgaggccggccttccgggcactcctgggccgacagggcctgctggccaaaagggcgaaccaggaagcgacggcatcccgggtagcgctggcgaaaagggcgaacccggactccctgggcgaggctttcccggattccccggcgccaaaggagacaaagggagcaagggagaggtcggctttcccggactggcgggctctcctggcatcccaggtagtaagggagaacagggctttatgggcccccccggaccccagggacagccgggtcttccaggatcaccaggccatgcgaccgaaggaccaaagggcgatcgaggacctcaaggtcaacctgggcttccaggcctgcctggccccatgggtccacctgggttgccgggcatcgatggggtcaagggggataaaggtaatcctggatggcccggtgcaccgggggtccctggaccaaagggggaccctggcttccagggcatgccaggtataggtggctcccctgggatcacgggaagtaaaggggatatgggccctccaggcgtccctggcttccaaggcccgaaaggcttgcctgggcttcagggaattaagggggaccagggggaccagggcgtacctggggccaagggcttgcccggacccccaggaccacctggcccatacgatataatcaagggggagcccggactcccgggacccgagggccctcccgggctgaagggtttacagggcctccctggccctaaaggacaacaaggggtcactgggcttgtcggtatccctggcccgcccggaattcccgggttcgacggggcacccggacagaaaggtgagatggggccagccggtcctacagggcccaggggtttcccaggtccacccggcccagatggactgccggggtccatgggtccgcctggaacaccatcagtggaccacggcttcctcgttacccgtcacagccagaccatagacgacccccagtgtccgtcaggaaccaagatcctctaccatggatactccctactgtatgtacagggcaacgaacgagcacacggccaggacctcgggacagccgggtcttgtcttagaaaattttctaccatgccctttctcttttgcaacattaataacgtttgtaatttcgcatcccgcaatgattacagttactggctgtctacccctgaaccaatgccgatgtctatggcccctatcacgggcgagaatataaggccattcatctcccggtgtgcagtatgcgaagctcccgccatggttatggctgtacactcccaaactatccagatccccccctgtccatctggctggagttctctctggatcgggtactctttcgtgatgcacaccagtgccggcgcagaaggcagcggacaggctctggcctcaccaggcagttgcctggaggagttcagatccgcccccttcattgaatgccatgggcgcgggacgtgtaactactatgccaacgcctatagtttctggctcgcaacaatcgagaggagtgaaatgtttaaaaaacctacccccagcacactgaaggcgggcgagctgaggacccatgtgtccaggtgtcaggtctgtatgcgaaggacttag

SEQ ID NO: 121586 - DNA, 5010 bp, Artificial Sequence
  derived and/or modified sequence
atgggcccaaggctctcggtgtggcttttactactgcctgccgcattactgttgcacgaagaacactctcgcgctgcggccaagggtgggtgtgctggctcgggatgcggtaaatgcgattgccacggtgtgaaagggcagaagggagagaggggactgcccggactccaaggtgtaatcggatttccaggcatgcagggaccagaaggcccccagggacccccaggacaaaaaggagacacgggagaaccagggcttcccggcaccaaggggacacgggggccacccggagcaagcggctaccccggtaaccccgggctccctgggataccggggcaggatggaccaccaggcccccccggcattcctggctgcaatggtacaaagggcgaacgggggcctttaggccctcctggcctgcccgggttcgcgggaaaccccggacctcccggcttgcccggaatgaaaggtgatccgggcgagatcctcgggcacgtgccaggcatgctcctgaaaggcgagaggggattcccaggaattcccggaaccccaggtccgccaggtctgcctggtctgcagggtccagtcggacctcccggcttcacaggaccgccagggccccctggcccacctggcccccctggtgagaaaggacaaatgggccttagcttccaaggcccaaagggtgacaagggcgatcagggcgtgagtggcccacccggggtgccgggccaggcacaggtccaagaaaaaggtgatttcgcaactaaaggagagaaagggcagaagggggagccagggttccaaggcatgcccggtgttggcgagaagggcgagcccggcaagcctggaccacgggggaaacctgggaaggacggcgacaagggtgaaaagggcagcccaggattccccggggagcccggatatcctgggttgatcggaagacagggaccgcaaggagagaaaggggaagccggaccaccgggaccacctggaatcgtcataggaaccgggcccctgggggaaaagggagagagaggataccctgggacaccagggcctagaggcgaaccagggcctaaagggtttcccggactccccggtcagcctggcccccctggactacctgttcctgggcaggccggtgccccaggctttccaggtgaaagaggagagaaaggggacaggggctttcccgggacgagtttacccggcccatctgggcgagatgggctccctggacctcccggcagcccgggcccaccaggccagcccggctacacaaatggcatcgttgaatgtcagcccgggcctccaggtgatcagggccctccgggcatccccggacagcccggttttatcggcgagataggtgaaaaaggccagaaaggtgaatcctgtctcatatgcgacattgacggatataggggcccccccggccctcaaggacccccaggtgagataggctttcccggtcagccaggtgctaagggtgataggggacttcccggacgcgacggagttgccggtgtgcctggccctcaagggacccccggtttgatcggccagcctggggctaagggcgaaccgggggaattctacttcgatttgaggcttaagggtgacaaaggtgacccaggttttccagggcagccaggcatgacgggcagagccggttcgcccggccgggacggccatcccgggctgccaggcccaaaaggatctccagggtccgtcggtttaaaaggcgaacgaggaccaccaggtggtgtcggattcccaggcagtcggggagatacgggtccgcccgggcccccgggctacggtccagctggtcccatcggcgacaaaggacaggcaggattccctggggggcccggctctcctggccttccaggcccaaagggggaacccgggaagatagtccccctgcctggcccccccggagcagaaggtctgcccgggtcgcccggttttcctggtccacagggtgaccgcggcttccccggcacacccgggcgaccaggcctgccaggagagaagggcgccgtggggcagccgggtatcggttttcccggcccacccggtccaaagggagtggacggactgcctggagatatggggccgcccggaaccccaggaagaccaggattcaacggactccccgggaaccccggggtacagggtcagaagggcgagcccggagtcggcctgcctggcctgaaaggtctgccggggttgcctggcatccctgggacacccggcgaaaaagggtccattggagtgcctggcgtccccggagaacacggcgccatcggcccccctggcttacagggcatccggggcgaacccggaccccccgggttgccgggttcagtcggctctcctggcgtccctggcattgggccccctggcgctcgcggacctccaggcgggcagggcccaccgggactgtcaggcccaccaggcattaaaggcgaaaaggggttccctggtttccctggcctagacatgcccggaccaaagggggacaaaggcgcacagggtctgcccgggatcaccggccagtctgggctgccaggattacccggccagcaaggcgcccctggcatccccggattccccggttcaaaaggagagatgggagtgatgggaacgcctggccaaccaggctcgccaggcccagtgggggccccgggactgccaggcgagaaaggagatcacggcttccctggtagcagtggccctcgcggggaccccggtctaaaaggggacaagggtgatgtcggcttaccgggaaaaccaggaagtatggacaaggttgacatggggagcatgaagggtcaaaaaggcgatcagggagaaaaaggccagataggccctatcggagagaagggctctagaggcgaccccggcacaccaggcgtgcccggcaaggatggccaggctggccagcctggccagcctggaccaaagggcgaccccgggattagtggaacccccggtgccccgggcctaccgggacccaaaggaagtgtgggaggtatgggactacctggtacaccaggggaaaaaggagtgccaggcatcccgggaccgcagggctcccctggcctgcctggtgataagggcgccaagggtgagaaggggcaggcgggtccccctggtatcggcatccccggcctgagaggtgaaaagggcgatcagggcatcgccgggttccccgggtctcctggggagaaaggcgagaagggtagtattggcatacccggcatgcccggctctccagggttgaagggtagccctggctcagttggctaccccgggagcccaggattgcctggagagaaaggagacaagggcctccccggactggatggaattcccggcgtaaaaggcgaggccggactacccggaacaccgggtccaactggacctgccggacagaaaggggagccagggtctgatgggattcctgggtctgccggagagaagggcgagccaggactccctggaagggggtttcctggattccctggagccaagggagataaaggcagcaagggtgaagttggatttcccggactggcgggtagtcccggcatacctggtagtaagggagagcagggattcatggggccccccggacctcaggggcagcctggtctacccgggtcaccaggtcacgctacagaaggccccaaaggagaccgaggccctcaagggcagcccggccttccaggcctgcctggcccaatgggccctcctggtctcccagggattgatggtgtaaagggcgataagggaaaccctgggtggcctggagcacccggggtgcctggacctaaaggcgaccctgggttccaaggcatgcccgggattggaggcagccctggcatcactggtagcaagggggatatgggccctcccggagttcctggctttcagggcccaaaaggtctgcccgggctccaggggatcaagggcgatcagggagatcagggcgttccgggtgccaaaggactgcctggaccccccggaccccccggcccttatgacatcattaaaggcgaaccaggcctgcctggcccagagggcccccccgggctgaagggactacaggggctccccggtccaaagggacagcagggcgtaacgggactggtagggattcctggcccccctgggatcccgggcttcgacggcgccccaggtcagaagggcgagatgggaccagccggtcctacaggaccccggggatttccggggcccccgggacccgacggtctaccaggatcaatgggcccgcctggcaccccctcggtggaccatggcttcctggtgaccagacattcgcagactatagatgaccctcagtgtcccagcgggaccaaaatactctaccacggatattcacttctgtacgttcagggtaacgagcgtgcccacggacaggacctgggtacagcaggctcttgcctgcgcaagtttagcaccatgcccttcctgttttgtaatattaacaatgtctgcaattttgcgtctcggaatgactactcttattggttatccacacctgagccaatgcctatgagcatggcccctatcacaggggagaatatcagacctttcatcagcaggtgtgcggtgtgcgaggcccccgccatggtgatggctgtccattcacaaactatccagatcccaccctgtcctagcgggtggtcctcgttatggattgggtattcttttgttatgcatacctcagccggagccgagggttccgggcaggcccttgcctcacctggctcctgcctagaagagtttaggtccgcaccttttatagagtgtcatggacggggaacatgtaattactacgcgaatgcttatagcttttggctcgccacgatcgagagaagtgaaatgttcaagaaacccacacccagtacccttaaagcgggagagctgcgcactcatgtgtctaggtgccaggtctgcatgagacgaacatag

SEQ ID NO: 121587 - DNA, 3957 bp, Artificial Sequence
  derived and/or modified sequence
atgggccctcgcctgtcggtgtggctgttgcttctgcccgccgcgctgctccttcacgaagaacactcgcgtgctgcggccaagggtggctgtgccggcagcgggtgcggaaagtgcgactgccacggtgttaaaggacaaaaaggcgaacgcggactccccggactccagggtgttatcggttttcctggcatgcaggggccagaaggtcctcaaggtcctccaggccagaaaggcgacacaggtgagcctggccttccaggtaccaaaggtaccagaggccctcctggagctagcggctatccggggaacccaggcctcccaggtattcccgggcaggatggtccacctggcccccctgggatacccgggtgcaatggaacgaaaggggaaagaggcccactgggtccccctggcctgccaggattcgctggcaacccaggacctcctggattgccagggatgaagggtgatccaggcgaaatcctcggccacgtaccagggatgctgctgaagggagagaggggcttccctggtattcccggtacacctggaccccccggcctgcccgggctccagggccccgtcggtccccccggcttcactggtcctcccggacctccaggcccacctggaccacctggtgaaaaggggcagatgggactgtcattccaagggccaaagggtgacaaaggcgaccagggtgtgagcggccctcctggtgtacctggccaggctcaagtgcaggaaaagggtgactttgctactaaaggcgaaaagggacaaaaaggagaacccggtttccaggggatgcctggcgtgggcgagaagggcgagcctggcaagcccggcccccggggcaaaccaggaaaggacggcgacaagggtgaaaagggatctccaggcttccccggggaaccaggatatccaggtctgatagggcgccaggggccccaaggcgaaaaaggagaggccggaccccctgggccaccgggaattgtgattgggacgggtcctcttggggagaaaggagagaggggctacccaggcaccccaggccctagaggggagcctggccccaagggcttccccggattacccggacaacctggacctcctggtctcccggttccaggtcaggccggcgcccctggattccctggcgaacgtggagagaagggggaccgtggcttccccggcacaagcctcccaggtcccagcggccgggacggcctcccggggccccccggatccccaggaccaccgggccaacccggctacaccaatgggattgtggaatgccagccaggccctcccggagatcaaggcccacccggcatccccggacagcctggattcattggggagatcggcgagaagggccagaagggagagtcttgtcttatctgtgacatcgacgggtatagggggcctccgggcccacaggggccaccgggagagataggctttccaggccagccaggggcaaaaggcctgccaggaatcacaggtcagagcggactgccaggactgcctggacagcagggggctcccgggatccccggtttccccggatcaaagggtgaaatgggagtaatgggcactcccggtcagcccggatcgcccggtccagtgggcgcccctggcttgcctggagagaaaggagatcacggcttccccggatcctccggtccaagaggcgaccctgggttaaagggcgataagggagatgtgggcctgccaggcaagcccggatctatggataaagtagacatgggttcaatgaaagggcagaagggagatcagggggagaaggggcagattggcccaataggcgagaaagggtctaggggggatccgggcactcccggagtgcccggcaaagatgggcaggcaggacagcccggccagcccggcccaaaaggagacccaggcatcagtggaacccccggagcaccggggctgccaggtccaaaagggagcgtaggcggaatgggccttccaggtacaccgggagagaagggggtgccagggattcctggtcctcagggatcgcccgggctgccaggggacaagggcgccaaaggtgaaaaaggccaggcaggacctcccggtattggaattcccggactgcgcggcgagaagggtgatcaggggatcgctgggtttcccggttcaccgggcgaaaagggcgagaagggctcaatcggcatccccggaatgccaggctcccctggtctgaagggcagtccgggatcagttggttacccaggcagcccaggattaccgggtgaaaagggagacaagggattaccggggttggatggcatcccgggtgtaaagggagaggcaggcctgcctggtacccccggacctacaggccccgcagggcaaaagggcgaaccaggctccgacggcatcccaggcagtgctggcgaaaagggcgagccaggactacccgggaggggattcccaggtttccccggagcaaaaggggataaggggtccaagggcgaggtgggtttccctgggttggcgggaagtcccggtatcccaggctccaaaggtgaacagggcttcatggggcctcctggcccgcagggccagccagggttgcctggatcacccggacacgccactgaaggtcctaaaggagaccgtggtccacagggtcagcccggccttcccggcttgccaggacctatggggccacctggtctacccggcatcgatggcgtcaagggcgataagggcaaccccggatggcctggagctcccggagtacccggaccaaagggggatccagggtttcagggcatgccaggaatcggcggcagtccaggcatcaccgggtcaaagggggacatgggaccccccggagtgcctggcttccagggccctaagggtctcccgggtttgcaggggattaagggcgaccagggggatcagggagtgcccggagcaaaaggtctcccagggccaccgggcccacccgggccatacgacatcattaaaggggaaccaggcctgcccggccctgaggggcccccggggctgaagggcttgcaaggcctccccggtccgaaaggtcaacagggagtcaccgggctggtgggaattccaggtccaccagggatcccaggattcgacggagctccaggacaaaagggagaaatgggacccgccggcccgacaggcccccgcggattccccggtcctccagggcctgatggcctcccgggtagcatgggacctcctggcaccccgagcgtagatcatggctttctggttacccgccactcccaaaccattgacgaccctcaatgccccagtggtactaagattctgtaccatggttactccctgctgtatgtgcaaggcaatgagagagctcacgggcaggatctcggcactgctggaagctgccttaggaagttcagcaccatgcccttcctcttttgtaatatcaataacgtgtgcaactttgcctctcgcaacgattatagttattggctgtccacgccagaacccatgccgatgagtatggcgccgattaccggggagaatattcgaccctttatcagcagatgtgcagtttgcgaagcccccgcaatggtcatggccgtccacagccaaactatccagattcccccatgtcccagcggctggtctagcttgtggataggctattcttttgtgatgcacactagtgccggcgccgaaggatctgggcaggccttagcctctcctggctcatgcctcgaggaattcagatctgccccgttcattgagtgccatgggcgcgggacctgtaattactatgccaatgcctattcattctggttagccacaatcgagcgatcagaaatgtttaagaagcctacacctagtacactgaaagccggggaactgagaactcacgtgtccaggtgccaggtatgcatgcgtcggacctag

SEQ ID NO: 121588 - DNA, 3939 bp, Artificial Sequence
  derived and/or modified sequence
atggggcctcgtttgtctgtgtggttgctgttactgcctgctgccctgctgctacatgaagaacattctagagccgctgccaagggcggttgcgccggatcaggctgtggcaaatgtgactgtcatggagtcaagggacagaagggtgagagaggactgccaggcctccaaggcgtaatcggattcccagggatgcaaggacccgagggcccccaaggtcctcccgggcagaagggagataccggcgaacccggacttcctggaaccaagggcacacgcggtcccccaggcgcctccggttatcccggcaaccctggactgccgggcatccctgggcaagacggcccaccgggtcctcctggaattcccggctgtaacggcactaagggagaacggggacccttaggcccaccaggactgcctgggtttgctggtaatcctggagatccaggagaaattctgggccacgtacctggaatgctgttaaaaggggagagaggctttcccggaatccctggaacaccaggaccgcccggcttgccaggtctccaaggccccgtgggtccacccggcttcaccggaccccccgttagcttcggcggatgtttgagtgagtttgggcatggcgggatctcatttccactgacgaaaaggcggcagggcgatcagggcgttagcgggccacctggagtgcccggccaggctcaggtgcaagagaagggagattttgcaacaaaaggggagaaagggcagaaaggtgagccagggtttcaaggaatgcccggggtgggcgaaaaaggagagccaggcaaaccaggaccacgcggtaaacccggcaaagacggtgacaagggcgagaagggatcccccgggtttccaggcgagccgggctacccagggcttatcggcaggcaaggaccccaagtgaatgcaggcactattgcatatccattaccaccatgcccagttatcgggacaggtcccttaggcgagaaaggtgagcggggatatcctggaacccctggccctagaggtgagcccggaccaaagggtagtttcctggctttctttccaccacctcccacaccaccacctttcgctggtcttccagtgcctggacaggctggagcacctggatttcctggcgagagaggggaaaaaggtgatcgcggcttccctggaacgagccttccggggccttcagggcgggacggcttaccaggacctcccggttctccgggccccccaggacaaccagggtacaccaatggaattgtggaatgtcagccgggcccacccggagatcaaggccccccaggaattcccggccagccaggattcattggggaaattggggagaaaggacagaaaggagagagctgcctgatttgtgacattgatggctataggggtccacctggacctcaggggcccccaggcgagatcggattccctggtcagcccggagcaaaggggttaccgggtataacggggcagagtggtttgcctgggttacccggacagcagggcgccccaggaatccctggctttcccgggagtaagggcgagatgggcgtcatgggcacgccaggccaacctggatcaccaggccctgtaggagcgccggggcttcccggtgaaaaaggagatcatggttttccaggatcatcgggacctcgaggagatcctggactgaaaggcgacaagggagacgtgggactccccggtaaaccagggtctatggacaaggtcgacatgggcagtatgaaaggccagaagggcgatcaaggagagaagggccaaatcggccccattggcgaaaagggatcacgtggagatcctggaacgcccggagtgccaggaaaggatggacaggctggccaaccgggtcaacctggacccaaaggagatccgggtatttcaggtacaccaggcgcgccaggccttccaggtccaaaaggctccgtcggaggcatgggtctgcccggcaccccaggcgagaaaggggtgcccggtatcccaggtccccagggcagcccaggattgccaggtgataagggagcgaagggggaaaagggccaggcgggaccaccaggaatcggcattccaggattgcgaggagagaagggggatcaaggcatagctgggtttccaggctcacctggtgagaaaggcgagaaaggatcaattggtattccagggatgccaggaagtccaggtctgaagggttctcctggcagcgtgggttacccaggatcgccgggactgcccggggagaaaggcgacaaaggacttccaggattggacggtatcccaggagtcaagggtgaggccggccttccgggcactcctgggccgacagggcctgctggccaaaagggcgaaccaggaagcgacggcatcccgggatccgcaggagaaaagggagagcccggcctccctgggcggggatttccaggcttcccgggtgcgaaaggagacaagggcagcaaaggcgaagtgggttttccgggattggcagggtctcccggtatccccggctctaaaggcgaacagggcttcatgggccccccaggtccccagggccagccaggcctgccagggtccccaggacatgcgacagaggggccaaagggtgatcgcggaccccagggtcagccaggtctgccaggtctgcctggaccgatgggtccacctggcctgcccggcatagacggcgtgaagggagacaaaggaaatccgggttggccgggcgcaccaggcgtgccaggtcctaagggagaccccggatttcagggcatgccagggatcggcggaagcccgggcattacaggctcgaaaggagacatgggacccccaggcgttcctggatttcagggcccgaaaggtctacctggcctgcagggcattaagggcgatcagggagatcagggcgtgcctggggctaaagggctacctggccccccaggacccccgggaccatacgatattataaaaggggaacccggacttcctgggcctgaagggccacccgggttgaaagggttgcaagggttacccggtcctaaaggccaacagggcgtgacaggcctagtgggaatccccggtccacccggcattccagggtttgatggggcccccggccaaaagggagagatgggacctgccggcccaaccggaccccgtggctttccggggcctcccggcccagacggtctgcctggatctatggggcctcccggcacccccagcgtcgatcatggttttctcgtaacccggcactctcagacgatagacgatcctcagtgcccttctgggacaaagatattgtaccatggctatagcctgctgtacgtccaagggaatgaacgcgcccacggccaggatctcggcaccgccggctcatgtctccgaaagttttcgacgatgccctttctattttgcaatataaacaatgtgtgtaacttcgcttcacgcaatgattactcctattggctgtcaactcctgaacccatgcctatgtcgatggccccaattactggcgaaaacattagaccttttatttctcggtgtgccgtttgtgaggccccagcaatggtgatggccgttcactcacagaccatccagatccctccatgcccctctggctggtccagcctttggatcggatactcgttcgtcatgcataccagcgctggagccgaaggaagcgggcaggccctggcttcccctggatcctgcctcgaggagttcagaagcgcccctttcattgaatgccacggccggggaacctgcaattactacgcgaacgcatacagtttttggctggctacaatcgaaagatccgaaatgtttaaaaaacctacgccatcaaccttaaaggccggagaattgcgtacccatgtatctcgctgtcaagtctgtatgcgccgcacttag

SEQ ID NO: 121589 - DNA, 5010 bp, Artificial Sequence
  derived and/or modified sequence
atgggaccccggctgagtgtgtggcttctgctgttgcctgccgccttactcttgcatgaagagcactcacgagcagcagcaaagggcgggtgcgctggtagcgggtgcggtaagtgtgattgtcacggtgtgaaggggcagaaaggcgagcgaggcctgcccggactgcagggcgtgatcggattccctgggatgcaaggaccagaaggcccacaaggacctcctgggcaaaaaggtgacacaggcgaacccggcctccccggaactaagggaacaagaggtccccccggcgcgtcagggtaccctggaaacccaggcctgcctggcatcccaggacaagacggacctcctggaccaccaggaatcccaggatgtaatggtaccaagggagagcgaggcccacttggaccacctggacttcccggcttcgctggaaaccctggtcccccagggctgccaggaatgaagggcgacccgggcgagattctagggcatgtgcctgggatgctcctgaaaggtgagagaggtttccccggaattccaggaacacccggtccgcccggcctgccaggactgcaggggcccgtgggacctcctgggtttactggcccccccggcccacccgggccgcctgggcctccaggagagaaaggccagatgggtcttagcttccagggcccgaaaggtgacaagggagatcagggtgttagcggaccaccaggggtacccggccaggcgcaggtacaggagaagggggattttgccacaaaaggggaaaagggtcaaaagggggaacccggatttcaggggatgccaggagttggggagaaaggtgagccgggtaaaccgggaccccgcgggaagcccggaaaggacggtgacaagggcgagaagggttcccctggcttccctggtgaacccggatatcctggcctaatcggaagacagggcccacaaggtgagaagggcgaggccggcccacccggccctcccgggatagtcattggtaccggccctctgggggagaaaggagagcgaggttacccaggcaccccaggcccccgtggcgaacctgggcccaaaggattccctggcttacctggccagccaggccctccaggactgcccgtgcccggccaagccggcgctcccgggttcccaggcgaacgaggtgagaaaggcgacagagggtttcccggtacctcactccctggacctagcgggcgggacggcttgcctggaccccccgggagccccggacctcctgggcaacctggctataccaatggcatcgtcgagtgccaaccaggtccacccggggaccaaggcccaccagggattccagggcaaccaggctttattggtgaaatcggcgaaaaaggtcagaagggtgagtcctgtctgatttgcgacattgatggctatagaggaccacccgggccccagggcccacccggcgagattggattcccagggcagccaggagctaaaggagaccgtgggttacccggacgcgacggtgtcgccggcgtaccagggccacaaggaacccccgggcttataggccagccgggagccaagggcgaacctggcgaattttacttcgaccttcgactcaagggcgataaaggagatcccggatttcccggtcagccaggaatgactgggagagcaggaagtccaggccgcgatggacatcctggtctgccaggaccgaaaggaagccctggatcagtgggcttgaaaggagagagaggacccccaggaggagtgggcttccccggatcaagaggggatacaggaccaccgggtccacccggctatggtccagcaggaccgattggagacaaggggcaagcgggatttcccggaggtcctggatccccaggcctgcccggaccaaagggcgagcctggaaaaatagtgccactccctgggcccccaggtgcagagggcctccccggttcaccaggcttccccggaccccagggcgataggggctttcctggcacaccaggaagaccgggtctccccggagaaaaaggagccgtgggccagccaggcatcggtttccccggccctcccggcccaaagggcgtggatggcttgcccggcgacatgggcccacccggcacaccgggtaggccgggctttaatggtttacccggcaacccaggcgtgcaaggtcagaaaggagagcccggggtaggcctgcccggattgaaaggccttccaggcctcccgggcattccaggtaccccaggagagaaaggtagcattggagttccaggcgttcccggagagcatggtgcaataggtccacccggattgcagggaattcgcggtgagccagggcctcctggccttccaggttcagtgggctcgccaggagttccggggattgggccacccggagcacgcggtccaccaggagggcagggcccccctggacttagcggtcctcctgggattaaaggggagaaggggttcccaggctttcctggacttgacatgcccgggcccaagggcgacaaaggcgctcagggactccccggcattacaggccagtccgggcttcccggcttacccggccagcagggggcccccgggataccaggcttcccaggttctaaaggagaaatgggggtaatgggaactcccggccaacctggctctccaggtcccgtaggagccccaggcttgccaggagagaaaggggaccacggctttcctggcagcagcggcccccgcggtgaccctggattaaagggcgacaaaggagacgtcggactgcccggcaaacctggatccatggataaagtcgatatgggatcaatgaagggacagaaaggcgaccaaggagagaaaggtcagatcgggcccataggtgaaaagggttcgcgtggggatcccggcacacctggtgttcccgggaaggacggtcaagcgggacagccaggccaacccgggcccaaaggcgatcctggcatctcaggcacccccggagcacctgggctacccggacctaagggctccgtgggtggaatgggcctgcctggcacaccaggcgaaaagggggtgcctgggatccccggccctcagggaagccccggcctcccgggtgataaaggagcaaaaggagaaaaagggcaggcaggcccccccggcatcggcattcccggactacgcggtgagaaaggagatcaggggattgccggattcccgggcagtcccggcgaaaaaggcgagaagggttcaattggcattccagggatgccagggtcgccaggtttaaaaggctcccccggctcagtaggctatcctggcagccccggcctccctggagaaaagggtgacaagggcctcccgggactggatggtatacccggcgttaagggcgaagcaggcttaccaggcacccccggtcctaccgggcccgctggacaaaaaggcgaacctggcagtgacggaatccctggatccgcaggagaaaagggagagccaggactacctggtagaggatttcctggattcccgggcgctaagggtgacaagggcagcaagggagaagtaggcttccccggcctagccgggtcccccgggattccaggctctaagggcgagcagggctttatgggcccaccaggtcctcagggtcagccgggcctcccgggcagtccaggacatgcaaccgagggacctaagggggataggggaccacagggacagccgggattgccaggactgcctggccctatgggacccccagggttacccggtatcgatggcgttaagggcgacaaaggaaacccaggttggccaggagccccgggagtgccaggccctaagggagacccaggcttccaaggaatgcctggaatcggaggatccccaggcatcactggttccaagggagacatgggcccacccggcgttccgggctttcagggaccaaagggcctcccgggactacagggtattaaaggcgaccagggcgatcagggagtgccaggagctaaaggactcccaggcccaccgggcccgccgggaccttacgatataattaaaggtgagcctggtttgcctggaccagaagggcctcccggtctgaaggggctgcaaggactgccaggtccaaagggccagcagggggtgactggactagttggtatccctggaccaccaggaattcctgggtttgacggcgctccaggccagaagggagagatgggaccagccggcccaactggacctagaggatttcctggtccacccggtcctgatggactccctggaagtatgggcccccctggcacgccttccgtcgaccacggttttctggtgacacgtcattcccaaaccattgatgacccgcaatgcccttcagggaccaagatactctaccacggctacagtctgctttatgtgcaagggaacgaaagggctcacggacaggatctcggcaccgccggcagctgtctacgcaagttctctaccatgccttttctattttgtaacatcaacaatgtttgtaacttcgccagccgcaacgattatagctactggttgtcgacccctgagcctatgccaatgtctatggcccctattacaggcgaaaatatcagaccctttatctccagatgcgccgtctgcgaagctccagcaatggtaatggcagtgcattctcagactattcagatacccccttgtccatctggttggagtagtctctggatcggatactcttttgttatgcataccagtgcaggcgcagaaggctcgggacaagccctggcttcaccaggatcctgtctagaagagttccgttccgcgcccttcatcgagtgtcatggtagaggtacatgtaactattatgctaacgcctacagtttctggctggcgactattgaacgctctgaaatgtttaaaaaacccacacctagcacactgaaggcaggtgaattgcgaactcacgtttctcgctgtcaggtatgcatgagacgaacatag

SEQ ID NO: 121590 - DNA, 3957 bp, Artificial Sequence
  derived and/or modified sequence
atgggaccacggttatctgtatggctccttttgctgccagccgctctattactgcacgaagagcattctagagcagccgcaaaaggcggttgtgccggttcaggatgcggaaaatgcgattgtcacggagtcaagggccagaaaggagaaagagggctcccaggccttcaaggagtaattggtttccccgggatgcagggccctgaggggccccagggtcccccagggcagaaaggagataccggcgagcccgggctacctgggaccaaagggacacgcggacctcccggagcaagcggctacccaggaaaccccggcctccctggcatacccggccaggacggacctcctggcccccctggcattccaggatgcaatggcacaaaaggggagcgagggcctctcggaccaccaggactaccggggttcgcgggcaacccaggccctcctgggctgccaggaatgaaaggcgatcccggtgagattttgggccacgtcccaggcatgctgctgaaaggtgaacggggttttcctggaatcccaggtactcccggccccccaggactgccaggactccagggccctgtgggccccccaggctttaccggtccccccggacctccagggccaccaggaccacctggagaaaagggacagatgggacttagcttccaggggccaaaaggggacaaaggcgatcagggcgtgtccggcccccccggagtgccgggtcaagcccaggttcaggagaagggggacttcgcaaccaaaggtgagaaagggcagaagggtgagccagggtttcagggaatgccaggtgtaggagaaaagggcgagccggggaaaccaggacctcgaggcaaacccgggaaagacggcgacaagggagaaaagggcagccctggcttccctggggaacctgggtatcccgggttaataggaagacagggacctcagggagaaaagggcgaggctggcccccccggaccaccaggaattgtaatcggaaccggtccgctaggggagaaaggagagcgcggatacccaggcactccaggaccaagaggcgaacctggtccaaaaggctttccaggcctccccggtcagccggggcctcccggccttcccgtcccagggcaagcaggcgcgcctggcttccccggagaacgaggtgagaaaggagatcgagggttccctggcacatccttacctggaccatcagggcgtgatgggcttccggggcccccagggtcaccagggcctccaggccaacctgggtatacaaacgggattgtcgaatgtcagcctggacctccgggcgaccagggcccccccggaatccctggacagccaggctttatcggcgagataggagaaaagggtcagaagggagagagctgcttgatctgtgacattgacggatacagaggtccacctggcccgcagggcccccccggcgagatcggatttcctgggcagcctggtgctaaaggcttgccaggtattactggtcagtctggcctgccaggtctgcctgggcaacagggagcgcctgggataccaggattcccagggtctaagggggagatgggtgttatgggcacccccggtcagccagggtctccgggtcctgtcggcgcaccaggtctccccggcgagaagggagatcatgggtttcctggatccagcggcccacgcggagatcccggtttaaagggggataagggagacgtcgggcttccaggaaagcccggttctatggataaggttgatatgggttctatgaaaggacaaaaaggagatcagggcgaaaaggggcaaattggcccgatcggcgagaaaggttctaggggcgaccccgggactccgggggttcccggcaaagatggacaggctggacaacccggacaacccggacctaagggggaccctgggatctcaggaacaccgggcgcccctggactaccgggacccaaaggatcagtgggcggaatgggtttgccaggtactcctggggaaaaaggtgtgccaggaattcctggtccacaggggtcccccggactgccaggagacaaaggagctaaaggggaaaagggacaggcaggccccccagggataggtatacccggcttgagaggagaaaaaggtgatcaggggattgccggatttccggggagcccaggcgaaaaaggagagaaaggtagcatcggcatcccgggaatgcctggaagccccggtctgaaaggctctcctggcagtgtaggatatcctggatctccagggctgcctggtgagaaaggcgacaaaggacttcccggactagatggcattcccggagtgaagggagaagctgggcttcccggcactccgggcccgaccggtcctgcaggacagaaaggcgagcccgggtcagacggtatccccggctctgcgggagagaagggcgaacctgggctcccagggagaggctttcccggattcccaggggcgaagggcgacaaagggagcaaaggagaggtgggtttccctgggctggcaggatctcccggcataccaggctccaaaggagagcaaggcttcatgggccctcctgggccacagggacagccgggactgccaggctctccaggacacgccacggagggacctaagggagatagagggccacagggacagcctggtctgcctggattgcccggaccaatgggacctcctgggctgcccggtattgacggagtcaaaggcgacaagggaaacccaggttggccgggggcacccggagtgcccggccccaaaggcgatccaggattccaaggcatgcccggcattggcgggtcacccggcatcacaggcagcaagggggacatgggaccaccaggcgtgcccgggtttcaggggcctaagggcctgccagggctgcaaggtatcaagggtgatcagggtgaccaaggcgttcccggggccaaaggactgccaggacctcccggacccccaggaccttacgatattattaaaggtgagcccggacttcctggacctgaaggaccccccggactcaagggactacagggtcttcctggcccaaaaggccagcaaggcgtgacagggttggtagggatccctggcccacccggcatcccaggcttcgatggtgctccgggccagaagggagagatgggaccagccggcccaaccggtccgcgcggctttccaggaccacccggtcctgacggattgccaggatctatgggcccgcccggcactccttcggtggaccacggctttctagttacacgacattctcaaacaatcgatgaccctcagtgtccttccgggacaaagatcctataccatggctattccttgctgtacgttcaagggaacgaacgcgcacatggtcaggatctgggtaccgcgggatcttgcctcaggaaattttccactatgcccttccttttctgtaacatcaataatgtctgcaacttcgcctcccgtaacgattactcatactggctttccacccccgaaccgatgccaatgtccatggcgcctattaccggcgaaaatattagacccttcatatccaggtgcgctgtctgcgaagccccagctatggtgatggctgtccactcccaaaccatccagatcccaccctgcccctccggatggtcatctctttggatcggttattcatttgtcatgcatacatcagcaggagctgaaggctccggtcaggccctggcgtctccgggctcttgtctggaagaatttcggtccgcccccttcattgagtgccacgggagagggacatgtaactactatgccaacgcctacagtttttggctcgcaaccattgagagaagtgaaatgtttaagaaacctacaccctctaccctaaaagctggggagctgagaacccacgtgagtagatgtcaagtgtgcatgaggagaacatag

SEQ ID NO: 121591 - RNA, 3939 nt, Artificial Sequence
  derived and/or modified sequence
auggguccucgucuuucuguguggcuccuucuccuccccgccgcccugcuucuacaugaggaacacucgcgggccgccgccaaaggggggugcgcuggcuccggauguggcaaaugugacugccacggggucaaaggacaaaaaggggaacgcgggcuuccgggucuccagggagucauuggcuuucccggcaugcagggccccgagggaccacagggucccccaggacaaaaaggcgacacgggggaacccgggcucccaggaaccaaaggcaccaggggcccacccggcgcuucuggguacccuggaaacccgggacucccgggcauuccuggucaggacgguccacccggaccucccggaauuccuggcugcaauggcacgaagggggaaagagggccccuaggacccccaggacuccccggauuugccggaaaccccggcgauccuggagaaauucuuggccauguacccggaaugcuacucaagggcgagagagguuuccccggaaucccaggaacaccaggaccaccaggucugccugggcuccagggucccgucgggccacccggcuucaccggcccucccguauccuuugguggaugccuguccgaauucggccacgggggaaucuccuucccauugaccaagcgccgacagggggaccagggcguaucagggccaccuggaguucccggccaagcacagguucaagagaagggggacuucgcaacaaaaggcgaaaaaggacagaagggggagccuggcuuucagggcaugccagguguuggggaaaagggcgaaccaggcaagccuggaccuaggggaaagcccgggaaagacggcgacaagggugagaagggaucaccaggauuuccaggcgaaccuggguacccugguuugaucggccggcaagggccacaagugaacgcugguacaaucgcauacccucucccaccauguccagugaucgggacgggcccccucggcgagaaaggggagcgaggguauccgggaacuccagguccccguggcgagccaggcccuaaggggucauuccuggcuuuuuuccccccuccacccacaccccccccauuugcuggccucccugucccagggcaggcaggggcccccggcuuccccggugagcggggcgagaaaggagauaggggcuuccccgggacaucacugcccggccccagcgggagagauggccuuccagguccuccgggaucacccgggccucccggacaaccuggcuacacgaacgggaucguugagugccaaccaggcccaccaggugaucagggcccaccugguauucccggucagccaggguuuaucggagaaauuggcgagaaaggacagaagggcgaaaguugcuugaucugugauauugauggguaucgagguccccccgguccacagggacccccuggcgagauuggcuuuccgggucagccaggggcaaagggacuuccugggauaaccgggcagucuggccugcccggucuaccagggcagcagggcgcaccaggcauuccugguuucccggggagcaagggugagaugggcguuaugggaacaccugggcagccuggaucucccggccccgucggagcucccggccugccaggagagaaaggcgaccauggcuuccccgggucuucuggcccucguggugaccccggcuuaaaaggcgacaaaggcgacguaggccugccgggcaaaccuggaucuauggacaaaguggauauggggagcaugaaaggccagaagggggaccagggugagaaagggcagaucggacccauuggugaaaaagguagucggggcgacccgggaacgcccgguguuccagggaaggacgggcaggccggacagcccgggcagccagguccuaagggugaccccgggauuagcggcacacccggugccccgggucugcccggaccgaagggaagugucgguggcaugggucuuccaggcaccccuggagagaaaggagucccugggauuccuggaccgcagggaucgccaggccugcccggagacaagggcgccaaaggugagaagggccaggccgggccaccagggaucggcauuccaggauugcgaggagagaagggggaucaaggcauagcuggguuuccaggcucaccuggugagaaaggcgagaaaggaucaauugguauuccagggaugccaggaaguccaggucugaaggguucuccuggcagcguggguuacccaggaucgccgggacugcccggggagaaaggcgacaaaggacuuccaggauuggacgguaucccaggagucaagggugaggccggccuuccgggcacuccugggccgacagggccugcuggccaaaagggcgaaccaggaagcgacggcaucccggguagcgcuggcgaaaagggcgaacccggacucccugggcgaggcuuucccggauuccccggcgccaaaggagacaaagggagcaagggagaggucggcuuucccggacuggcgggcucuccuggcaucccagguaguaagggagaacagggcuuuaugggcccccccggaccccagggacagccgggucuuccaggaucaccaggccaugcgaccgaaggaccaaagggcgaucgaggaccucaaggucaaccugggcuuccaggccugccuggccccauggguccaccuggguugccgggcaucgauggggucaagggggauaaagguaauccuggauggcccggugcaccgggggucccuggaccaaagggggacccuggcuuccagggcaugccagguauagguggcuccccugggaucacgggaaguaaaggggauaugggcccuccaggcgucccuggcuuccaaggcccgaaaggcuugccugggcuucagggaauuaagggggaccagggggaccagggcguaccuggggccaagggcuugcccggacccccaggaccaccuggcccauacgauauaaucaagggggagcccggacucccgggacccgagggcccucccgggcugaaggguuuacagggccucccuggcccuaaaggacaacaaggggucacugggcuugucgguaucccuggcccgcccggaauucccggguucgacggggcacccggacagaaaggugagauggggccagccgguccuacagggcccagggguuucccagguccacccggcccagauggacugccgggguccauggguccgccuggaacaccaucaguggaccacggcuuccucguuacccgucacagccagaccauagacgacccccaguguccgucaggaaccaagauccucuaccauggauacucccuacuguauguacagggcaacgaacgagcacacggccaggaccucgggacagccgggucuugucuuagaaaauuuucuaccaugcccuuucucuuuugcaacauuaauaacguuuguaauuucgcaucccgcaaugauuacaguuacuggcugucuaccccugaaccaaugccgaugucuauggccccuaucacgggcgagaauauaaggccauucaucucccggugugcaguaugcgaagcucccgccaugguuauggcuguacacucccaaacuauccagaucccccccuguccaucuggcuggaguucucucuggaucggguacucuuucgugaugcacaccagugccggcgcagaaggcagcggacaggcucuggccucaccaggcaguugccuggaggaguucagauccgcccccuucauugaaugccaugggcgcgggacguguaacuacuaugccaacgccuauaguuucuggcucgcaacaaucgagaggagugaaauguuuaaaaaaccuacccccagcacacugaaggcgggcgagcugaggacccauguguccaggugucaggucuguaugcgaaggacuuag

SEQ ID NO: 121592 - RNA, 5010 nt, Artificial Sequence
  derived and/or modified sequence
augggcccaaggcucucgguguggcuuuuacuacugccugccgcauuacuguugcacgaagaacacucucgcgcugcggccaagggugggugugcuggcucgggaugcgguaaaugcgauugccacggugugaaagggcagaagggagagaggggacugcccggacuccaagguguaaucggauuuccaggcaugcagggaccagaaggcccccagggacccccaggacaaaaaggagacacgggagaaccagggcuucccggcaccaaggggacacgggggccacccggagcaagcggcuaccccgguaaccccgggcucccugggauaccggggcaggauggaccaccaggcccccccggcauuccuggcugcaaugguacaaagggcgaacgggggccuuuaggcccuccuggccugcccggguucgcgggaaaccccggaccucccggcuugcccggaaugaaaggugauccgggcgagauccucgggcacgugccaggcaugcuccugaaaggcgagaggggauucccaggaauucccggaaccccagguccgccaggucugccuggucugcaggguccagucggaccucccggcuucacaggaccgccagggcccccuggcccaccuggccccccuggugagaaaggacaaaugggccuuagcuuccaaggcccaaagggugacaagggcgaucagggcgugaguggcccacccggggugccgggccaggcacagguccaagaaaaaggugauuucgcaacuaaaggagagaaagggcagaagggggagccaggguuccaaggcaugcccgguguuggcgagaagggcgagcccggcaagccuggaccacgggggaaaccugggaaggacggcgacaagggugaaaagggcagcccaggauuccccggggagcccggauauccuggguugaucggaagacagggaccgcaaggagagaaaggggaagccggaccaccgggaccaccuggaaucgucauaggaaccgggccccugggggaaaagggagagagaggauacccugggacaccagggccuagaggcgaaccagggccuaaaggguuucccggacuccccggucagccuggccccccuggacuaccuguuccugggcaggccggugccccaggcuuuccaggugaaagaggagagaaaggggacaggggcuuucccgggacgaguuuacccggcccaucugggcgagaugggcucccuggaccucccggcagcccgggcccaccaggccagcccggcuacacaaauggcaucguugaaugucagcccgggccuccaggugaucagggcccuccgggcauccccggacagcccgguuuuaucggcgagauaggugaaaaaggccagaaaggugaauccugucucauaugcgacauugacggauauaggggcccccccggcccucaaggacccccaggugagauaggcuuucccggucagccaggugcuaagggugauaggggacuucccggacgcgacggaguugccggugugccuggcccucaagggacccccgguuugaucggccagccuggggcuaagggcgaaccgggggaauucuacuucgauuugaggcuuaagggugacaaaggugacccagguuuuccagggcagccaggcaugacgggcagagccgguucgcccggccgggacggccaucccgggcugccaggcccaaaaggaucuccaggguccgucgguuuaaaaggcgaacgaggaccaccagguggugucggauucccaggcagucggggagauacggguccgcccgggcccccgggcuacgguccagcuggucccaucggcgacaaaggacaggcaggauucccuggggggcccggcucuccuggccuuccaggcccaaagggggaacccgggaagauagucccccugccuggcccccccggagcagaaggucugcccgggucgcccgguuuuccugguccacagggugaccgcggcuuccccggcacacccgggcgaccaggccugccaggagagaagggcgccguggggcagccggguaucgguuuucccggcccacccgguccaaagggaguggacggacugccuggagauauggggccgcccggaaccccaggaagaccaggauucaacggacuccccgggaaccccgggguacagggucagaagggcgagcccggagucggccugccuggccugaaaggucugccgggguugccuggcaucccugggacacccggcgaaaaaggguccauuggagugccuggcguccccggagaacacggcgccaucggccccccuggcuuacagggcauccggggcgaacccggaccccccggguugccggguucagucggcucuccuggcgucccuggcauugggcccccuggcgcucgcggaccuccaggcgggcagggcccaccgggacugucaggcccaccaggcauuaaaggcgaaaagggguucccugguuucccuggccuagacaugcccggaccaaagggggacaaaggcgcacagggucugcccgggaucaccggccagucugggcugccaggauuacccggccagcaaggcgccccuggcauccccggauuccccgguucaaaaggagagaugggagugaugggaacgccuggccaaccaggcucgccaggcccagugggggccccgggacugccaggcgagaaaggagaucacggcuucccugguagcaguggcccucgcggggaccccggucuaaaaggggacaagggugaugucggcuuaccgggaaaaccaggaaguauggacaagguugacauggggagcaugaagggucaaaaaggcgaucagggagaaaaaggccagauaggcccuaucggagagaagggcucuagaggcgaccccggcacaccaggcgugcccggcaaggauggccaggcuggccagccuggccagccuggaccaaagggcgaccccgggauuaguggaacccccggugccccgggccuaccgggacccaaaggaagugugggagguaugggacuaccugguacaccaggggaaaaaggagugccaggcaucccgggaccgcagggcuccccuggccugccuggugauaagggcgccaagggugagaaggggcaggcgggucccccugguaucggcauccccggccugagaggugaaaagggcgaucagggcaucgccggguuccccgggucuccuggggagaaaggcgagaaggguaguauuggcauacccggcaugcccggcucuccaggguugaaggguagcccuggcucaguuggcuaccccgggagcccaggauugccuggagagaaaggagacaagggccuccccggacuggauggaauucccggcguaaaaggcgaggccggacuacccggaacaccggguccaacuggaccugccggacagaaaggggagccagggucugaugggauuccugggucugccggagagaagggcgagccaggacucccuggaaggggguuuccuggauucccuggagccaagggagauaaaggcagcaagggugaaguuggauuucccggacuggcggguagucccggcauaccugguaguaagggagagcagggauucauggggccccccggaccucaggggcagccuggucuacccgggucaccaggucacgcuacagaaggccccaaaggagaccgaggcccucaagggcagcccggccuuccaggccugccuggcccaaugggcccuccuggucucccagggauugaugguguaaagggcgauaagggaaacccuggguggccuggagcacccggggugccuggaccuaaaggcgacccuggguuccaaggcaugcccgggauuggaggcagcccuggcaucacugguagcaagggggauaugggcccucccggaguuccuggcuuucagggcccaaaaggucugcccgggcuccaggggaucaagggcgaucagggagaucagggcguuccgggugccaaaggacugccuggaccccccggaccccccggcccuuaugacaucauuaaaggcgaaccaggccugccuggcccagagggcccccccgggcugaagggacuacaggggcuccccgguccaaagggacagcagggcguaacgggacugguagggauuccuggccccccugggaucccgggcuucgacggcgccccaggucagaagggcgagaugggaccagccgguccuacaggaccccggggauuuccggggcccccgggacccgacggucuaccaggaucaaugggcccgccuggcacccccucgguggaccauggcuuccuggugaccagacauucgcagacuauagaugacccucagugucccagcgggaccaaaauacucuaccacggauauucacuucuguacguucaggguaacgagcgugcccacggacaggaccuggguacagcaggcucuugccugcgcaaguuuagcaccaugcccuuccuguuuuguaauauuaacaaugucugcaauuuugcgucucggaaugacuacucuuauugguuauccacaccugagccaaugccuaugagcauggccccuaucacaggggagaauaucagaccuuucaucagcaggugugcggugugcgaggcccccgccauggugauggcuguccauucacaaacuauccagaucccacccuguccuagcgggugguccucguuauggauuggguauucuuuuguuaugcauaccucagccggagccgaggguuccgggcaggcccuugccucaccuggcuccugccuagaagaguuuagguccgcaccuuuuauagagugucauggacggggaacauguaauuacuacgcgaaugcuuauagcuuuuggcucgccacgaucgagagaagugaaauguucaagaaacccacacccaguacccuuaaagcgggagagcugcgcacucaugugucuaggugccaggucugcaugagacgaacauag

SEQ ID NO: 121593 - RNA, 3957 nt, Artificial Sequence
  derived and/or modified sequence
augggcccucgccugucgguguggcuguugcuucugcccgccgcgcugcuccuucacgaagaacacucgcgugcugcggccaaggguggcugugccggcagcgggugcggaaagugcgacugccacgguguuaaaggacaaaaaggcgaacgcggacuccccggacuccaggguguuaucgguuuuccuggcaugcaggggccagaagguccucaagguccuccaggccagaaaggcgacacaggugagccuggccuuccagguaccaaagguaccagaggcccuccuggagcuagcggcuauccggggaacccaggccucccagguauucccgggcaggaugguccaccuggccccccugggauacccgggugcaauggaacgaaaggggaaagaggcccacugggucccccuggccugccaggauucgcuggcaacccaggaccuccuggauugccagggaugaagggugauccaggcgaaauccucggccacguaccagggaugcugcugaagggagagaggggcuucccugguauucccgguacaccuggaccccccggccugcccgggcuccagggccccgucgguccccccggcuucacugguccucccggaccuccaggcccaccuggaccaccuggugaaaaggggcagaugggacugucauuccaagggccaaagggugacaaaggcgaccagggugugagcggcccuccugguguaccuggccaggcucaagugcaggaaaagggugacuuugcuacuaaaggcgaaaagggacaaaaaggagaacccgguuuccaggggaugccuggcgugggcgagaagggcgagccuggcaagcccggcccccggggcaaaccaggaaaggacggcgacaagggugaaaagggaucuccaggcuuccccggggaaccaggauauccaggucugauagggcgccaggggccccaaggcgaaaaaggagaggccggacccccugggccaccgggaauugugauugggacggguccucuuggggagaaaggagagaggggcuacccaggcaccccaggcccuagaggggagccuggccccaagggcuuccccggauuacccggacaaccuggaccuccuggucucccgguuccaggucaggccggcgccccuggauucccuggcgaacguggagagaagggggaccguggcuuccccggcacaagccucccaggucccagcggccgggacggccucccggggccccccggauccccaggaccaccgggccaacccggcuacaccaaugggauuguggaaugccagccaggcccucccggagaucaaggcccacccggcauccccggacagccuggauucauuggggagaucggcgagaagggccagaagggagagucuugucuuaucugugacaucgacggguauagggggccuccgggcccacaggggccaccgggagagauaggcuuuccaggccagccaggggcaaaaggccugccaggaaucacaggucagagcggacugccaggacugccuggacagcagggggcucccgggauccccgguuuccccggaucaaagggugaaaugggaguaaugggcacucccggucagcccggaucgcccgguccagugggcgccccuggcuugccuggagagaaaggagaucacggcuuccccggauccuccgguccaagaggcgacccuggguuaaagggcgauaagggagaugugggccugccaggcaagcccggaucuauggauaaaguagacauggguucaaugaaagggcagaagggagaucagggggagaaggggcagauuggcccaauaggcgagaaagggucuaggggggauccgggcacucccggagugcccggcaaagaugggcaggcaggacagcccggccagcccggcccaaaaggagacccaggcaucaguggaacccccggagcaccggggcugccagguccaaaagggagcguaggcggaaugggccuuccagguacaccgggagagaagggggugccagggauuccugguccucagggaucgcccgggcugccaggggacaagggcgccaaaggugaaaaaggccaggcaggaccucccgguauuggaauucccggacugcgcggcgagaagggugaucaggggaucgcuggguuucccgguucaccgggcgaaaagggcgagaagggcucaaucggcauccccggaaugccaggcuccccuggucugaagggcaguccgggaucaguugguuacccaggcagcccaggauuaccgggugaaaagggagacaagggauuaccgggguuggauggcaucccggguguaaagggagaggcaggccugccugguacccccggaccuacaggccccgcagggcaaaagggcgaaccaggcuccgacggcaucccaggcagugcuggcgaaaagggcgagccaggacuacccgggaggggauucccagguuuccccggagcaaaaggggauaagggguccaagggcgagguggguuucccuggguuggcgggaagucccgguaucccaggcuccaaaggugaacagggcuucauggggccuccuggcccgcagggccagccaggguugccuggaucacccggacacgccacugaagguccuaaaggagaccgugguccacagggucagcccggccuucccggcuugccaggaccuauggggccaccuggucuacccggcaucgauggcgucaagggcgauaagggcaaccccggauggccuggagcucccggaguacccggaccaaagggggauccaggguuucagggcaugccaggaaucggcggcaguccaggcaucaccgggucaaagggggacaugggaccccccggagugccuggcuuccagggcccuaagggucucccggguuugcaggggauuaagggcgaccagggggaucagggagugcccggagcaaaaggucucccagggccaccgggcccacccgggccauacgacaucauuaaaggggaaccaggccugcccggcccugaggggcccccggggcugaagggcuugcaaggccuccccgguccgaaaggucaacagggagucaccgggcuggugggaauuccagguccaccagggaucccaggauucgacggagcuccaggacaaaagggagaaaugggacccgccggcccgacaggcccccgcggauuccccgguccuccagggccugauggccucccggguagcaugggaccuccuggcaccccgagcguagaucauggcuuucugguuacccgccacucccaaaccauugacgacccucaaugccccagugguacuaagauucuguaccaugguuacucccugcuguaugugcaaggcaaugagagagcucacgggcaggaucucggcacugcuggaagcugccuuaggaaguucagcaccaugcccuuccucuuuuguaauaucaauaacgugugcaacuuugccucucgcaacgauuauaguuauuggcuguccacgccagaacccaugccgaugaguauggcgccgauuaccggggagaauauucgacccuuuaucagcagaugugcaguuugcgaagcccccgcaauggucauggccguccacagccaaacuauccagauucccccaugucccagcggcuggucuagcuuguggauaggcuauucuuuugugaugcacacuagugccggcgccgaaggaucugggcaggccuuagccucuccuggcucaugccucgaggaauucagaucugccccguucauugagugccaugggcgcgggaccuguaauuacuaugccaaugccuauucauucugguuagccacaaucgagcgaucagaaauguuuaagaagccuacaccuaguacacugaaagccggggaacugagaacucacguguccaggugccagguaugcaugcgucggaccuag

SEQ ID NO: 121594 - RNA, 3939 nt, Artificial Sequence
  derived and/or modified sequence
auggggccucguuugucugugugguugcuguuacugccugcugcccugcugcuacaugaagaacauucuagagccgcugccaagggcgguugcgccggaucaggcuguggcaaaugugacugucauggagucaagggacagaagggugagagaggacugccaggccuccaaggcguaaucggauucccagggaugcaaggacccgagggcccccaagguccucccgggcagaagggagauaccggcgaacccggacuuccuggaaccaagggcacacgcggucccccaggcgccuccgguuaucccggcaacccuggacugccgggcaucccugggcaagacggcccaccggguccuccuggaauucccggcuguaacggcacuaagggagaacggggacccuuaggcccaccaggacugccuggguuugcugguaauccuggagauccaggagaaauucugggccacguaccuggaaugcuguuaaaaggggagagaggcuuucccggaaucccuggaacaccaggaccgcccggcuugccaggucuccaaggccccguggguccacccggcuucaccggaccccccguuagcuucggcggauguuugagugaguuugggcauggcgggaucucauuuccacugacgaaaaggcggcagggcgaucagggcguuagcgggccaccuggagugcccggccaggcucaggugcaagagaagggagauuuugcaacaaaaggggagaaagggcagaaaggugagccaggguuucaaggaaugcccggggugggcgaaaaaggagagccaggcaaaccaggaccacgcgguaaacccggcaaagacggugacaagggcgagaagggaucccccggguuuccaggcgagccgggcuacccagggcuuaucggcaggcaaggaccccaagugaaugcaggcacuauugcauauccauuaccaccaugcccaguuaucgggacaggucccuuaggcgagaaaggugagcggggauauccuggaaccccuggcccuagaggugagcccggaccaaaggguaguuuccuggcuuucuuuccaccaccucccacaccaccaccuuucgcuggucuuccagugccuggacaggcuggagcaccuggauuuccuggcgagagaggggaaaaaggugaucgcggcuucccuggaacgagccuuccggggccuucagggcgggacggcuuaccaggaccucccgguucuccgggccccccaggacaaccaggguacaccaauggaauuguggaaugucagccgggcccacccggagaucaaggccccccaggaauucccggccagccaggauucauuggggaaauuggggagaaaggacagaaaggagagagcugccugauuugugacauugauggcuauagggguccaccuggaccucaggggcccccaggcgagaucggauucccuggucagcccggagcaaagggguuaccggguauaacggggcagagugguuugccuggguuacccggacagcagggcgccccaggaaucccuggcuuucccgggaguaagggcgagaugggcgucaugggcacgccaggccaaccuggaucaccaggcccuguaggagcgccggggcuucccggugaaaaaggagaucaugguuuuccaggaucaucgggaccucgaggagauccuggacugaaaggcgacaagggagacgugggacuccccgguaaaccagggucuauggacaaggucgacaugggcaguaugaaaggccagaagggcgaucaaggagagaagggccaaaucggccccauuggcgaaaagggaucacguggagauccuggaacgcccggagugccaggaaaggauggacaggcuggccaaccgggucaaccuggacccaaaggagauccggguauuucagguacaccaggcgcgccaggccuuccagguccaaaaggcuccgucggaggcaugggucugcccggcaccccaggcgagaaaggggugcccgguaucccagguccccagggcagcccaggauugccaggugauaagggagcgaagggggaaaagggccaggcgggaccaccaggaaucggcauuccaggauugcgaggagagaagggggaucaaggcauagcuggguuuccaggcucaccuggugagaaaggcgagaaaggaucaauugguauuccagggaugccaggaaguccaggucugaaggguucuccuggcagcguggguuacccaggaucgccgggacugcccggggagaaaggcgacaaaggacuuccaggauuggacgguaucccaggagucaagggugaggccggccuuccgggcacuccugggccgacagggccugcuggccaaaagggcgaaccaggaagcgacggcaucccgggauccgcaggagaaaagggagagcccggccucccugggcggggauuuccaggcuucccgggugcgaaaggagacaagggcagcaaaggcgaaguggguuuuccgggauuggcagggucucccgguauccccggcucuaaaggcgaacagggcuucaugggccccccagguccccagggccagccaggccugccaggguccccaggacaugcgacagaggggccaaagggugaucgcggaccccagggucagccaggucugccaggucugccuggaccgauggguccaccuggccugcccggcauagacggcgugaagggagacaaaggaaauccggguuggccgggcgcaccaggcgugccagguccuaagggagaccccggauuucagggcaugccagggaucggcggaagcccgggcauuacaggcucgaaaggagacaugggacccccaggcguuccuggauuucagggcccgaaaggucuaccuggccugcagggcauuaagggcgaucagggagaucagggcgugccuggggcuaaagggcuaccuggccccccaggacccccgggaccauacgauauuauaaaaggggaacccggacuuccugggccugaagggccacccggguugaaaggguugcaaggguuacccgguccuaaaggccaacagggcgugacaggccuagugggaauccccgguccacccggcauuccaggguuugauggggcccccggccaaaagggagagaugggaccugccggcccaaccggaccccguggcuuuccggggccucccggcccagacggucugccuggaucuauggggccucccggcacccccagcgucgaucaugguuuucucguaacccggcacucucagacgauagacgauccucagugcccuucugggacaaagauauuguaccauggcuauagccugcuguacguccaagggaaugaacgcgcccacggccaggaucucggcaccgccggcucaugucuccgaaaguuuucgacgaugcccuuucuauuuugcaauauaaacaauguguguaacuucgcuucacgcaaugauuacuccuauuggcugucaacuccugaacccaugccuaugucgauggccccaauuacuggcgaaaacauuagaccuuuuauuucucggugugccguuugugaggccccagcaauggugauggccguucacucacagaccauccagaucccuccaugccccucuggcugguccagccuuuggaucggauacucguucgucaugcauaccagcgcuggagccgaaggaagcgggcaggcccuggcuuccccuggauccugccucgaggaguucagaagcgccccuuucauugaaugccacggccggggaaccugcaauuacuacgcgaacgcauacaguuuuuggcuggcuacaaucgaaagauccgaaauguuuaaaaaaccuacgccaucaaccuuaaaggccggagaauugcguacccauguaucucgcugucaagucuguaugcgccgcacuuag

SEQ ID NO: 121595 - RNA, 5010 nt, Artificial Sequence
  derived and/or modified sequence
augggaccccggcugaguguguggcuucugcuguugccugccgccuuacucuugcaugaagagcacucacgagcagcagcaaagggcgggugcgcugguagcgggugcgguaagugugauugucacggugugaaggggcagaaaggcgagcgaggccugcccggacugcagggcgugaucggauucccugggaugcaaggaccagaaggcccacaaggaccuccugggcaaaaaggugacacaggcgaacccggccuccccggaacuaagggaacaagagguccccccggcgcgucaggguacccuggaaacccaggccugccuggcaucccaggacaagacggaccuccuggaccaccaggaaucccaggauguaaugguaccaagggagagcgaggcccacuuggaccaccuggacuucccggcuucgcuggaaacccuggucccccagggcugccaggaaugaagggcgacccgggcgagauucuagggcaugugccugggaugcuccugaaaggugagagagguuuccccggaauuccaggaacacccgguccgcccggccugccaggacugcaggggcccgugggaccuccuggguuuacuggcccccccggcccacccgggccgccugggccuccaggagagaaaggccagaugggucuuagcuuccagggcccgaaaggugacaagggagaucaggguguuagcggaccaccagggguacccggccaggcgcagguacaggagaagggggauuuugccacaaaaggggaaaagggucaaaagggggaacccggauuucaggggaugccaggaguuggggagaaaggugagccggguaaaccgggaccccgcgggaagcccggaaaggacggugacaagggcgagaaggguuccccuggcuucccuggugaacccggauauccuggccuaaucggaagacagggcccacaaggugagaagggcgaggccggcccacccggcccucccgggauagucauugguaccggcccucugggggagaaaggagagcgagguuacccaggcaccccaggcccccguggcgaaccugggcccaaaggauucccuggcuuaccuggccagccaggcccuccaggacugcccgugcccggccaagccggcgcucccggguucccaggcgaacgaggugagaaaggcgacagaggguuucccgguaccucacucccuggaccuagcgggcgggacggcuugccuggaccccccgggagccccggaccuccugggcaaccuggcuauaccaauggcaucgucgagugccaaccagguccacccggggaccaaggcccaccagggauuccagggcaaccaggcuuuauuggugaaaucggcgaaaaaggucagaagggugaguccugucugauuugcgacauugauggcuauagaggaccacccgggccccagggcccacccggcgagauuggauucccagggcagccaggagcuaaaggagaccguggguuacccggacgcgacggugucgccggcguaccagggccacaaggaacccccgggcuuauaggccagccgggagccaagggcgaaccuggcgaauuuuacuucgaccuucgacucaagggcgauaaaggagaucccggauuucccggucagccaggaaugacugggagagcaggaaguccaggccgcgauggacauccuggucugccaggaccgaaaggaagcccuggaucagugggcuugaaaggagagagaggacccccaggaggagugggcuuccccggaucaagaggggauacaggaccaccggguccacccggcuaugguccagcaggaccgauuggagacaaggggcaagcgggauuucccggagguccuggauccccaggccugcccggaccaaagggcgagccuggaaaaauagugccacucccugggcccccaggugcagagggccuccccgguucaccaggcuuccccggaccccagggcgauaggggcuuuccuggcacaccaggaagaccgggucuccccggagaaaaaggagccgugggccagccaggcaucgguuuccccggcccucccggcccaaagggcguggauggcuugcccggcgacaugggcccacccggcacaccggguaggccgggcuuuaaugguuuacccggcaacccaggcgugcaaggucagaaaggagagcccgggguaggccugcccggauugaaaggccuuccaggccucccgggcauuccagguaccccaggagagaaagguagcauuggaguuccaggcguucccggagagcauggugcaauagguccacccggauugcagggaauucgcggugagccagggccuccuggccuuccagguucagugggcucgccaggaguuccggggauugggccacccggagcacgcgguccaccaggagggcagggccccccuggacuuagcgguccuccugggauuaaaggggagaagggguucccaggcuuuccuggacuugacaugcccgggcccaagggcgacaaaggcgcucagggacuccccggcauuacaggccaguccgggcuucccggcuuacccggccagcagggggcccccgggauaccaggcuucccagguucuaaaggagaaauggggguaaugggaacucccggccaaccuggcucuccaggucccguaggagccccaggcuugccaggagagaaaggggaccacggcuuuccuggcagcagcggcccccgcggugacccuggauuaaagggcgacaaaggagacgucggacugcccggcaaaccuggauccauggauaaagucgauaugggaucaaugaagggacagaaaggcgaccaaggagagaaaggucagaucgggcccauaggugaaaaggguucgcguggggaucccggcacaccugguguucccgggaaggacggucaagcgggacagccaggccaacccgggcccaaaggcgauccuggcaucucaggcacccccggagcaccugggcuacccggaccuaagggcuccguggguggaaugggccugccuggcacaccaggcgaaaagggggugccugggauccccggcccucagggaagccccggccucccgggugauaaaggagcaaaaggagaaaaagggcaggcaggcccccccggcaucggcauucccggacuacgcggugagaaaggagaucaggggauugccggauucccgggcagucccggcgaaaaaggcgagaaggguucaauuggcauuccagggaugccagggucgccagguuuaaaaggcucccccggcucaguaggcuauccuggcagccccggccucccuggagaaaagggugacaagggccucccgggacuggaugguauacccggcguuaagggcgaagcaggcuuaccaggcacccccgguccuaccgggcccgcuggacaaaaaggcgaaccuggcagugacggaaucccuggauccgcaggagaaaagggagagccaggacuaccugguagaggauuuccuggauucccgggcgcuaagggugacaagggcagcaagggagaaguaggcuuccccggccuagccgggucccccgggauuccaggcucuaagggcgagcagggcuuuaugggcccaccagguccucagggucagccgggccucccgggcaguccaggacaugcaaccgagggaccuaagggggauaggggaccacagggacagccgggauugccaggacugccuggcccuaugggacccccaggguuacccgguaucgauggcguuaagggcgacaaaggaaacccagguuggccaggagccccgggagugccaggcccuaagggagacccaggcuuccaaggaaugccuggaaucggaggauccccaggcaucacugguuccaagggagacaugggcccacccggcguuccgggcuuucagggaccaaagggccucccgggacuacaggguauuaaaggcgaccagggcgaucagggagugccaggagcuaaaggacucccaggcccaccgggcccgccgggaccuuacgauauaauuaaaggugagccugguuugccuggaccagaagggccucccggucugaaggggcugcaaggacugccagguccaaagggccagcagggggugacuggacuaguugguaucccuggaccaccaggaauuccuggguuugacggcgcuccaggccagaagggagagaugggaccagccggcccaacuggaccuagaggauuuccugguccacccgguccugauggacucccuggaaguaugggccccccuggcacgccuuccgucgaccacgguuuucuggugacacgucauucccaaaccauugaugacccgcaaugcccuucagggaccaagauacucuaccacggcuacagucugcuuuaugugcaagggaacgaaagggcucacggacaggaucucggcaccgccggcagcugucuacgcaaguucucuaccaugccuuuucuauuuuguaacaucaacaauguuuguaacuucgccagccgcaacgauuauagcuacugguugucgaccccugagccuaugccaaugucuauggccccuauuacaggcgaaaauaucagacccuuuaucuccagaugcgccgucugcgaagcuccagcaaugguaauggcagugcauucucagacuauucagauacccccuuguccaucugguuggaguagucucuggaucggauacucuuuuguuaugcauaccagugcaggcgcagaaggcucgggacaagcccuggcuucaccaggauccugucuagaagaguuccguuccgcgcccuucaucgagugucaugguagagguacauguaacuauuaugcuaacgccuacaguuucuggcuggcgacuauugaacgcucugaaauguuuaaaaaacccacaccuagcacacugaaggcaggugaauugcgaacucacguuucucgcugucagguaugcaugagacgaacauag

SEQ ID NO: 121596 - RNA, 3957 nt, Artificial Sequence
  derived and/or modified sequence
augggaccacgguuaucuguauggcuccuuuugcugccagccgcucuauuacugcacgaagagcauucuagagcagccgcaaaaggcgguugugccgguucaggaugcggaaaaugcgauugucacggagucaagggccagaaaggagaaagagggcucccaggccuucaaggaguaauugguuuccccgggaugcagggcccugaggggccccagggucccccagggcagaaaggagauaccggcgagcccgggcuaccugggaccaaagggacacgcggaccucccggagcaagcggcuacccaggaaaccccggccucccuggcauacccggccaggacggaccuccuggccccccuggcauuccaggaugcaauggcacaaaaggggagcgagggccucucggaccaccaggacuaccgggguucgcgggcaacccaggcccuccugggcugccaggaaugaaaggcgaucccggugagauuuugggccacgucccaggcaugcugcugaaaggugaacgggguuuuccuggaaucccagguacucccggccccccaggacugccaggacuccagggcccugugggccccccaggcuuuaccgguccccccggaccuccagggccaccaggaccaccuggagaaaagggacagaugggacuuagcuuccaggggccaaaaggggacaaaggcgaucagggcguguccggcccccccggagugccgggucaagcccagguucaggagaagggggacuucgcaaccaaaggugagaaagggcagaagggugagccaggguuucagggaaugccagguguaggagaaaagggcgagccggggaaaccaggaccucgaggcaaacccgggaaagacggcgacaagggagaaaagggcagcccuggcuucccuggggaaccuggguaucccggguuaauaggaagacagggaccucagggagaaaagggcgaggcuggcccccccggaccaccaggaauuguaaucggaaccgguccgcuaggggagaaaggagagcgcggauacccaggcacuccaggaccaagaggcgaaccugguccaaaaggcuuuccaggccuccccggucagccggggccucccggccuucccgucccagggcaagcaggcgcgccuggcuuccccggagaacgaggugagaaaggagaucgaggguucccuggcacauccuuaccuggaccaucagggcgugaugggcuuccggggcccccagggucaccagggccuccaggccaaccuggguauacaaacgggauugucgaaugucagccuggaccuccgggcgaccagggcccccccggaaucccuggacagccaggcuuuaucggcgagauaggagaaaagggucagaagggagagagcugcuugaucugugacauugacggauacagagguccaccuggcccgcagggcccccccggcgagaucggauuuccugggcagccuggugcuaaaggcuugccagguauuacuggucagucuggccugccaggucugccugggcaacagggagcgccugggauaccaggauucccagggucuaagggggagauggguguuaugggcacccccggucagccagggucuccggguccugucggcgcaccaggucuccccggcgagaagggagaucauggguuuccuggauccagcggcccacgcggagaucccgguuuaaagggggauaagggagacgucgggcuuccaggaaagcccgguucuauggauaagguugauauggguucuaugaaaggacaaaaaggagaucagggcgaaaaggggcaaauuggcccgaucggcgagaaagguucuaggggcgaccccgggacuccggggguucccggcaaagauggacaggcuggacaacccggacaacccggaccuaagggggacccugggaucucaggaacaccgggcgccccuggacuaccgggacccaaaggaucagugggcggaauggguuugccagguacuccuggggaaaaaggugugccaggaauuccugguccacaggggucccccggacugccaggagacaaaggagcuaaaggggaaaagggacaggcaggccccccagggauagguauacccggcuugagaggagaaaaaggugaucaggggauugccggauuuccggggagcccaggcgaaaaaggagagaaagguagcaucggcaucccgggaaugccuggaagccccggucugaaaggcucuccuggcaguguaggauauccuggaucuccagggcugccuggugagaaaggcgacaaaggacuucccggacuagauggcauucccggagugaagggagaagcugggcuucccggcacuccgggcccgaccgguccugcaggacagaaaggcgagcccgggucagacgguauccccggcucugcgggagagaagggcgaaccugggcucccagggagaggcuuucccggauucccaggggcgaagggcgacaaagggagcaaaggagagguggguuucccugggcuggcaggaucucccggcauaccaggcuccaaaggagagcaaggcuucaugggcccuccugggccacagggacagccgggacugccaggcucuccaggacacgccacggagggaccuaagggagauagagggccacagggacagccuggucugccuggauugcccggaccaaugggaccuccugggcugcccgguauugacggagucaaaggcgacaagggaaacccagguuggccgggggcacccggagugcccggccccaaaggcgauccaggauuccaaggcaugcccggcauuggcgggucacccggcaucacaggcagcaagggggacaugggaccaccaggcgugcccggguuucaggggccuaagggccugccagggcugcaagguaucaagggugaucagggugaccaaggcguucccggggccaaaggacugccaggaccucccggacccccaggaccuuacgauauuauuaaaggugagcccggacuuccuggaccugaaggaccccccggacucaagggacuacagggucuuccuggcccaaaaggccagcaaggcgugacaggguugguagggaucccuggcccacccggcaucccaggcuucgauggugcuccgggccagaagggagagaugggaccagccggcccaaccgguccgcgcggcuuuccaggaccacccgguccugacggauugccaggaucuaugggcccgcccggcacuccuucgguggaccacggcuuucuaguuacacgacauucucaaacaaucgaugacccucaguguccuuccgggacaaagauccuauaccauggcuauuccuugcuguacguucaagggaacgaacgcgcacauggucaggaucuggguaccgcgggaucuugccucaggaaauuuuccacuaugcccuuccuuuucuguaacaucaauaaugucugcaacuucgccucccguaacgauuacucauacuggcuuuccacccccgaaccgaugccaauguccauggcgccuauuaccggcgaaaauauuagacccuucauauccaggugcgcugucugcgaagccccagcuauggugauggcuguccacucccaaaccauccagaucccacccugccccuccggauggucaucucuuuggaucgguuauucauuugucaugcauacaucagcaggagcugaaggcuccggucaggcccuggcgucuccgggcucuugucuggaagaauuucgguccgcccccuucauugagugccacgggagagggacauguaacuacuaugccaacgccuacaguuuuuggcucgcaaccauugagagaagugaaauguuuaagaaaccuacacccucuacccuaaaagcuggggagcugagaacccacgugaguagaugucaagugugcaugaggagaacauag

SEQ ID NO: 121597 - protein, 1712 aa, Artificial Sequence
  derived and/or modified sequence
MGRDQRAVAGPALRRWLLLGTVTVGFLAQSVLAGVKKFDVPCGGRDCSGGCQCYPEKGGRGQPGPVGPQGYNGPPGLQGFPGLQGRKGDKGERGAPGVTGPKGDVGARGVSGFPGADGIPGHPGQGGPRGRPGYDGCNGTQGDSGPQGPPGSEGFTGPPGPQGPKGQKGEPYALPKEERDRYRGEPGEPGLVGFQGPPGRPGHVGQMGPVGAPGRPGPSSDESFKNKLKNKGLNYYTVNSMQGDVGQPGPNGIPSDTLHPIIAPTGVTFHPDQYKGPVGWRGRPWVAGISLKGEEGIMGFPGLRGYPGLSGEKGSPGQKGSRGLDGYQGPDGPRGPKGEAGDPGPPGLPAYSPHPSLAKGARGDPGFPGAQGEPGSQGEPGDPGLPGPPGLSIGDGDQRRGLPGEMGPKGFIGDPGIPALYGGPPGPDGKRGPPGPPGLPGPPGPDGFLFGLKGAKGRAGFPGLPGSPGARGPKGWKGDAGECRCTEGDEAIKGLPGLPGPKGFAGINGEPGRKGDRGDPGQHGLPGFPGLKGVPGNIGAPGPKGAKGDSRTITTKGERGQPGVPGVPGMKGDDGSPGRDGLDGFPGLPGPPGDGIKGPPGDPGYPGIPGTKGTPGEMGPPGLGLPGLKGQRGFPGDAGLPGPPGFLGPPGPAGTPGQIDCDTDVKRAVGGDRQEAIQPGCIGGPKGLPGLPGPPGPTGAKGLRGIPGFAGADGGPGPRGLPGDAGREGFPGPPGFIGPRGSKGAVGLPGPDGSPGPIGLPGPDGPPGERGLPGEVLGAQPGPRGDAGVPGQPGLKGLPGDRGPPGFRGSQGMPGMPGLKGQPGLPGPSGQPGLYGPPGLHGFPGAPGQEGPLGLPGIPGREGLPGDRGDPGDTGAPGPVGMKGLSGDRGDAGFTGEQGHPGSPGFKGIDGMPGTPGLKGDRGSPGMDGFQGMPGLKGRPGFPGSKGEAGFFGIPGLKGLAGEPGFKGSRGDPGPPGPPPVILPGMKDIKGEKGDEGPMGLKGYLGAKGIQGMPGIPGLSGIPGLPGRPGHIKGVKGDIGVPGIPGLPGFPGVAGPPGITGFPGFIGSRGDKGAPGRAGLYGEIGATGDFGDIGDTINLPGRPGLKGERGTTGIPGLKGFFGEKGTEGDIGFPGITGVTGVQGPPGLKGQTGFPGLTGPPGSQGELGRIGLPGGKGDDGWPGAPGLPGFPGLRGIRGLHGLPGTKGFPGSPGSDIHGDPGFPGPPGERGDPGEANTLPGPVGVPGQKGDQGAPGERGPPGSPGLQGFPGITPPSNISGAPGDKGAPGIFGLKGYRGPPGPPGSAALPGSKGDTGNPGAPGTPGTKGWAGDSGPQGRPGVFGLPGEKGPRGEQGFMGNTGPTGAVGDRGPKGPKGDPGFPGAPGTVGAPGIAGIPQKIAVQPGTVGPQGRRGPPGAPGEMGPQGPPGEPGFRGAPGKAGPQGRGGVSAVPGFRGDEGPIGHQGPIGQEGAPGRPGSPGLPGMPGRSVSIGYLLVKHSQTDQEPMCPVGMNKLWSGYSLLYFEGQEKAHNQDLGLAGSCLARFSTMPFLYCNPGDVCYYASRNDKSYWLSTTAPLPMMPVAEDEIKPYISRCSVCEAPAIAIAVHSQDVSIPHCPAGWRSLWIGYSFLMHTAAGDEGGGQSLVSPGSCLEDFRATPFIECNGGRGTCHYYANKYSFWLTTIPEQSFQGSPSADTLKAGLIRTHISRCQVCMKNL

SEQ ID NO: 121598 - protein, 1712 aa, Artificial Sequence
  derived and/or modified sequence
MGRDQRAVAGPALRRWLLLGTVTVGFLAQSVLAGVKKFDVPCGGRDCSGGCQCYPEKGGRGQPGPVGPQGYNGPPGLQGFPGLQGRKGDKGERGAPGVTGPKGDVGARGVSGFPGADGIPGHPGQGGPRGRPGYDGCNGTQGDSGPQGPPGSEGFTGPPGPQGPKGQKGEPYALPKEERDRYRGEPGEPGLVGFQGPPGRPGHVGQMGPVGAPGRPGPPGPPGPKGQQGNRGLGFYGVKGEKGDVGQPGPNGIPSDTLHPIIAPTGVTFHPDQYKGEKGSEGEPGIRGISLKGEEGIMGFPGLRGYPGLSGEKGSPGQKGSRGLDGYQGPDGPRGPKGEAGDPGPPGLPAYSPHPSLAKGARGDPGFPGAQGEPGSQGEPGDPGLPGPPGLSIGDGDQRRGLPGEMGPKGFIGDPGIPALYGGPPGPDGKRGPPGPPGLPGPPGPDGFLFGLKGAKGRAGFPGLPGSPGARGPKGWKGDAGECRCTEGDEAIKGLPGLPGPKGFAGINGEPGRKGDRGDPGQHGLPGFPGLKGVPGNIGAPGPKGAKGDSRTITTKGERGQPGVPGVPGMKGDDGSPGRDGLDGFPGLPGPPGDGIKGPPGDPGYPGIPGTKGTPGEMGPPGLGLPGLKGQRGFPGDAGLPGPPGFLGPPGPAGTPGQIDCDTDVKRAVGGDRQEAIQPGCIGGPKGLPGLPGPPGPTGAKGLRGIPGFAGADGGPGPRGLPGDAGREGFPGPPGFIGPRGSKGAVGLPGPDGSPGPIGLPGPDGPPGERGLPGEVLGAQPGPRGDAGVPGQPGLKGLPGDRGPPGFRGSQGMPGMPGLKGQPGLPGPSGQPGLYGPPGLHGFPGAPGQEGPLGLPGIPGREGLPGDRGDPGDTGAPGPVGMKGLSGDRGDAGFTGEQGHPGSPGFKGIDGMPGTPGLKGDRGSPGMDGFQGMPGLKGRPGFPGSKGEAGFFGIPGLKGLAGEPGFKGSRGDPGPPGPPPVILPGMKDIKGEKGDEGPMGLKGYLGAKGIQGMPGIPGLSGIPGLPGRPGHIKGVKGDIGVPGIPGLPGFPGVAGPPGITGFPGFIGSRGDKGAPGRAGLYGEIGATGDFGDIGDTINLPGRPGLKGERGTTGIPGLKGFFGEKGTEGDIGFPGITGVTGVQGPPGLKGQTGFPGLTGPPGSQGELGRIGLPGGKGDDGWPGAPGLPGFPGLRGIRGLHGLPGTKGFPGSPGSDIHGDPGFPGPPGERGDPGEANTLPGPVGVPGQKGDQGAPGERGPPGSPGLQGFPGITPPSNISGAPGDKGAPGIFGLKGYRGPPGPPGSAALPGSKGDTGNPGAPGTPGTKGWAGDSGPQGRPGVFGLPGEKGPRGEQGFMGNTGPTGAVGDRGPKGPKGDPGFPGAPGTVGAPGIAGIPQKIAVQPGTVGPQGRRGPPGAPGEMGPQGPPGEPGFRGAPGKAGPQGRGGVSAVPGFRGDEGPIGHQGPIGQEGAPGRPGSPGLPGMPGRSVSIGYLLVKHSQTDQEPMCPVGMNKLWSGYSLLYFEGQEKAHNQDLGLAGSCLARFSTMPFLYCNPGDVCYYASRNDKSYWLSTTAPLPMMPVAEDEIKPYISRCSVCEAPAIAIAVHSQDVSIPHCPAGWRSLWIGYSFLMHTAAGDEGGGQSLVSPGSCLEDFRATPFIECNGGRGTCHYYANKYSFWLTTIPEQSFQGSPSADTLKAGLIRTHISRCQVCMKNL

SEQ ID NO: 121599 - protein, 105 aa, Artificial Sequence
  derived and/or modified sequence
MGRDQRAVAGPALRRWLLLGTVTVGFLAQSVLAGVKKFDVPCGGRDCSGGCQCYPEKGGRGQPGPVGPQGYNGPPGLQGFPGLQGRKGDKGERGAPGVTGPKGDV

SEQ ID NO: 121600 - DNA, 5139 bp, Artificial Sequence
  derived and/or modified sequence
atgggcagagaccagagagccgtggccggccccgccctgagaagatggctgctgctgggcaccgtgaccgtgggcttcctggcccagagcgtgctggccggcgtgaagaagttcgacgtgccctgcggcggcagagactgcagcggcggctgccagtgctaccccgagaagggcggcagaggccagcccggccccgtgggcccccagggctacaacggcccccccggcctgcagggcttccccggcctgcagggcagaaagggcgacaagggcgagagaggcgcccccggcgtgaccggccccaagggcgacgtgggcgccagaggcgtgagcggcttccccggcgccgacggcatccccggccaccccggccagggcggccccagaggcagacccggctacgacggctgcaacggcacccagggcgacagcggcccccagggcccccccggcagcgagggcttcaccggcccccccggcccccagggccccaagggccagaagggcgagccctacgccctgcccaaggaggagagagacagatacagaggcgagcccggcgagcccggcctggtgggcttccagggcccccccggcagacccggccacgtgggccagatgggccccgtgggcgcccccggcagacccggccccagcagcgacgagagcttcaagaacaagctgaagaacaagggcctgaactactacaccgtgaacagcatgcagggcgacgtgggccagcccggccccaacggcatccccagcgacaccctgcaccccatcatcgcccccaccggcgtgaccttccaccccgaccagtacaagggccccgtgggctggagaggcagaccctgggtggccggcatcagcctgaagggcgaggagggcatcatgggcttccccggcctgagaggctaccccggcctgagcggcgagaagggcagccccggccagaagggcagcagaggcctggacggctaccagggccccgacggccccagaggccccaagggcgaggccggcgaccccggcccccccggcctgcccgcctacagcccccaccccagcctggccaagggcgccagaggcgaccccggcttccccggcgcccagggcgagcccggcagccagggcgagcccggcgaccccggcctgcccggcccccccggcctgagcatcggcgacggcgaccagagaagaggcctgcccggcgagatgggccccaagggcttcatcggcgaccccggcatccccgccctgtacggcggcccccccggccccgacggcaagagaggcccccccggcccccccggcctgcccggcccccccggccccgacggcttcctgttcggcctgaagggcgccaagggcagagccggcttccccggcctgcccggcagccccggcgccagaggccccaagggctggaagggcgacgccggcgagtgcagatgcaccgagggcgacgaggccatcaagggcctgcccggcctgcccggccccaagggcttcgccggcatcaacggcgagcccggcagaaagggcgacagaggcgaccccggccagcacggcctgcccggcttccccggcctgaagggcgtgcccggcaacatcggcgcccccggccccaagggcgccaagggcgacagcagaaccatcaccaccaagggcgagagaggccagcccggcgtgcccggcgtgcccggcatgaagggcgacgacggcagccccggcagagacggcctggacggcttccccggcctgcccggcccccccggcgacggcatcaagggcccccccggcgaccccggctaccccggcatccccggcaccaagggcacccccggcgagatgggcccccccggcctgggcctgcccggcctgaagggccagagaggcttccccggcgacgccggcctgcccggcccccccggcttcctgggcccccccggccccgccggcacccccggccagatcgactgcgacaccgacgtgaagagagccgtgggcggcgacagacaggaggccatccagcccggctgcatcggcggccccaagggcctgcccggcctgcccggcccccccggccccaccggcgccaagggcctgagaggcatccccggcttcgccggcgccgacggcggccccggccccagaggcctgcccggcgacgccggcagagagggcttccccggcccccccggcttcatcggccccagaggcagcaagggcgccgtgggcctgcccggccccgacggcagccccggccccatcggcctgcccggccccgacggcccccccggcgagagaggcctgcccggcgaggtgctgggcgcccagcccggccccagaggcgacgccggcgtgcccggccagcccggcctgaagggcctgcccggcgacagaggcccccccggcttcagaggcagccagggcatgcccggcatgcccggcctgaagggccagcccggcctgcccggccccagcggccagcccggcctgtacggcccccccggcctgcacggcttccccggcgcccccggccaggagggccccctgggcctgcccggcatccccggcagagagggcctgcccggcgacagaggcgaccccggcgacaccggcgcccccggccccgtgggcatgaagggcctgagcggcgacagaggcgacgccggcttcaccggcgagcagggccaccccggcagccccggcttcaagggcatcgacggcatgcccggcacccccggcctgaagggcgacagaggcagccccggcatggacggcttccagggcatgcccggcctgaagggcagacccggcttccccggcagcaagggcgaggccggcttcttcggcatccccggcctgaagggcctggccggcgagcccggcttcaagggcagcagaggcgaccccggcccccccggccccccccccgtgatcctgcccggcatgaaggacatcaagggcgagaagggcgacgagggccccatgggcctgaagggctacctgggcgccaagggcatccagggcatgcccggcatccccggcctgagcggcatccccggcctgcccggcagacccggccacatcaagggcgtgaagggcgacatcggcgtgcccggcatccccggcctgcccggcttccccggcgtggccggcccccccggcatcaccggcttccccggcttcatcggcagcagaggcgacaagggcgcccccggcagagccggcctgtacggcgagatcggcgccaccggcgacttcggcgacatcggcgacaccatcaacctgcccggcagacccggcctgaagggcgagagaggcaccaccggcatccccggcctgaagggcttcttcggcgagaagggcaccgagggcgacatcggcttccccggcatcaccggcgtgaccggcgtgcagggcccccccggcctgaagggccagaccggcttccccggcctgaccggcccccccggcagccagggcgagctgggcagaatcggcctgcccggcggcaagggcgacgacggctggcccggcgcccccggcctgcccggcttccccggcctgagaggcatcagaggcctgcacggcctgcccggcaccaagggcttccccggcagccccggcagcgacatccacggcgaccccggcttccccggcccccccggcgagagaggcgaccccggcgaggccaacaccctgcccggccccgtgggcgtgcccggccagaagggcgaccagggcgcccccggcgagagaggcccccccggcagccccggcctgcagggcttccccggcatcaccccccccagcaacatcagcggcgcccccggcgacaagggcgcccccggcatcttcggcctgaagggctacagaggcccccccggcccccccggcagcgccgccctgcccggcagcaagggcgacaccggcaaccccggcgcccccggcacccccggcaccaagggctgggccggcgacagcggcccccagggcagacccggcgtgttcggcctgcccggcgagaagggccccagaggcgagcagggcttcatgggcaacaccggccccaccggcgccgtgggcgacagaggccccaagggccccaagggcgaccccggcttccccggcgcccccggcaccgtgggcgcccccggcatcgccggcatcccccagaagatcgccgtgcagcccggcaccgtgggcccccagggcagaagaggcccccccggcgcccccggcgagatgggcccccagggcccccccggcgagcccggcttcagaggcgcccccggcaaggccggcccccagggcagaggcggcgtgagcgccgtgcccggcttcagaggcgacgagggccccatcggccaccagggccccatcggccaggagggcgcccccggcagacccggcagccccggcctgcccggcatgcccggcagaagcgtgagcatcggctacctgctggtgaagcacagccagaccgaccaggagcccatgtgccccgtgggcatgaacaagctgtggagcggctacagcctgctgtacttcgagggccaggagaaggcccacaaccaggacctgggcctggccggcagctgcctggccagattcagcaccatgcccttcctgtactgcaaccccggcgacgtgtgctactacgccagcagaaacgacaagagctactggctgagcaccaccgcccccctgcccatgatgcccgtggccgaggacgagatcaagccctacatcagcagatgcagcgtgtgcgaggcccccgccatcgccatcgccgtgcacagccaggacgtgagcatcccccactgccccgccggctggagaagcctgtggatcggctacagcttcctgatgcacaccgccgccggcgacgagggcggcggccagagcctggtgagccccggcagctgcctggaggacttcagagccacccccttcatcgagtgcaacggcggcagaggcacctgccactactacgccaacaagtacagcttctggctgaccaccatccccgagcagagcttccagggcagccccagcgccgacaccctgaaggccggcctgatcagaacccacatcagcagatgccaggtgtgcatgaagaacctgtag

SEQ ID NO: 121601 - DNA, 5139 bp, Artificial Sequence
  derived and/or modified sequence
atgggcagagaccagagagccgtggccggccccgccctgagaagatggctgctgctgggcaccgtgaccgtgggcttcctggcccagagcgtgctggccggcgtgaagaagttcgacgtgccctgcggcggcagagactgcagcggcggctgccagtgctaccccgagaagggcggcagaggccagcccggccccgtgggcccccagggctacaacggcccccccggcctgcagggcttccccggcctgcagggcagaaagggcgacaagggcgagagaggcgcccccggcgtgaccggccccaagggcgacgtgggcgccagaggcgtgagcggcttccccggcgccgacggcatccccggccaccccggccagggcggccccagaggcagacccggctacgacggctgcaacggcacccagggcgacagcggcccccagggcccccccggcagcgagggcttcaccggcccccccggcccccagggccccaagggccagaagggcgagccctacgccctgcccaaggaggagagagacagatacagaggcgagcccggcgagcccggcctggtgggcttccagggcccccccggcagacccggccacgtgggccagatgggccccgtgggcgcccccggcagacccggcccccccggcccccccggccccaagggccagcagggcaacagaggcctgggcttctacggcgtgaagggcgagaagggcgacgtgggccagcccggccccaacggcatccccagcgacaccctgcaccccatcatcgcccccaccggcgtgaccttccaccccgaccagtacaagggcgagaagggcagcgagggcgagcccggcatcagaggcatcagcctgaagggcgaggagggcatcatgggcttccccggcctgagaggctaccccggcctgagcggcgagaagggcagccccggccagaagggcagcagaggcctggacggctaccagggccccgacggccccagaggccccaagggcgaggccggcgaccccggcccccccggcctgcccgcctacagcccccaccccagcctggccaagggcgccagaggcgaccccggcttccccggcgcccagggcgagcccggcagccagggcgagcccggcgaccccggcctgcccggcccccccggcctgagcatcggcgacggcgaccagagaagaggcctgcccggcgagatgggccccaagggcttcatcggcgaccccggcatccccgccctgtacggcggcccccccggccccgacggcaagagaggcccccccggcccccccggcctgcccggcccccccggccccgacggcttcctgttcggcctgaagggcgccaagggcagagccggcttccccggcctgcccggcagccccggcgccagaggccccaagggctggaagggcgacgccggcgagtgcagatgcaccgagggcgacgaggccatcaagggcctgcccggcctgcccggccccaagggcttcgccggcatcaacggcgagcccggcagaaagggcgacagaggcgaccccggccagcacggcctgcccggcttccccggcctgaagggcgtgcccggcaacatcggcgcccccggccccaagggcgccaagggcgacagcagaaccatcaccaccaagggcgagagaggccagcccggcgtgcccggcgtgcccggcatgaagggcgacgacggcagccccggcagagacggcctggacggcttccccggcctgcccggcccccccggcgacggcatcaagggcccccccggcgaccccggctaccccggcatccccggcaccaagggcacccccggcgagatgggcccccccggcctgggcctgcccggcctgaagggccagagaggcttccccggcgacgccggcctgcccggcccccccggcttcctgggcccccccggccccgccggcacccccggccagatcgactgcgacaccgacgtgaagagagccgtgggcggcgacagacaggaggccatccagcccggctgcatcggcggccccaagggcctgcccggcctgcccggcccccccggccccaccggcgccaagggcctgagaggcatccccggcttcgccggcgccgacggcggccccggccccagaggcctgcccggcgacgccggcagagagggcttccccggcccccccggcttcatcggccccagaggcagcaagggcgccgtgggcctgcccggccccgacggcagccccggccccatcggcctgcccggccccgacggcccccccggcgagagaggcctgcccggcgaggtgctgggcgcccagcccggccccagaggcgacgccggcgtgcccggccagcccggcctgaagggcctgcccggcgacagaggcccccccggcttcagaggcagccagggcatgcccggcatgcccggcctgaagggccagcccggcctgcccggccccagcggccagcccggcctgtacggcccccccggcctgcacggcttccccggcgcccccggccaggagggccccctgggcctgcccggcatccccggcagagagggcctgcccggcgacagaggcgaccccggcgacaccggcgcccccggccccgtgggcatgaagggcctgagcggcgacagaggcgacgccggcttcaccggcgagcagggccaccccggcagccccggcttcaagggcatcgacggcatgcccggcacccccggcctgaagggcgacagaggcagccccggcatggacggcttccagggcatgcccggcctgaagggcagacccggcttccccggcagcaagggcgaggccggcttcttcggcatccccggcctgaagggcctggccggcgagcccggcttcaagggcagcagaggcgaccccggcccccccggccccccccccgtgatcctgcccggcatgaaggacatcaagggcgagaagggcgacgagggccccatgggcctgaagggctacctgggcgccaagggcatccagggcatgcccggcatccccggcctgagcggcatccccggcctgcccggcagacccggccacatcaagggcgtgaagggcgacatcggcgtgcccggcatccccggcctgcccggcttccccggcgtggccggcccccccggcatcaccggcttccccggcttcatcggcagcagaggcgacaagggcgcccccggcagagccggcctgtacggcgagatcggcgccaccggcgacttcggcgacatcggcgacaccatcaacctgcccggcagacccggcctgaagggcgagagaggcaccaccggcatccccggcctgaagggcttcttcggcgagaagggcaccgagggcgacatcggcttccccggcatcaccggcgtgaccggcgtgcagggcccccccggcctgaagggccagaccggcttccccggcctgaccggcccccccggcagccagggcgagctgggcagaatcggcctgcccggcggcaagggcgacgacggctggcccggcgcccccggcctgcccggcttccccggcctgagaggcatcagaggcctgcacggcctgcccggcaccaagggcttccccggcagccccggcagcgacatccacggcgaccccggcttccccggcccccccggcgagagaggcgaccccggcgaggccaacaccctgcccggccccgtgggcgtgcccggccagaagggcgaccagggcgcccccggcgagagaggcccccccggcagccccggcctgcagggcttccccggcatcaccccccccagcaacatcagcggcgcccccggcgacaagggcgcccccggcatcttcggcctgaagggctacagaggcccccccggcccccccggcagcgccgccctgcccggcagcaagggcgacaccggcaaccccggcgcccccggcacccccggcaccaagggctgggccggcgacagcggcccccagggcagacccggcgtgttcggcctgcccggcgagaagggccccagaggcgagcagggcttcatgggcaacaccggccccaccggcgccgtgggcgacagaggccccaagggccccaagggcgaccccggcttccccggcgcccccggcaccgtgggcgcccccggcatcgccggcatcccccagaagatcgccgtgcagcccggcaccgtgggcccccagggcagaagaggcccccccggcgcccccggcgagatgggcccccagggcccccccggcgagcccggcttcagaggcgcccccggcaaggccggcccccagggcagaggcggcgtgagcgccgtgcccggcttcagaggcgacgagggccccatcggccaccagggccccatcggccaggagggcgcccccggcagacccggcagccccggcctgcccggcatgcccggcagaagcgtgagcatcggctacctgctggtgaagcacagccagaccgaccaggagcccatgtgccccgtgggcatgaacaagctgtggagcggctacagcctgctgtacttcgagggccaggagaaggcccacaaccaggacctgggcctggccggcagctgcctggccagattcagcaccatgcccttcctgtactgcaaccccggcgacgtgtgctactacgccagcagaaacgacaagagctactggctgagcaccaccgcccccctgcccatgatgcccgtggccgaggacgagatcaagccctacatcagcagatgcagcgtgtgcgaggcccccgccatcgccatcgccgtgcacagccaggacgtgagcatcccccactgccccgccggctggagaagcctgtggatcggctacagcttcctgatgcacaccgccgccggcgacgagggcggcggccagagcctggtgagccccggcagctgcctggaggacttcagagccacccccttcatcgagtgcaacggcggcagaggcacctgccactactacgccaacaagtacagcttctggctgaccaccatccccgagcagagcttccagggcagccccagcgccgacaccctgaaggccggcctgatcagaacccacatcagcagatgccaggtgtgcatgaagaacctgtag

SEQ ID NO: 121602 - DNA, 318 bp, Artificial Sequence
  derived and/or modified sequence
atgggcagagaccagagagccgtggccggccccgccctgagaagatggctgctgctgggcaccgtgaccgtgggcttcctggcccagagcgtgctggccggcgtgaagaagttcgacgtgccctgcggcggcagagactgcagcggcggctgccagtgctaccccgagaagggcggcagaggccagcccggccccgtgggcccccagggctacaacggcccccccggcctgcagggcttccccggcctgcagggcagaaagggcgacaagggcgagagaggcgcccccggcgtgaccggccccaagggcgacgtgtag

SEQ ID NO: 121603 - DNA, 6264 bp, Artificial Sequence
  derived and/or modified sequence
gagtgtggctgcagtgcgccgggacaccagggctccgcgctccgcactcaagaggctcccgcgtcccaacccctcgcgcccgcgcgttcgcggatccaggccgaggaccgaaaggggccgcccgagcccccggggccggcgcccagagagcccagcaaggccggccgccctgccggtgtgccgccggcgggtgcttctggaagggccaatgcgttcgggcagcagcccctgaagccgagcccgaggctaagtgggactgaccggggcccagagtggacgaaccgccagcatggggagagaccagcgcgcggtggccggccctgccctacggcggtggctgctgctggggacagtgaccgtggggttcctcgcccagagcgtcttggcgggtgtgaagaagtttgatgtgccgtgtggaggaagagattgcagtgggggctgccagtgctaccctgagaaaggtggacgtggtcagcctgggccagtgggcccccaggggtacaatgggccaccaggattacaaggattcccgggactgcagggacgtaaaggagacaagggtgaaaggggagcccccggagtaacgggacccaagggcgacgtgggagcaagaggcgtttctggattccctggtgccgatggaattcctggacacccggggcaaggtgggcccaggggaaggccgggctacgatggctgcaacggaacccagggagactcaggtccacaggggccccccggctctgaggggttcaccgggcctcccgggccccaaggaccaaaagggcagaaaggtgagccttatgcactgcctaaagaggagcgcgacagatatcggggtgaacctggagagcctggattggtcggtttccagggacctcccggccgccctgggcatgtgggacagatgggtccagttggagctccagggagaccaggaccatcgtccgatgagagctttaagaacaagttgaagaataagggcttaaattattatactgtaaatagtatgcagggtgacgtagggcagccgggacccaacgggattccatcagacaccctccaccccatcatcgcgcccacaggagtcaccttccacccagatcagtacaagggccctgttggctggaggggccgcccctgggttgctggcatttccttgaagggagaagaaggaatcatgggctttcctggactgaggggttaccctggcttgagtggtgaaaaaggatcaccaggacagaagggaagccgaggcctggatggctatcaagggcctgatggaccccggggacccaagggagaagccggagacccagggccccctggactacctgcctactcccctcacccttccctagcaaaaggtgccagaggtgacccgggattcccaggggcccaaggggagccaggaagccagggtgagccaggagacccgggcctcccaggtccccctggcctctccatcggagatggagatcagaggagaggcctgccgggtgagatgggacccaagggcttcatcggagaccccggcatccctgcgctctacgggggcccacctggacctgatggaaagcgagggcctccaggaccccccgggctccctggaccacctggacctgatggcttcctgtttgggctgaaaggagcaaaaggaagagcaggcttccctgggcttcccggctcccctggagcccgcggaccaaaggggtggaaaggtgacgctggggaatgcagatgtacagaaggcgacgaagctatcaaaggtcttccgggactgccaggacccaagggcttcgcaggcatcaacggggagccggggaggaaaggggacagaggagaccccggccaacacggcctccctgggttcccagggctcaagggagtgcctggcaacattggtgctcccggacccaaaggagcaaaaggagattccagaacaatcacaaccaaaggtgagcggggacagcccggcgtcccaggtgtgcccgggatgaaaggtgacgatggcagcccaggccgcgatgggctcgatggattccccggcctcccaggccctcccggtgatggcatcaagggccctccaggggacccaggctatccaggaatacctggaacgaagggtactccaggagaaatgggccccccaggactgggccttcccggcctcaaaggccaacgtggtttccctggagacgccggcttacctggaccaccaggcttcctgggccctcctggccccgcagggaccccaggacaaatagattgtgacacagatgtgaaaagggccgttggaggtgacagacaggaggccatccagccaggttgcataggagggcccaagggattgccaggcctgccaggacccccaggccccacaggtgccaaaggcctccgaggaatcccaggcttcgcaggagctgatggaggaccagggcccaggggcttgccaggagacgcaggtcgtgaagggttcccaggacccccagggttcataggaccccgaggatccaaaggtgcagtgggcctccctggcccagatggatccccaggtcccatcggcctgccagggccagatgggccccctggggaaaggggcctccctggagaagtcctgggagctcagcccgggccacggggagatgctggtgtgcctggacagcctgggcttaaaggccttcccggagacagaggcccccctggattcagaggaagccaagggatgcctgggatgccagggctgaagggccagccaggcctcccaggaccttccggccagccaggcctgtatgggcctccaggactgcatggattcccaggagctcctggccaagaggggcccttggggctgccaggaatcccaggccgtgaaggtctgcctggtgatagaggggaccctggggacacaggcgctcctggccctgtgggcatgaaaggtctctctggtgacagaggagatgctggcttcacaggggagcaaggccatccaggaagccctggatttaaaggaattgatggaatgcctgggacccccgggctaaaaggagatagaggctcacctgggatggatggtttccaaggcatgcctggactcaaagggagacccgggtttccagggagcaaaggcgaggctggatttttcggaatacccggtctgaagggtctggctggtgagccaggttttaaaggcagccgaggggaccctgggcccccaggaccacctcctgtcatcctgccaggaatgaaagacattaaaggagagaaaggagatgaagggcctatggggctgaaaggatacctgggcgcaaaaggtatccaaggaatgccaggcatcccagggctgtcaggaatccctgggctgcctgggaggcccggccacatcaaaggagtcaagggagacatcggagtccccggcatccccggtttgccaggattccctggggtggctggcccccctggaattacgggattcccaggattcataggaagccggggtgacaaaggtgccccagggagagcaggcctgtatggcgagattggcgcgactggtgatttcggtgacatcggggacactataaatttaccaggaagaccaggcctgaagggggagcggggcaccactggaataccaggtctgaagggattctttggagagaagggaacagaaggtgacatcggcttccctgggataacaggcgtgactggagtccaaggccctcctggacttaaaggacaaacaggctttccagggctgactgggcctccagggtcgcagggagagctggggcggattggactgcctggtggcaaaggagatgatggctggccgggagctccgggcttaccaggttttccgggactccgtgggatccgcggcttacacggcttgccaggcaccaagggctttccaggatccccaggttctgacatccacggagacccaggcttcccaggccctcctggggaaagaggtgacccaggagaggccaacacccttccaggccctgtgggagtcccaggacagaaaggagaccaaggagctccaggggaacgaggcccacctgggagcccaggacttcaggggttccctggtatcacacccccttccaacatctctggggcacctggtgacaaaggggcgccagggatatttggcctgaaaggttatcggggcccaccagggccaccaggttctgctgctcttcctggaagcaaaggtgacacagggaacccaggagctccaggaaccccagggaccaaaggatgggccggggactccgggccccagggcaggcctggtgtgtttggtctcccaggagaaaaagggcccaggggtgaacaaggcttcatggggaacactggacccactggggcggtgggcgacagaggccccaagggacccaagggagacccaggattccctggtgcccccgggactgtgggagcccccgggattgcaggaatcccccagaagattgccgtccaaccagggacagtgggtccccaggggaggcgaggcccccctggggcaccgggggagatggggccccagggcccccccggagaaccaggtttccgtggggctccagggaaagctgggccccaaggaagaggtggtgtgtctgctgttcccggcttccggggagatgaaggacccataggccaccaggggccgattggccaagaaggtgcaccaggccgtccagggagcccgggcctgccgggtatgccaggccgcagcgtcagcatcggctacctcctggtgaagcacagccagacggaccaggagcccatgtgcccagtgggcatgaacaaactctggagtggatacagcctgctgtacttcgagggccaggagaaggcgcacaaccaggacctggggctggcgggctcctgcctggcgcggttcagcaccatgcccttcctgtactgcaaccctggtgatgtctgctactatgccagccggaacgacaagtcctactggctctctaccactgcgccgctgcccatgatgcccgtggccgaggacgagatcaagccctacatcagccgctgttctgtgtgtgaggccccggccatcgccatcgcggtccacagtcaggatgtctccatcccacactgcccagctgggtggcggagtttgtggatcggatattccttcctcatgcacacggcggcgggagacgaaggcggtggccaatcactggtgtcaccgggcagctgtctagaggacttccgcgccacaccattcatcgaatgcaatggaggccgcggcacctgccactactacgccaacaagtacagcttctggctgaccaccattcccgagcagagcttccagggctcgccctccgccgacacgctcaaggccggcctcatccgcacacacatcagccgctgccaggtgtgcatgaagaacctgtgagccggcgcgtgccaggaagggccattttggtgcttattcttaacttattacctcaggtgccaacccaaaaattggttttatttttttcttaaaaaaaaaaaagtctaccaaaggaatttgcatccagcagcagcacttagacctgccagccactgtcaccgagcgggtgcaagcactcggggtccctggagggcaagccctgcccacagaaagccaggagcagccctggcccccatcagccctgctagacgcaccgcctgaaggcacagctaaccacttcgcacacacccatgtaaccactgcactttccaatgccacagacaactcacattgttcaactcccttctcggggtgggacagacgagacaacagcacacaggcagccagccgtggccagaggctcgaggggctcagggcctcaggcacccgtccccacacgagggccccgtgggtgggcctggccctgctttctacgccaatgttatgccagctccatgttctcccaaataccgttgatgtgaattattttaaaggcaaaaccgtgctctttattttaaaaaacactgataatcacactgcggtaggtcattcttttgccacatccctatagaccactgggtttggcaaaactcaggcagaagtggagacctttctagacatcattgtcagccttgctacttgaaggtacaccccatagggtcggaggtgctgtccccactgccccacgttgtccctgagatttaacccctccactgctgggggtgagctgtactcttctgactgccccctcctgtgtaacgactacaaaataaaacttggttctgaatatttttaaa

SEQ ID NO: 121604 - DNA, 6281 bp, Artificial Sequence
  derived and/or modified sequence
gggagcgcgcggcccgggagtgtggctgcagtgcgccgggacaccagggctccgcgctccgcactcaagaggctcccgcgtcccaacccctcgcgcccgcgcgttcgcggatccaggccgaggaccgaaaggggccgcccgagcccccggggccggcgcccagagagcccagcaaggccggccgccctgccggtgtgccgccggcgggtgcttctggaagggccaatgcgttcgggcagcagcccctgaagccgagcccgaggctaagtgggactgaccggggcccagagtggacgaaccgccagcatggggagagaccagcgcgcggtggccggccctgccctacggcggtggctgctgctggggacagtgaccgtggggttcctcgcccagagcgtcttggcgggtgtgaagaagtttgatgtgccgtgtggaggaagagattgcagtgggggctgccagtgctaccctgagaaaggtggacgtggtcagcctgggccagtgggcccccaggggtacaatgggccaccaggattacaaggattcccgggactgcagggacgtaaaggagacaagggtgaaaggggagcccccggagtaacgggacccaagggcgacgtgggagcaagaggcgtttctggattccctggtgccgatggaattcctggacacccggggcaaggtgggcccaggggaaggccgggctacgatggctgcaacggaacccagggagactcaggtccacaggggccccccggctctgaggggttcaccgggcctcccgggccccaaggaccaaaagggcagaaaggtgagccttatgcactgcctaaagaggagcgcgacagatatcggggtgaacctggagagcctggattggtcggtttccagggacctcccggccgccctgggcatgtgggacagatgggtccagttggagctccagggagaccaggaccacctggaccccctggaccaaaaggacagcaaggcaacagaggacttggtttctacggagttaagggtgaaaagggtgacgtagggcagccgggacccaacgggattccatcagacaccctccaccccatcatcgcgcccacaggagtcaccttccacccagatcagtacaagggtgaaaaaggcagtgagggggaaccaggaataagaggcatttccttgaagggagaagaaggaatcatgggctttcctggactgaggggttaccctggcttgagtggtgaaaaaggatcaccaggacagaagggaagccgaggcctggatggctatcaagggcctgatggaccccggggacccaagggagaagccggagacccagggccccctggactacctgcctactcccctcacccttccctagcaaaaggtgccagaggtgacccgggattcccaggggcccaaggggagccaggaagccagggtgagccaggagacccgggcctcccaggtccccctggcctctccatcggagatggagatcagaggagaggcctgccgggtgagatgggacccaagggcttcatcggagaccccggcatccctgcgctctacgggggcccacctggacctgatggaaagcgagggcctccaggaccccccgggctccctggaccacctggacctgatggcttcctgtttgggctgaaaggagcaaaaggaagagcaggcttccctgggcttcccggctcccctggagcccgcggaccaaaggggtggaaaggtgacgctggggaatgcagatgtacagaaggcgacgaagctatcaaaggtcttccgggactgccaggacccaagggcttcgcaggcatcaacggggagccggggaggaaaggggacagaggagaccccggccaacacggcctccctgggttcccagggctcaagggagtgcctggcaacattggtgctcccggacccaaaggagcaaaaggagattccagaacaatcacaaccaaaggtgagcggggacagcccggcgtcccaggtgtgcccgggatgaaaggtgacgatggcagcccaggccgcgatgggctcgatggattccccggcctcccaggccctcccggtgatggcatcaagggccctccaggggacccaggctatccaggaatacctggaacgaagggtactccaggagaaatgggccccccaggactgggccttcccggcctcaaaggccaacgtggtttccctggagacgccggcttacctggaccaccaggcttcctgggccctcctggccccgcagggaccccaggacaaatagattgtgacacagatgtgaaaagggccgttggaggtgacagacaggaggccatccagccaggttgcataggagggcccaagggattgccaggcctgccaggacccccaggccccacaggtgccaaaggcctccgaggaatcccaggcttcgcaggagctgatggaggaccagggcccaggggcttgccaggagacgcaggtcgtgaagggttcccaggacccccagggttcataggaccccgaggatccaaaggtgcagtgggcctccctggcccagatggatccccaggtcccatcggcctgccagggccagatgggccccctggggaaaggggcctccctggagaagtcctgggagctcagcccgggccacggggagatgctggtgtgcctggacagcctgggcttaaaggccttcccggagacagaggcccccctggattcagaggaagccaagggatgcctgggatgccagggctgaagggccagccaggcctcccaggaccttccggccagccaggcctgtatgggcctccaggactgcatggattcccaggagctcctggccaagaggggcccttggggctgccaggaatcccaggccgtgaaggtctgcctggtgatagaggggaccctggggacacaggcgctcctggccctgtgggcatgaaaggtctctctggtgacagaggagatgctggcttcacaggggagcaaggccatccaggaagccctggatttaaaggaattgatggaatgcctgggacccccgggctaaaaggagatagaggctcacctgggatggatggtttccaaggcatgcctggactcaaagggagacccgggtttccagggagcaaaggcgaggctggatttttcggaatacccggtctgaagggtctggctggtgagccaggttttaaaggcagccgaggggaccctgggcccccaggaccacctcctgtcatcctgccaggaatgaaagacattaaaggagagaaaggagatgaagggcctatggggctgaaaggatacctgggcgcaaaaggtatccaaggaatgccaggcatcccagggctgtcaggaatccctgggctgcctgggaggcccggccacatcaaaggagtcaagggagacatcggagtccccggcatccccggtttgccaggattccctggggtggctggcccccctggaattacgggattcccaggattcataggaagccggggtgacaaaggtgccccagggagagcaggcctgtatggcgagattggcgcgactggtgatttcggtgacatcggggacactataaatttaccaggaagaccaggcctgaagggggagcggggcaccactggaataccaggtctgaagggattctttggagagaagggaacagaaggtgacatcggcttccctgggataacaggcgtgactggagtccaaggccctcctggacttaaaggacaaacaggctttccagggctgactgggcctccagggtcgcagggagagctggggcggattggactgcctggtggcaaaggagatgatggctggccgggagctccgggcttaccaggttttccgggactccgtgggatccgcggcttacacggcttgccaggcaccaagggctttccaggatccccaggttctgacatccacggagacccaggcttcccaggccctcctggggaaagaggtgacccaggagaggccaacacccttccaggccctgtgggagtcccaggacagaaaggagaccaaggagctccaggggaacgaggcccacctgggagcccaggacttcaggggttccctggtatcacacccccttccaacatctctggggcacctggtgacaaaggggcgccagggatatttggcctgaaaggttatcggggcccaccagggccaccaggttctgctgctcttcctggaagcaaaggtgacacagggaacccaggagctccaggaaccccagggaccaaaggatgggccggggactccgggccccagggcaggcctggtgtgtttggtctcccaggagaaaaagggcccaggggtgaacaaggcttcatggggaacactggacccactggggcggtgggcgacagaggccccaagggacccaagggagacccaggattccctggtgcccccgggactgtgggagcccccgggattgcaggaatcccccagaagattgccgtccaaccagggacagtgggtccccaggggaggcgaggcccccctggggcaccgggggagatggggccccagggcccccccggagaaccaggtttccgtggggctccagggaaagctgggccccaaggaagaggtggtgtgtctgctgttcccggcttccggggagatgaaggacccataggccaccaggggccgattggccaagaaggtgcaccaggccgtccagggagcccgggcctgccgggtatgccaggccgcagcgtcagcatcggctacctcctggtgaagcacagccagacggaccaggagcccatgtgcccagtgggcatgaacaaactctggagtggatacagcctgctgtacttcgagggccaggagaaggcgcacaaccaggacctggggctggcgggctcctgcctggcgcggttcagcaccatgcccttcctgtactgcaaccctggtgatgtctgctactatgccagccggaacgacaagtcctactggctctctaccactgcgccgctgcccatgatgcccgtggccgaggacgagatcaagccctacatcagccgctgttctgtgtgtgaggccccggccatcgccatcgcggtccacagtcaggatgtctccatcccacactgcccagctgggtggcggagtttgtggatcggatattccttcctcatgcacacggcggcgggagacgaaggcggtggccaatcactggtgtcaccgggcagctgtctagaggacttccgcgccacaccattcatcgaatgcaatggaggccgcggcacctgccactactacgccaacaagtacagcttctggctgaccaccattcccgagcagagcttccagggctcgccctccgccgacacgctcaaggccggcctcatccgcacacacatcagccgctgccaggtgtgcatgaagaacctgtgagccggcgcgtgccaggaagggccattttggtgcttattcttaacttattacctcaggtgccaacccaaaaattggttttatttttttcttaaaaaaaaaaaagtctaccaaaggaatttgcatccagcagcagcacttagacctgccagccactgtcaccgagcgggtgcaagcactcggggtccctggagggcaagccctgcccacagaaagccaggagcagccctggcccccatcagccctgctagacgcaccgcctgaaggcacagctaaccacttcgcacacacccatgtaaccactgcactttccaatgccacagacaactcacattgttcaactcccttctcggggtgggacagacgagacaacagcacacaggcagccagccgtggccagaggctcgaggggctcagggcctcaggcacccgtccccacacgagggccccgtgggtgggcctggccctgctttctacgccaatgttatgccagctccatgttctcccaaataccgttgatgtgaattattttaaaggcaaaaccgtgctctttattttaaaaaacactgataatcacactgcggtaggtcattcttttgccacatccctatagaccactgggtttggcaaaactcaggcagaagtggagacctttctagacatcattgtcagccttgctacttgaaggtacaccccatagggtcggaggtgctgtccccactgccccacgttgtccctgagatttaacccctccactgctgggggtgagctgtactcttctgactgccccctcctgtgtaacgactacaaaataaaacttggttctgaatatttttaaa

SEQ ID NO: 121605 - DNA, 491 bp, Artificial Sequence
  derived and/or modified sequence
agttaacaatttctatacagttaagtggatttagtgagtatcattcttccaggagagaagtaaaatttttttttaaagaggaaaacaaagaacaagattaagaacagtaaaagaataagtatggaaaatctggctaagtgggactgaccggggcccagagtggacgaaccgccagcatggggagagaccagcgcgcggtggccggccctgccctacggcggtggctgctgctggggacagtgaccgtggggttcctcgcccagagcgtcttggcgggtgtgaagaagtttgatgtgccgtgtggaggaagagattgcagtgggggctgccagtgctaccctgagaaaggtggacgtggtcagcctgggccagtgggcccccaggggtacaatgggccaccaggattacaaggattcccgggactgcagggacgtaaaggagacaagggtgaaaggggagcccccggagtaacgggacccaagggcgacgtg

SEQ ID NO: 121606 - DNA, 5139 bp, Artificial Sequence
  derived and/or modified sequence
atgggccgagaccaaagggcagttgccggccccgctttgaggcgctggctcctgttgggcaccgtgactgtcggctttcttgcccagagtgtgctggccggcgtaaagaaatttgacgtgccatgcggcggtcgcgactgctctggcggatgtcagtgctaccccgagaaaggtggaagagggcagccaggccctgtgggaccccagggttacaatggtccgccgggccttcagggatttcccggtttgcaaggacgcaagggtgataaaggggaacgcggtgcccctggcgtaactggccctaaaggagacgtgggagcacggggcgtgtctgggtttcctggcgccgatggcatccccggtcacccaggccagggcggaccccgcggcagacccggctacgacggctgtaatggcacgcaaggcgattcaggtcctcaggggccgcctggaagcgaggggtttactggtcctccaggcccccaaggtcccaagggccagaagggggagccctacgccctgccaaaggaggagagggaccggtatcggggcgagccaggtgagcccggtctggtaggcttccagggaccaccaggccggccaggtcacgtgggacagatgggccctgtcggtgctcctggtagacccggccccagctctgatgaaagcttcaaaaataagcttaaaaataaaggcctgaactattatacagtcaacagtatgcagggagacgtcggccagccgggccctaatggtatcccgtcagataccctgcatcccataatcgcccccacaggcgttactttccacccagatcagtataagggacccgtgggctggaggggacggccctgggtggccgggatcagtctaaagggcgaggagggcattatgggcttccccggtctgaggggctacccaggcttgtcaggcgaaaaggggtctccaggccaaaaaggatcaagagggctggatggttaccagggtcctgacggcccgcggggccctaaaggcgaagctggcgaccctggtcccccaggtctcccagcctattcaccacacccatctctggctaagggagcaaggggcgaccccggctttcctggcgcgcagggggaacccgggagtcagggcgaaccgggagatcccggactgcccggacctccagggctatcaataggcgacggggaccaaagacgaggcctccctggagagatgggaccaaagggtttcatcggggatccaggtattcccgccctctatggggggcccccaggccctgatggaaagcggggacctcctgggcctccaggcctccccggaccccccggtccagacggatttcttttcggcttaaaaggggccaagggtcgggctgggtttcccggactcccaggctcacctggggcccgtggacccaaggggtggaaaggagacgctggagagtgtcggtgcactgagggagacgaggcaattaagggcctccctggtctcccaggaccaaaaggattcgcaggaattaacggcgagcctgggcggaagggggaccgcggcgaccccggacagcacggattacccggcttccctggattgaagggcgtgcctgggaacattggcgcaccaggcccaaagggcgccaaaggagactccagaacgatcactactaagggagagcgcggtcagcccggggtccccggggtgccggggatgaaaggggatgatggctctccagggcgcgatgggctggatggatttccgggcttgcctggtccgcccggtgacggcatcaagggacctccaggtgatcccgggtatcccggtattccagggactaagggtacccctggcgagatgggacctccaggccttggtctgccaggattaaaaggacagcgcggctttccaggagatgccggcctccccggccctcctggattcttgggacccccagggccagcgggaactcccggccagatagactgcgacaccgatgttaagagggccgtgggaggagatagacaagaagccattcaacctgggtgcataggagggccgaagggcctgcccggcctacctgggccaccaggacccactggggcaaaaggcctcaggggcattcccggttttgctggcgccgatggcggacctggcccccggggcttacccggcgacgccgggagagaaggctttcctggtccaccaggctttataggtcccagaggtagcaaaggggctgtgggtctgccgggacccgacgggtcaccaggtccaattggcttgccaggtcccgacggcccgccaggcgaacgcggccttccaggggaggtattgggggctcaaccgggacccagaggggacgcaggagtgccgggacagcctgggctgaaaggcctgcccggagacagagggcccccagggttccgcggcagccaagggatgcccggaatgccaggcctaaaggggcaacccgggttacccggcccatctgggcagcctgggctttacggccctccaggcctgcatggattccctggtgcacccggccaggagggaccacttggcttgccggggattcctggccgggagggcttacctggtgacagaggtgatcccggagacactggagcccccggcccagtggggatgaaggggctctcaggagatcgaggtgatgctggctttaccggagagcaaggacatcctgggtctcctggctttaaaggtattgacggtatgccaggcactcccggactcaagggagaccggggaagtccaggaatggacggatttcagggcatgcctgggcttaagggcagaccagggttccccggctctaagggcgaagctgggttttttgggattccaggccttaaaggccttgccggcgagcccggatttaaaggaagcagaggggatcctgggccacctggacccccacctgtgattctccctgggatgaaggatataaagggggaaaaaggagatgagggccccatgggcctgaagggttatctgggtgccaaaggtattcagggtatgcccggcatacctgggttaagcgggattcccggtctgccgggccggcccggccacatcaagggggtgaaaggggacattggggtgcccggaattcccgggctacccggcttccctggggttgcggggccgcctggcattaccggttttccagggttcattgggagcagaggcgataagggggcacccggccgagccggcctgtatggtgagattggcgccactggagattttggcgacataggggatacaataaacttgcccggacgtcccgggctcaaaggcgagcggggtacaacggggatcccaggcctgaaaggttttttcggtgagaaggggacagagggagatattggcttccccggtattaccggagtaacaggggtccaggggcctccaggacttaaagggcagaccgggtttccgggactgacagggcctcctggttcacagggcgagctcgggcgcatcggactgcccggggggaagggcgacgacggctggcccggagccccaggcttgcctgggttcccaggtctgagagggatccgagggctgcacggcctgccagggaccaaaggatttcccgggagtccggggtctgatattcacggagaccctgggtttcctgggcccccgggtgagaggggtgatcctggggaagctaatacccttcctggccctgtgggggtgccgggccagaagggggaccagggcgccccaggagagcgggggccccccggctcaccaggcctacagggttttcccgggatcactcctcctagcaatatttcaggcgcacctggcgacaaaggagcaccaggaatcttcggcctgaaaggatatcgcgggccccccggaccaccaggcagtgccgcgttacctggatcaaagggagatactggcaatccgggtgcccccggtacacccggaaccaagggctgggccggcgattcaggaccacagggcagaccaggtgtgttcggcctccccggggagaagggcccgagaggggagcaaggttttatgggaaacactggcccaacgggggcagtgggggatcgaggtccaaagggacccaagggcgacccaggcttccctggagcacccggtaccgtaggggctccgggtatcgctggcatccctcaaaagatcgctgtccagcctggaacagtgggaccccagggtagaagaggccctcccggtgcacctggagaaatgggtccccaggggccacctggcgaaccgggattccgtggagcccccggtaaagccggtccacagggccgcgggggtgtgtctgccgtgcctggatttcgcggcgatgagggtccaattggccaccaaggtcctattgggcaggagggtgctcctggaaggcccggatccccaggattgcctggtatgccaggacggtcagtgtctatcggctacctattggtgaaacatagccagacggaccaggaaccaatgtgccccgtggggatgaataagctttggtcgggctactctttgctttacttcgagggccaggaaaaagcacacaatcaggatctcgggctcgccggttcatgtctggccaggttctcaaccatgccttttctctactgtaatcctggggacgtgtgctattatgctagccggaatgacaagagttactggctatccaccacagctcccttgccgatgatgccagtggccgaggacgagatcaaaccctatatctctaggtgtagcgtctgcgaggctcccgccatagctatagccgtgcattcccaggatgtgagcatcccacactgtcctgcgggatggagatcgctctggatcgggtattctttcctcatgcacaccgccgccggggatgaaggcggaggccagagccttgtctcacccggctcctgtttagaagatttccgtgccacaccattcattgagtgcaatggcggccgggggacttgccattattacgccaacaaatattccttttggttaacgacaattcctgaacaatcctttcaagggtctccctcggccgatactttaaaagccggtttgattcgcacgcacatctccaggtgccaagtttgtatgaaaaacctctag

SEQ ID NO: 121607 - DNA, 5139 bp, Artificial Sequence
  derived and/or modified sequence
atggggcgcgaccagagggccgtcgcaggtcccgcgttacgcaggtggctgcttttgggcactgttactgtgggctttcttgcccagtcagttttggccggcgtgaaaaagtttgatgtgccatgtggaggtagggattgttcaggaggatgccagtgctaccctgaaaaaggagggaggggccagcccggaccggtgggacctcagggatacaatggaccacctggcctgcagggatttcctggcctgcagggaagaaagggagataaaggcgaacggggagcaccaggcgtgacaggacctaagggggatgtcggggcacgcggggtttcaggcttccccggggctgatggcattcctggccacccaggccagggtgggcccaggggaaggcctgggtatgacggttgcaacgggacccaaggagacagcggccctcagggtccccccggatccgaggggttcactggccctccaggcccacagggtcctaaagggcagaaaggggaaccttacgccttgccaaaggaagagcgcgataggtacagaggcgaaccaggggagcccggtttggtgggcttccaaggtcccccaggacggccaggtcacgtcggccagatgggtccagtcggagccccagggagacccgggccacccggtcctcccgggccgaagggccaacaaggtaatcgaggtctcggcttctatggcgtgaaaggcgaaaaaggagacgtggggcagcctgggcctaatggcatacctagtgataccctgcatccaattattgccccaaccggagtgacatttcacccggatcagtacaaaggtgagaagggtagtgaaggtgaacctgggataagaggtatttcactgaaaggggaagagggaatcatggggtttccgggtctcagaggttatcccggactgtcgggagaaaaaggatcacccggccaaaagggcagtcgcggactagatgggtatcaagggcccgacggcccccgaggacccaaaggcgaggcaggggatcccggcccgcccggacttccagcatatagtccccacccatctttggccaagggagctcggggtgatcccggcttcccaggagcccaaggagagccaggctctcagggcgagccgggtgaccccggacttcccggtcctcccggcctgtctatcggagacggtgatcagcggaggggcctgcccggagagatggggcctaagggattcataggcgaccctggcattcctgcgttgtacggcggcccaccaggcccagatggaaagagagggcccccaggcccccccgggctgcccggcccccctggtcccgacgggttcctcttcggactgaagggtgctaaaggcagggccggattccccggtctgccagggtcacccggcgcccgggggcctaaaggctggaagggtgacgccggtgaatgccggtgcactgaaggcgacgaggctatcaagggcctgcctggtttgcccgggcccaaggggtttgccgggatcaacggggagccggggcggaaaggggatcgtggagacccaggccagcatggactgcccgggttccctggtcttaagggcgtgcctggcaacattggcgctcccggtccgaagggcgctaagggggactcaagaacgatcactacaaagggggagcgcggtcagcccggcgtgcctggggtgccggggatgaaaggagatgacggatcccctggacgggacggcctcgacggattccccggccttcctggacctcccggcgatgggataaaggggccccccggagaccccggttatccagggatccccggcacaaaaggcactcccggagaaatgggccctcctggccttggactgccaggcctgaagggccagcgcggttttccaggcgatgcaggcttgccggggccaccgggctttctggggccacccggacccgcggggacacccggacaaatcgactgtgatacagatgttaaacgtgcagtggggggagaccggcaagaagctattcaaccaggatgtatcggtggcccgaagggactgcctggtctgcccgggccaccggggcctaccggggctaagggtttacgcggaatcccaggttttgcaggggcggacggtggtccaggacctcgtggactccctggggacgccgggagagaggggttcccgggacctccgggctttattggtcctcggggctccaaaggggcagtcggactccctggccccgacggttctcctggccccatcggcctgcccgggccagacggcccccccggcgaacgcggtcttcctggcgaggtcctgggcgcacagcccggacccagaggggacgctggcgtgcccggacaaccaggcctcaaggggctgcctggcgatcggggcccacccggattcaggggttcgcagggcatgcctggaatgcccggcctgaaggggcagcccggtctgcctggcccgtcaggtcaacccggcttgtacggccctccagggctgcatggattccccggcgccccaggccaagaaggtccacttgggctccctggtattcctggcagagagggactgcccggggacaggggagatccaggagacactggcgctcctggccccgtgggcatgaaagggctatcaggcgatagaggggacgctgggttcaccggagagcagggtcatcctggtagcccaggattcaaaggaatagacggaatgcctgggactcctgggttgaagggagaccgcggtagtcctgggatggatggctttcagggcatgccaggactcaagggacgcccagggttcccgggatccaagggagaggctggcttctttggaattcccgggctaaaaggcctggcaggcgaaccaggctttaagggatctagaggagatccaggaccccccggcccccctcctgtgatcctccccggtatgaaagatatcaaaggagaaaagggtgatgagggcccaatgggcctcaagggatacctgggcgctaaaggcattcaagggatgccagggattccagggctttccgggatcccagggttgcccggtaggcccggccacataaagggtgtgaaaggggatatcggagtgcccggcatccctggtcttcctggctttccaggagtcgccgggcctccagggattacaggtttccccgggttcataggctctcggggagataagggggcgccaggacgggccgggctatacggtgagataggagctaccggcgacttcggcgacataggtgataccatcaatctccctggacgacccggtctgaagggagaacgcggaacaaccggcatcccaggcctgaagggcttcttcggggaaaaaggtactgaaggagacattggattcccaggaattaccggggtaaccggtgttcagggaccgccaggtctgaaggggcagaccgggttccccggactgacaggtccaccaggctcacagggcgaactcggacgaattggactcccaggcggtaaaggtgatgacggctggcctggagcacctggtttacctggcttccctggcctgagggggattaggggtcttcacggtctgcccggcaccaagggtttcccgggcagccctgggagcgatatccatggagatcctggctttccaggcccaccgggcgaaagaggtgatccaggggaggcaaacactcttccaggccctgtgggagtgccaggccagaaaggggaccagggtgcaccgggcgaacgggggcctcctggctctccaggcttgcagggattccctgggatcaccccaccttcaaatatttcaggagccccgggagataaaggcgccccaggcatcttcggattaaaaggatataggggcccacccggacctcccggcagcgccgcattgccagggagtaagggcgatacaggcaatcctggcgccccaggcacaccaggcactaagggttgggccggggattccggccctcagggcagacctggagttttcggccttccaggcgaaaaggggccaagaggagagcaagggttcatgggaaacactggtcccaccggtgccgtgggcgataggggacccaaggggcccaaaggcgaccctggcttcccgggcgctcccgggacagtgggtgctccaggtatagccggcattcctcagaaaatcgccgtccaacccggaaccgtgggtcctcagggccgaagagggcccccaggagccccaggggaaatgggccctcagggccctccaggagaacccggattccgaggtgcacctgggaaggcagggccccaagggcgcggaggtgtctccgcagtgcctggattccgaggcgatgagggacccatcgggcatcaggggccaataggtcaggagggcgctccaggacggcccggatcccctggactgcctggtatgccaggtcgcagtgtgtcaatcggctacctgcttgtcaagcactctcaaaccgaccaagagcctatgtgtcctgttggtatgaataagctgtggagcggctattcactcctctatttcgaggggcaagagaaagcccataaccaggacttgggactggcaggcagctgcctcgctcgattcagtacgatgcctttcctgtactgtaaccccggagacgtgtgctactacgcatctcgtaacgacaagtcttactggctgtccacaaccgcccccctccccatgatgccagtagcggaagatgaaattaagccttatatcagcagatgttcagtgtgcgaagcgcccgctattgcaatcgcggttcactcccaggacgtaagtattccacactgcccagctggatggagaagcctgtggattggctatagttttttaatgcatacagctgctggtgatgagggtggtgggcagtctcttgtttctcctggaagttgcttagaagatttccgtgctacaccatttattgaatgtaacggagggagggggacatgccattattatgcgaacaagtactccttttggctgacaacaattccggaacagtcatttcaggggtccccctcggcagacactttgaaggccggtctgatacgcacacatattagccgctgccaggtttgcatgaaaaacctgtag

SEQ ID NO: 121608 - DNA, 318 bp, Artificial Sequence
  derived and/or modified sequence
atgggcagggaccagcgtgctgttgccggaccggccctgaggagatggctgttgctcgggaccgtgacagtgggttttctggcgcagagcgtccttgccggagtaaaaaagtttgacgtcccctgtgggggccgagactgttcgggcgggtgtcaatgttatccggagaaaggtggccggggccagcctggccccgttgggccacagggatataatggaccccccggactgcagggcttcccggggcttcaggggcgtaaaggcgacaaaggagagaggggtgcccctggagtaactggtcctaaaggggatgtgtag

SEQ ID NO: 121609 - DNA, 5139 bp, Artificial Sequence
  derived and/or modified sequence
atgggccgggaccagagagctgtggccggccctgccctgcggcgctggctgctgctgggcaccgtgacagtgggcttcctggcccagagcgtgctggccggcgtgaagaagtttgatgtgccctgtggcggccgggactgcagcggcggctgccagtgctacccagagaagggcggccggggccagcccggccctgtgggcccccagggctacaacggccccccaggcctgcagggcttccctggcctgcagggcaggaaaggagacaagggggagcggggggcccctggggtgacaggccccaagggagatgtgggcgcccggggcgtgtctggcttccctggagcagatggcatccctggccaccctggccagggcggcccccggggccggcccggctatgatggctgcaatggcacccagggcgacagcggcccccagggccccccaggcagcgagggcttcaccggccccccaggcccccagggccccaagggccagaagggggagccctatgccctgcccaaggaggagcgggaccgctacagaggagagcccggggagcccggcctggtgggcttccagggccccccaggccggcccggccacgtgggccagatgggccctgtgggcgcccctggccggcccggccccagcagtgatgagagcttcaagaacaagctgaagaacaagggcctgaactactacacagtgaacagcatgcagggagatgtgggccagcccggccccaacggcatccccagcgacaccctgcaccccatcatcgcccccactggagtgaccttccacccagaccagtacaagggccctgtgggctggaggggccggccctgggtggccggcatcagcctgaagggggaggagggcatcatgggcttccctggcctgcggggctacccaggcctgagcggggagaagggcagccctggccagaagggcagccggggcctggatggctaccagggcccagatggcccccggggccccaagggggaggccggggaccccggccccccaggcctgcctgcctacagcccccaccccagcctggccaagggggcccggggggaccccggcttccctggggcccagggcgagcccggcagccagggcgagcccggggaccccggcctgcccggccccccaggcctgagcattggagatggagaccagaggcggggcctgcctggagagatgggccccaagggcttcatcggggaccccggcatcccagccctgtatggaggccccccaggcccagatggcaagaggggccccccaggccccccaggcctgcccggccccccaggcccagatggcttcctgtttggcctgaagggggccaagggccgggccggcttccctggcctgcccggcagccctggggcccggggccccaagggctggaagggagatgctggggagtgccgctgcacagaaggagatgaggccatcaagggcctgcccggcctgcccggccccaagggctttgctggcatcaacggggagcccggcaggaagggggacagaggagaccccggccagcacggcctgcccggcttccctggcctgaagggcgtgcccggcaacatcggggcccctggccccaagggggccaagggggacagcaggaccatcaccaccaagggggagcggggccagcccggggtgcctggggtgcccggcatgaagggagatgatggcagccctggaagagatggcctggatggcttccctggcctgcccggccccccaggagatggcatcaagggccccccaggggaccccggctacccaggcatccctggcaccaagggcaccccaggagagatgggccccccaggcctgggcctgcccggcctgaagggccagaggggcttccctggagatgctggcctgcccggccccccaggcttcctgggccccccaggccctgctggcaccccaggccagattgactgtgacacagatgtgaagagagctgtgggcggggaccggcaggaggccatccagcccggctgcatcggcggccccaagggcctgcccggcctgcccggccccccaggccccaccggggccaagggcctgcggggcatccctggctttgctggagcagatggcggccctggcccccggggcctgcctggagatgctggccgggagggcttccctggccccccaggcttcatcggcccccggggcagcaaaggagctgtgggcctgcccggcccagatggcagccctggccccatcggcctgcccggcccagatggccccccaggagagcggggcctgcctggagaggtgctgggcgcccagcccggccccagaggagatgctggggtgcccggccagcccggcctgaagggcctgcccggggaccggggccccccaggcttccggggcagccagggcatgcctggcatgcctggcctgaagggccagcccggcctgcccggccccagcggccagcccggcctgtatggccccccaggcctgcacggcttccctggggcccctggccaggagggccccctgggcctgcccggcatccctggccgggagggcctgcccggggacagaggagaccccggggacaccggggcccctggccctgtgggcatgaagggcctgagcggggacagaggagatgctggcttcaccggggagcagggccaccctggcagccctggcttcaagggcattgatggcatgcctggcaccccaggcctgaagggggaccggggcagccctggcatggatggcttccagggcatgcctggcctgaagggccggcccggcttccctggcagcaagggggaggccggcttcttcggcatccctggcctgaagggcctggccggggagcccggcttcaagggcagcagaggagaccccggccccccaggccccccacctgtgatcctgcccggcatgaaggacatcaagggggagaagggagatgagggccccatgggcctgaagggctacctgggcgccaagggcatccagggcatgcctggcatccctggcctgagcggcatccctggcctgcccggccggcccggccacatcaagggcgtgaagggggacattggagtgcccggcatccctggcctgcccggcttccctggggtggccggccccccaggcatcaccggcttccctggcttcatcggcagcagaggagacaagggggcccctggccgggccggcctgtatggagagatcggggccactggagactttggagacattggagacaccatcaacctgcccggccggcccggcctgaagggggagcggggcaccaccggcatccctggcctgaagggcttctttggagagaagggcacagaaggagacatcggcttccctggcatcaccggggtgactggagtgcagggccccccaggcctgaagggccagacaggcttccctggcctgactggacctcctggcagccagggcgagctgggcagaattggcctgcccggcggcaaaggagatgatggctggccaggggcccctggcctgcccggcttccctggcctgcggggcatccggggcctgcacggcctgcccggcaccaagggcttccctggcagccctggcagtgacatccacggggaccccggcttccctggccccccaggagagcggggggaccctggagaggccaacaccctgcccggccctgtgggcgtgcccggccagaagggggaccagggcgcccctggagagcggggccccccaggcagccctggcctgcagggcttccctggcatcaccccacccagcaacatcagcggggcccctggggacaagggggcccctggcatcttcggcctgaagggctaccggggccccccaggccccccaggcagcgctgccctgcccggcagcaagggggacaccggcaaccctggggcccctggcaccccaggcaccaagggctgggccggggacagcggcccccagggccggcctggggtgtttggcctgcctggagagaagggccccagaggagagcagggcttcatgggcaacacaggccccactggagctgtgggggaccggggccccaagggccccaagggggaccccggcttccctggggcccctggcaccgtgggcgcccctggcattgctggcatcccccagaagattgctgtgcagcccggcaccgtgggcccccagggcagaagaggccccccaggggcccctggagagatgggcccccagggccccccaggagagcccggcttccggggggcccctgggaaggccggcccccagggccggggcggcgtgtctgctgtgcccggcttcagaggagatgagggccccatcggccaccagggccccatcggccaggagggcgcccctggccggcccggcagccctggcctgcccggcatgcctggccgctctgtgtccatcggctacctgctggtgaagcacagccagacagaccaggagcccatgtgccctgtgggcatgaacaagctgtggagcggctacagcctgctgtactttgagggccaggagaaggcccacaaccaggacctgggcctggccggcagctgcctggcccgcttcagcaccatgcccttcctgtactgcaaccctggagatgtgtgctactatgccagcagaaatgacaagagctactggctgagcaccacagcccccctgcccatgatgcctgtggccgaggatgagatcaagccctacatcagccgctgcagcgtgtgtgaggccccagccatcgccatcgctgtgcacagccaggatgtgtccatcccccactgcccagctggctggaggagcctgtggattggctacagcttcctgatgcacacagctgctggagatgaaggaggcggccagagcctggtgtccccaggcagctgcctggaggacttccgggccacccccttcattgaatgtaatggaggccggggcacctgccactactatgccaacaagtacagcttctggctgaccaccatccctgagcagagcttccagggcagccccagcgctgacaccctgaaggccggcctcatccgcacccacatcagccgctgccaggtgtgcatgaagaacctgtag

SEQ ID NO: 121610 - DNA, 5139 bp, Artificial Sequence
  derived and/or modified sequence
atgggccgggaccagagagctgtggccggccctgccctgcggcgctggctgctgctgggcaccgtgacagtgggcttcctggcccagagcgtgctggccggcgtgaagaagtttgatgtgccctgtggcggccgggactgcagcggcggctgccagtgctacccagagaagggcggccggggccagcccggccctgtgggcccccagggctacaacggccccccaggcctgcagggcttccctggcctgcagggcaggaaaggagacaagggggagcggggggcccctggggtgacaggccccaagggagatgtgggcgcccggggcgtgtctggcttccctggagcagatggcatccctggccaccctggccagggcggcccccggggccggcccggctatgatggctgcaatggcacccagggcgacagcggcccccagggccccccaggcagcgagggcttcaccggccccccaggcccccagggccccaagggccagaagggggagccctatgccctgcccaaggaggagcgggaccgctacagaggagagcccggggagcccggcctggtgggcttccagggccccccaggccggcccggccacgtgggccagatgggccctgtgggcgcccctggccggcccggccccccaggccccccaggccccaagggccagcagggcaacagaggcctgggcttctacggcgtgaagggggagaagggagatgtgggccagcccggccccaacggcatccccagcgacaccctgcaccccatcatcgcccccactggagtgaccttccacccagaccagtacaagggggagaagggcagcgagggggagcccggcatccggggcatcagcctgaagggggaggagggcatcatgggcttccctggcctgcggggctacccaggcctgagcggggagaagggcagccctggccagaagggcagccggggcctggatggctaccagggcccagatggcccccggggccccaagggggaggccggggaccccggccccccaggcctgcctgcctacagcccccaccccagcctggccaagggggcccggggggaccccggcttccctggggcccagggcgagcccggcagccagggcgagcccggggaccccggcctgcccggccccccaggcctgagcattggagatggagaccagaggcggggcctgcctggagagatgggccccaagggcttcatcggggaccccggcatcccagccctgtatggaggccccccaggcccagatggcaagaggggccccccaggccccccaggcctgcccggccccccaggcccagatggcttcctgtttggcctgaagggggccaagggccgggccggcttccctggcctgcccggcagccctggggcccggggccccaagggctggaagggagatgctggggagtgccgctgcacagaaggagatgaggccatcaagggcctgcccggcctgcccggccccaagggctttgctggcatcaacggggagcccggcaggaagggggacagaggagaccccggccagcacggcctgcccggcttccctggcctgaagggcgtgcccggcaacatcggggcccctggccccaagggggccaagggggacagcaggaccatcaccaccaagggggagcggggccagcccggggtgcctggggtgcccggcatgaagggagatgatggcagccctggaagagatggcctggatggcttccctggcctgcccggccccccaggagatggcatcaagggccccccaggggaccccggctacccaggcatccctggcaccaagggcaccccaggagagatgggccccccaggcctgggcctgcccggcctgaagggccagaggggcttccctggagatgctggcctgcccggccccccaggcttcctgggccccccaggccctgctggcaccccaggccagattgactgtgacacagatgtgaagagagctgtgggcggggaccggcaggaggccatccagcccggctgcatcggcggccccaagggcctgcccggcctgcccggccccccaggccccaccggggccaagggcctgcggggcatccctggctttgctggagcagatggcggccctggcccccggggcctgcctggagatgctggccgggagggcttccctggccccccaggcttcatcggcccccggggcagcaaaggagctgtgggcctgcccggcccagatggcagccctggccccatcggcctgcccggcccagatggccccccaggagagcggggcctgcctggagaggtgctgggcgcccagcccggccccagaggagatgctggggtgcccggccagcccggcctgaagggcctgcccggggaccggggccccccaggcttccggggcagccagggcatgcctggcatgcctggcctgaagggccagcccggcctgcccggccccagcggccagcccggcctgtatggccccccaggcctgcacggcttccctggggcccctggccaggagggccccctgggcctgcccggcatccctggccgggagggcctgcccggggacagaggagaccccggggacaccggggcccctggccctgtgggcatgaagggcctgagcggggacagaggagatgctggcttcaccggggagcagggccaccctggcagccctggcttcaagggcattgatggcatgcctggcaccccaggcctgaagggggaccggggcagccctggcatggatggcttccagggcatgcctggcctgaagggccggcccggcttccctggcagcaagggggaggccggcttcttcggcatccctggcctgaagggcctggccggggagcccggcttcaagggcagcagaggagaccccggccccccaggccccccacctgtgatcctgcccggcatgaaggacatcaagggggagaagggagatgagggccccatgggcctgaagggctacctgggcgccaagggcatccagggcatgcctggcatccctggcctgagcggcatccctggcctgcccggccggcccggccacatcaagggcgtgaagggggacattggagtgcccggcatccctggcctgcccggcttccctggggtggccggccccccaggcatcaccggcttccctggcttcatcggcagcagaggagacaagggggcccctggccgggccggcctgtatggagagatcggggccactggagactttggagacattggagacaccatcaacctgcccggccggcccggcctgaagggggagcggggcaccaccggcatccctggcctgaagggcttctttggagagaagggcacagaaggagacatcggcttccctggcatcaccggggtgactggagtgcagggccccccaggcctgaagggccagacaggcttccctggcctgactggacctcctggcagccagggcgagctgggcagaattggcctgcccggcggcaaaggagatgatggctggccaggggcccctggcctgcccggcttccctggcctgcggggcatccggggcctgcacggcctgcccggcaccaagggcttccctggcagccctggcagtgacatccacggggaccccggcttccctggccccccaggagagcggggggaccctggagaggccaacaccctgcccggccctgtgggcgtgcccggccagaagggggaccagggcgcccctggagagcggggccccccaggcagccctggcctgcagggcttccctggcatcaccccacccagcaacatcagcggggcccctggggacaagggggcccctggcatcttcggcctgaagggctaccggggccccccaggccccccaggcagcgctgccctgcccggcagcaagggggacaccggcaaccctggggcccctggcaccccaggcaccaagggctgggccggggacagcggcccccagggccggcctggggtgtttggcctgcctggagagaagggccccagaggagagcagggcttcatgggcaacacaggccccactggagctgtgggggaccggggccccaagggccccaagggggaccccggcttccctggggcccctggcaccgtgggcgcccctggcattgctggcatcccccagaagattgctgtgcagcccggcaccgtgggcccccagggcagaagaggccccccaggggcccctggagagatgggcccccagggccccccaggagagcccggcttccggggggcccctgggaaggccggcccccagggccggggcggcgtgtctgctgtgcccggcttcagaggagatgagggccccatcggccaccagggccccatcggccaggagggcgcccctggccggcccggcagccctggcctgcccggcatgcctggccgctctgtgtccatcggctacctgctggtgaagcacagccagacagaccaggagcccatgtgccctgtgggcatgaacaagctgtggagcggctacagcctgctgtactttgagggccaggagaaggcccacaaccaggacctgggcctggccggcagctgcctggcccgcttcagcaccatgcccttcctgtactgcaaccctggagatgtgtgctactatgccagcagaaatgacaagagctactggctgagcaccacagcccccctgcccatgatgcctgtggccgaggatgagatcaagccctacatcagccgctgcagcgtgtgtgaggccccagccatcgccatcgctgtgcacagccaggatgtgtccatcccccactgcccagctggctggaggagcctgtggattggctacagcttcctgatgcacacagctgctggagatgaaggaggcggccagagcctggtgtccccaggcagctgcctggaggacttccgggccacccccttcattgaatgtaatggaggccggggcacctgccactactatgccaacaagtacagcttctggctgaccaccatccctgagcagagcttccagggcagccccagcgctgacaccctgaaggccggcctcatccgcacccacatcagccgctgccaggtgtgcatgaagaacctgtag

SEQ ID NO: 121611 - DNA, 318 bp, Artificial Sequence
  derived and/or modified sequence
atgggccgggaccagagagctgtggccggccctgccctgcggcgctggctgctgctgggcaccgtgacagtgggcttcctggcccagagcgtgctggccggcgtgaagaagtttgatgtgccctgtggcggccgggactgcagcggcggctgccagtgctacccagagaagggcggccggggccagcccggccctgtgggcccccagggctacaacggccccccaggcctgcagggcttccctggcctgcagggcaggaaaggagacaagggggagcggggggcccctggggtgacaggccccaagggagatgtgtag

SEQ ID NO: 121612 - DNA, 5139 bp, Artificial Sequence
  derived and/or modified sequence
atgggccgggaccagcgggccgtggccggccccgccctgcggcggtggcttctcctgggtacagtgacagtgggctttctggcacagtccgtcctggccggagtaaagaaattcgatgtaccttgtggcggcagggactgctctggggggtgccaatgctacccagagaaagggggaagggggcagcctggccctgtggggccccaggggtacaatggcccccctggcctccagggcttccccggattgcagggacgcaagggcgataagggcgaaagaggtgctccaggcgttacaggacctaagggcgatgtcggagctagaggagtatccggctttccaggcgctgatgggattcctggccaccccggacagggagggcccaggggtcgaccaggatacgacgggtgcaatgggacacagggcgactccggcccccagggcccaccaggctccgaggggttcaccggccctcctggccctcagggtccaaaaggacaaaagggagaaccctatgcccttccaaaggaggaaagagatagatatcgcggagagcctggcgagcccggattggtgggtttccaggggcctcccggtcggcccggccacgtcgggcagatgggccccgtgggagcgccaggcagaccgggacccagcagcgacgaaagtttcaagaataagttgaaaaacaaaggcttgaattactatactgtgaactccatgcagggagatgtgggtcagcccggcccgaacggcatcccctccgacaccttgcacccaattattgcacctacaggggttaccttccaccccgaccaatataagggtccagtggggtggagagggagaccttgggtagctggtatttctttgaagggcgaagaaggcataatggggtttcctggcctgcggggttatccaggtctgagtggggaaaagggttcacccgggcagaagggctcaagagggttggacgggtaccaaggacccgacggtcctagaggtcccaaaggagaggccggagatccgggcccccctggcttacccgcgtattctcctcatcccagcttggccaaaggagccagaggagatcctggttttcctggcgcgcagggggagccgggttcacaaggggagccgggagaccctgggctaccaggtccaccaggattgagcattggtgacggcgatcagaggcggggcctgcccggggagatgggtcccaaaggctttattggggatcccggcatcccggccctatatgggggcccccccggaccagacggcaaacgcggaccgccgggtccccccgggcttcccggccctccgggtccagatggttttcttttcggacttaagggagccaaaggtcgcgcaggcttccccggactgcctggctctccaggggcaagaggccccaaggggtggaagggcgatgctggcgaatgtcgctgtaccgaaggcgatgaagcgattaagggactgccaggactgccaggccctaaggggttcgccggtatcaacggcgaaccggggcggaaaggagatcgtggcgatccgggacaacacggattaccagggtttccagggctgaaaggggttcctgggaacatcggcgcacctgggccaaaaggggccaagggcgactcacgaacgatcaccaccaagggcgagcggggacagccgggagtgcccggcgtacctggcatgaaaggcgatgacggcagccctggtagggacggactggacggcttccctggcctgcctggtcccccaggggacggtattaagggccccccaggtgatcctggttatccaggtattcccgggacaaaagggactcccggtgaaatgggaccacctggactcggacttcccgggctcaagggacaacgcggcttccctggagacgcggggcttccagggccacctggttttcttggccctccaggacccgccggcacaccaggccagattgattgtgatacagacgtgaagcgggctgtagggggggaccgccaggaagcaattcagcctggatgcatcggaggccctaagggattacccggtctccccggacctccaggaccaaccggcgcaaagggcctccggggaatcccaggatttgccggcgctgacggcggtcctggcccacgcggattgcctggcgatgctggacgcgagggattcccaggtcccccggggtttatcggacctagaggcagcaaaggtgccgttggtctgccaggcccagacgggagtcccggccctataggtcttccaggtccagacggtcctcccggagaaagaggcctgcccggagaagtgctgggtgcccagccaggtcctcggggtgacgctggtgtgcccgggcagccaggtctcaaagggctccccggagatcggggacctcccggattccgaggctcgcagggcatgccagggatgcccggactgaaggggcagccaggtctcccaggcccatccggccagcccggtctgtacggcccccccggcctacacggctttccgggtgctccgggccaagaggggcctctgggactgcctggcatcccagggcgcgagggcctgcctggagataggggagatccaggcgatactggcgcgcccggacctgtcggcatgaaggggctgagcggcgatcgaggtgacgccggttttacgggcgaacagggacatcccggtagtcccggttttaaggggattgacgggatgccaggcacccccgggcttaagggggatcgggggagtccgggtatggatggattccagggcatgcctggtctgaaggggaggccgggattcccgggatccaaaggagaagcagggttttttggaatccctgggctaaagggtctggccggtgaaccaggtttcaagggaagccggggcgatccgggcccgcctggacccccacccgtgattctccctgggatgaaagatatcaaaggagaaaaaggcgacgaagggcccatggggcttaaggggtatctgggcgctaaaggcatccagggcatgccagggattccggggttgagtggaatcccaggtctgcctggacgtcctgggcacattaagggagtgaagggagatataggcgtgcctggaatcccgggacttccgggcttccccggggttgccggtccaccgggcattacaggttttcctggtttcatcgggagccgcggcgacaaaggcgcccccggccgggctgggttgtatggcgagattggcgccactggagatttcggcgacatcggggacaccattaacctgccgggaaggccaggcttgaagggcgaacgcggaaccaccggcatccccggattgaagggattcttcggagaaaaaggcacagagggagacatcggcttcccggggattaccggggtgaccggcgtgcagggcccccctgggctgaagggacaaacaggatttcctggactgactgggcctcctggtagccagggagaactagggcgcatcgggctacctgggggtaagggcgacgacgggtggccaggcgcccctggactgccagggttcccgggcttgcgtgggattagaggtttgcacggcctgccggggacgaaggggttcccgggctctcccgggagcgacattcatggcgatcccggcttccccgggccaccaggtgaaagaggcgaccccggagaggcgaatactttgccaggccccgttggagtcccaggccagaaaggagaccaaggagctcctggcgagcgggggcctcccggttctcccggactgcaaggcttcccaggcattacgcctccttccaacatctccggagctcctggcgacaagggcgcccctgggatttttggcctcaaaggctacaggggcccaccaggaccaccaggctccgccgctcttccagggagcaagggggatacaggcaaccccggtgccccaggcactccaggcactaagggatgggcaggagattccggccctcagggtcgaccaggagtgttcggccttccaggagagaaaggtccgcgtggagaacagggttttatggggaacacaggcccaaccggcgctgtgggtgatcgtggtcccaaggggcctaaaggagatcctgggttcccaggcgccccaggtactgtcggggcaccaggtatcgccggcattccccagaagatcgccgtgcagcccggaacagtcggaccacagggacggcgaggccccccaggtgcaccaggggaaatggggcctcagggaccacctggggagcctggctttagaggggcacctgggaaagcaggcccacagggacgtggcggcgtgagtgctgtccccgggttccgcggagatgaagggcccatcgggcaccaagggcccattggccaggagggagcaccagggaggcccgggagtcctgggttacctggaatgcctgggcggagcgtgagtatcggttacctcctggttaagcattcccagacagaccaggagcctatgtgccccgtcggaatgaataaactgtggtcagggtattcgctgctgtatttcgagggtcaggagaaggcccataaccaggatcttggactggccggatcttgcctggcacggttttcaacaatgccatttttatattgcaaccctggggatgtctgttactatgctagtagaaatgataaaagttattggctgtccaccacagctcctctccctatgatgcccgtagccgaggatgaaattaaaccttacatctctcggtgcagcgtctgcgaagcccccgccattgcgattgcggtgcattctcaggacgttagtattccccattgccctgccggttggcgcagcctatggatcggttacagttttctgatgcataccgcggccggggatgaggggggcggacaaagcctagtctcacctggatcatgcctggaggatttcagggctaccccgtttatcgagtgtaatggaggccgcggaacctgtcattactatgccaataaatacagcttttggcttacaacgatccctgagcagtcttttcagggctcgccatctgctgatactctcaaggccggtctgataagaacgcacataagccgctgccaggtgtgtatgaagaacctctag

SEQ ID NO: 121613 - DNA, 5139 bp, Artificial Sequence
  derived and/or modified sequence
atgggccgggaccagcgggccgtggccggccccgccctgcggcggtggctattgctgggcaccgtgaccgtgggattcttggcccagtcagtactggccggagtcaagaagtttgatgtcccttgcggtggccgggactgctcggggggatgtcagtgttacccggagaagggcggccgaggccagcctggcccggtcgggccacagggttataacgggccacctggactacaggggttcccaggcctgcaggggagaaaaggcgataaaggagagcggggtgcacccggcgtgaccggacctaaaggggatgtgggggcacgtggcgtgtctggcttccccggcgcagatggcattcctgggcaccccggacaaggggggcctagaggacgcccaggttacgacggatgcaatggaactcagggggacagcggccctcagggtccgccgggaagcgagggctttactgggcctccaggaccacagggacctaaaggccaaaagggcgagccatatgcgcttcctaaggaggagcgcgatcggtataggggcgagcccggggagcctggccttgtggggttccaggggccgcccgggcggcccggacacgtggggcaaatggggcctgtcggcgcccctggccggccgggccctccagggccccctgggccgaagggtcaacaagggaaccgcggtttgggcttttacggcgtgaaaggggaaaagggggacgtgggtcagcccgggcccaatggaattccaagtgatacattgcaccccataatcgcccctaccggagtgacattccaccctgaccaatataagggcgaaaagggcagtgaaggcgaaccgggaatccgaggaatttccctgaaaggcgaagagggcataatgggttttcccggcctcagaggttatcctgggctctcgggcgagaagggttcccctgggcaaaagggatccagagggctcgacggctaccagggacccgacggccccaggggccctaaaggcgaggctggtgacccagggcctccaggactacctgcttactctcctcatcctagccttgccaagggagcccgtggcgaccccggctttccgggggctcagggggagcctggcagtcaaggtgaaccaggcgatcccggactacctggtccacccgggctgagtatcggagacggagatcagcgcagaggcttgcccggtgaaatgggccccaaaggatttatcggtgatccagggattccagcactctacggggggccccctggcccagacgggaagcgcggccctccaggtccccctggactgcctgggccgcccggccccgacggtttcctgtttgggctgaaaggggcaaagggcagggccggatttcccgggcttccagggtcaccaggagcaagaggtcctaaaggctggaagggtgacgcgggtgagtgcaggtgcacagaaggtgatgaggcaatcaaggggctgccagggttgcctggtcccaagggattcgcaggcatcaatggagaacccggtcgtaagggcgataggggcgatccaggacagcatggccttccaggatttcccggtttgaagggggtgcccggaaatattggcgccccgggtccgaagggggcgaaaggcgatagtaggacaatcacaacaaagggtgagcggggccaacctggagtacccggtgtccctggcatgaaaggggacgacgggtcccctggaagagacggtctcgacggtttccctggcctgcccgggcctcctggtgacggcattaaaggtccccctggcgaccccggctacccaggcatcccaggtacaaaaggaaccccaggcgaaatggggccaccaggactcgggttgccggggctgaaaggccagagaggcttccctggagacgccggtcttccaggccctcccggatttctcggcccacctggtcccgcgggcaccccagggcaaatcgactgtgacaccgatgtcaaaagggccgttgggggggacagacaggaggccattcaacccggttgcataggggggcctaagggattgcctggcctgccagggcctcctgggcctaccggagctaagggattacgtgggattcccggctttgctggggccgacggcggccccggcccccgcggcctcccaggagatgccggaagagagggatttcctggaccccccggctttatcggtccacgtggaagcaaaggggctgtcggccttccaggcccagatgggtctccgggccctatcgggctgccaggccccgacggaccacccggcgaacgcggtctccccggagaggtccttggtgcacagcccggacctagaggcgacgcgggggtcccgggtcaacccgggttaaagggactgccaggcgacagaggcccgcctgggttccggggatctcagggtatgcctggcatgcccggcctgaagggtcaaccaggattacccggtccaagtgggcagcccggtctatacggccctccaggactgcatggatttccaggtgcccctggccaggagggacccctggggctccccggaatacccggcagagagggactcccaggggaccgcggcgacccgggagatacaggagctcctggacccgtggggatgaaggggttgtctggtgaccggggagatgccggtttcactggggaacagggccaccctggctcccccggatttaaagggattgatggcatgcccggaactcctggcctcaagggggatcgaggcagccctggaatggatgggttccaagggatgcctggcctaaagggccgtcccggatttcctggctctaagggtgaagcaggcttttttggtatccctggactgaagggtctcgcaggggagcccggcttcaagggcagtcgtggcgacccggggccacctggccccccacctgtgatccttcctggaatgaaggatatcaagggtgaaaagggcgatgaggggccaatgggcctgaagggctacctcggcgccaaaggaatacagggaatgcctggaatccccggtctcagtggcattccgggtctgcctgggaggccagggcatatcaagggggtcaaaggcgacattggcgtccctgggatccctggcctacccgggtttcctggcgtggcaggacccccgggcattaccgggttccccgggttcatcggctcgagaggcgataagggcgcgcctggccgagcgggcctttacggagagatcggggccacgggagactttggtgatatcggcgatacgattaacctcccgggaaggcccggtctgaaaggggagcggggcacgaccggcattcctggactgaagggtttttttggagaaaaggggacagagggcgatattggctttcccggcatcacgggggtgacaggggtgcaggggccaccaggcttaaaaggacagaccgggttccctggcctgactggacctcccggatcgcaaggcgagttagggaggattgggttacctggcggaaagggcgacgacggatggcccggggcgccgggcctgcctgggttccctggtctgagaggtatcaggggacttcacggcttacccggcaccaaggggtttccggggagtccaggaagtgatatccatggagatccgggcttccctggacctcctggtgagcgaggagatcccggcgaggccaatacactccccggcccagtgggggttcccggccagaagggcgaccagggagctccgggagagcgcggcccaccggggtccccagggctccaggggtttccaggcatcacccctcctagcaatatctcaggggctcccggggataaaggcgcccctggcattttcggcctgaaagggtatcgcgggccaccaggcccccccggcagcgctgctctgcccggctccaagggtgacacgggaaatcccggtgcgcctggcacccctgggaccaagggctgggccggcgacagcgggccccagggccggcctggggtttttggcctcccgggagagaagggacctcgcggagagcagggctttatgggcaacacaggacctacaggagccgtgggtgacaggggtcctaagggccctaaaggcgaccctggattccctggtgcacccggcaccgtgggggcccctggaattgcaggcatccctcaaaagatcgctgtgcaacccggcacagtgggcccgcaggggaggcggggacccccaggtgcacctggggagatgggtccccagggccccccgggcgaacctggtttcagaggtgcacctggtaaggctggtccgcaggggcgcgggggggtgtctgctgtcccgggtttcagaggcgatgaggggccgattggtcaccaggggccaatcggacaggaaggtgcccctggccggccaggctcccccgggctacccggaatgcctgggcgcagtgtttccatcggctacctgctcgtaaagcactcgcagactgaccaggagcccatgtgccccgtgggcatgaataaactatggagcggctattctctgctgtatttcgaaggacaggagaaggctcacaatcaggatctgggactcgctggttcttgcctggctagatttagcaccatgccattcttatattgtaatcctggcgacgtctgttattacgcaagccgcaacgacaagtcttactggttgagtaccaccgccccactgccgatgatgcccgttgccgaagacgagattaagccatatatttcacgctgcagtgtgtgcgaagctcccgccatagcaatcgccgtgcattcacaggacgtgtccattcctcattgccctgccggctggcgctctctgtggatcggctacagctttctgatgcataccgccgcaggggatgaaggcgggggccaatctcttgtatctcccggcagctgtctggaagattttcgggctactccgttcatcgaatgcaatggagggagagggacatgccactattatgccaataaatactcattctggctcacaacaatacctgaacagagtttccaaggctctccaagtgctgacacactaaaggccgggttaatccgtacgcacatctctcgctgtcaagtctgtatgaagaatttatag

SEQ ID NO: 121614 - DNA, 318 bp, Artificial Sequence
  derived and/or modified sequence
atgggccgggaccagcgggccgtggccggccccgccctgcggcggtggctgctgttgggcactgtaacagtgggctttctcgcacagtcagtgctcgcgggagtgaagaaatttgacgtcccctgcgggggacgggactgcagcgggggttgtcagtgctatccagagaagggcgggaggggacagcccgggcctgtggggcctcagggctataatgggccacccggccttcaagggttccctgggcttcagggtaggaagggagacaaaggggagcgaggtgccccgggagttacggggccaaaaggagacgtgtag

SEQ ID NO: 121615 - DNA, 5139 bp, Artificial Sequence
  derived and/or modified sequence
atgggacgggaccagcgagccgtcgcagggccagccctgagacgatggcttttgttgggcaccgtgacggtcggctttctggcacaaagcgtgcttgccggtgtgaaaaaatttgacgttccgtgtgggggtcgtgattgcagtggcggatgtcagtgttacccggagaagggaggcagaggccagcccggaccagtgggacctcaggggtacaacggccctcccggactccagggcttcccgggactgcagggacgcaaaggggacaagggggaacggggagcccctggggttactgggcctaaaggagacgtcggtgctcggggagtgagtggatttcccggtgccgacgggatcccaggacaccccggacagggaggtccgagaggcaggccaggctatgatggatgtaacgggacacaaggtgacagcggacctcagggaccgcctggttccgaaggcttcacaggtcccccaggtccgcagggtccaaaaggccagaagggagaaccctatgctctcccaaaggaggaaagagaccggtaccgcggtgagccaggtgagcctggtttagtaggcttccaggggccaccagggcgaccaggacacgtggggcaaatgggaccagtgggcgcaccaggcagaccagggcctagcagtgatgaaagctttaaaaataagctcaagaacaaaggcctgaattattatactgtgaacagcatgcaaggagatgtgggacagcccggtcccaatggaataccttccgacactcttcaccccattatagcgccaacaggagtcaccttccaccctgatcagtacaaaggcccagtgggctggcgtggcagaccttgggtcgctggcatttcgctgaagggggaggagggtattatgggattcccaggcctccgaggctacccagggctctccggtgaaaaagggtctcccggtcagaaagggtcaagaggcctggatgggtaccaggggcctgatggaccacggggacctaagggcgaggccggtgatcctggtccacccggactgccagcctatagtccccacccctccctcgcaaagggagcgcgaggcgatcccggattcccgggtgcgcagggagaacctggatcacaaggcgagcccggagacccaggcctcccagggccacctggcctgtctattggagacggagatcagagaaggggattgcctggcgagatggggccaaagggctttattggggatcccggaatcccggcattgtatggtggaccacctggacctgatggtaagcggggtccgcctgggcctccaggcttgcccggacctccgggtcctgacggattcctgttcggtttaaaaggagccaaggggcgtgccggatttcccggattgcccggtagtccaggcgctagaggccctaaaggctggaaaggagatgccggtgagtgtagatgtaccgaaggggatgaggccattaagggtctcccagggctcccgggtccaaagggatttgccggaatcaatggcgagcccggacggaagggcgaccgcggagaccccggtcagcacgggctgcccggattcccagggttgaaaggcgttccaggtaacatcggcgctccgggacccaagggtgctaagggcgacagtagaacgataaccactaaaggcgaaaggggccagcctggcgtgccgggtgtgccagggatgaagggcgatgacggctctccgggacgtgatggattggatggattcccaggcttacctggaccccctggtgacgggattaagggcccacctggagacccagggtacccaggcataccaggaacgaaaggcactcccggagagatgggcccaccgggactggggcttccagggctcaaaggacagcgtggcttccctggggacgcaggcctccctggacccccaggattcttaggtcctccgggtccagctggaactccagggcagattgattgcgacacagatgtcaagcgtgccgttggcggagatagacaagaagcaatccaacctggatgtattggcggaccaaagggactgcccggtctacccggacctccaggccctacaggggcaaagggcttgcggggaataccaggctttgccggagccgacggaggtccaggccctagggggttgcccggtgacgctggcagagaagggttcccagggcctccgggtttcatcggtcctcggggaagcaagggagccgtcggtctgccagggccagatgggagccctggaccaatcgggttacctggccctgacgggcctcccggagaacgtggcctgcccggagaagtcttaggcgcacagcccggacctcgcggagacgccggagtaccgggtcagcctggtctgaaggggttacccggtgataggggccctcctggcttccgcggtagtcaagggatgcctggaatgccaggactgaaaggccagcctggtttgcctggcccatcagggcagccagggctgtatggccctcctggcctgcatggattccctggggcacctggacaggaagggccactgggtctccctggtatacccggtcgagagggtcttcccggagacagaggtgatcctggcgataccggtgcacccggaccggtcgggatgaagggtctgtccggagaccggggtgacgctggatttacaggcgaacaggggcatcctggctctccaggctttaagggcattgatggcatgccagggacccccggactgaagggagacaggggcagccccggtatggacgggtttcagggaatgcccggactgaaaggtcgaccgggatttcccggaagtaagggtgaggccggattcttcggaattcccggactcaagggcttggctggagaacctgggttcaaggggagcagaggtgacccaggacctccaggccctcccccagttattttgcctggcatgaaagacataaagggggagaaaggggatgagggcccaatgggtcttaaaggctatttgggggcaaagggcatccagggaatgccagggattccaggcctgtctggcatcccaggcctcccaggaaggcctgggcacattaagggcgtgaagggagacatcggagtccctggcattcccggactccctggctttcccggtgtggcgggtccccctggaatcaccgggttcccgggattcattggctcaaggggagacaagggcgcaccagggagagccggactgtatggcgaaattggcgctaccggcgattttggtgatataggcgacacaatcaatctgcctggccgtcctgggttgaaaggggagcgaggaacaactggcatcccaggcttgaaagggttttttggggaaaaggggacagagggggacattggcttcccaggcattacgggcgtgaccggcgtgcaaggaccacccggattgaagggacagacgggattcccaggtctgacaggcccacctggatcccagggggaactgggcaggatcggactcccaggcggaaagggggacgatgggtggcctggggctcccggtctccccggattcccgggtctgagaggaataaggggactccatggactccccggaacgaaaggattcccgggatctccaggttccgatatccacggcgaccccggatttcctggcccacccggtgaacgtggagaccctggggaagcgaacacccttcctggcccagttggcgtccctggacagaaaggagaccagggcgcaccaggggaacgaggcccacctggttcccctggcttgcaggggtttccaggcatcaccccacccagcaatatctccggcgcacccggagacaagggcgcaccgggaatctttgggcttaaggggtatagaggtccgccaggtcccccaggatccgcggctctgcctggctccaagggtgatactggcaatcccggagccccaggaacgcctggcacaaaaggctgggccggtgacagcggcccacaaggcagaccaggggtcttcggcttgccgggagaaaagggtccccgaggcgaacagggttttatggggaatactgggcctaccggggctgtcggagatcgcggaccgaagggtcctaaaggcgatcccggattccccggagcgcctggaactgtgggagctccgggtatcgcaggtattcctcagaagattgcagtccagccaggcaccgtcgggcctcaggggaggcgcggtcctcccggtgcacccggagaaatggggccacagggccctcctggcgagcccggtttccggggagccccaggcaaggccggtccccagggcaggggcggagtgagcgcagtgccagggtttagaggggacgagggtcccattggacaccaggggcctatcgggcaggagggagccccaggacgaccgggatctccagggctgccgggtatgcccggacgttcggtatcgattggctacctgcttgtaaagcacagtcagactgaccaggagcctatgtgtccagtaggcatgaataagttgtggtccgggtattctctgctctatttcgaggggcaggagaaggcccataatcaggatcttggcctcgcaggaagttgcctcgcacgtttctcaaccatgcctttcctctactgcaatccaggtgacgtctgctactacgctagccggaatgacaaaagttactggctgtctacaactgctcccctgcctatgatgcctgttgctgaggatgaaataaagccatatatctcgcggtgctctgtgtgtgaagcccctgctattgcaatcgcggtacactctcaagacgtgtccatccctcactgccccgctggctggagatctctgtggataggttactctttcctaatgcacaccgctgccggagatgaggggggaggccagtccctggtcagtcctggatcttgcctggaagacttccgggctactcccttcattgagtgcaatgggggtcgcggaacctgtcattattacgccaataagtattcgttctggctcaccactattccagagcaaagtttccaggggtctccaagtgccgacacattaaaggccggactgatccgcactcacatttcgcgttgtcaggtgtgcatgaagaatctgtag

SEQ ID NO: 121616 - DNA, 5138 bp, Artificial Sequence
  derived and/or modified sequence
atggggagggatcagagagctgtggcgggacccgctctgcggaggtggctcctgctcggaactgtcaccgtgggcttcctggcgcagagcgtgctcgctggcgtgaaaaaatttgacgtgccctgtggcggacgcgactgttccgggggttgtcaatgttacccagaaaaaggcggtcgcggacagccaggtccagtcggaccccagggatacaacggccctccgggactgcagggattcccaggtctgcaaggtcgcaagggagataaaggcgaacggggagctcctggcgttaccggccctaagggtgatgtcggggctcgcggagtctccgggtttccgggagccgacggtataccgggtcacccaggacagggcggtcctaggggacgcccaggctacgacggctgcaacgggacccagggtgattccgggccacagggcccacccggatcagagggatttaccggacctccgggtccacaggggcctaagggtcagaaaggagaaccttacgctctgccaaaagaggaacgggacagatacagaggtgagcccggagaacccggtctggtgggtttccagggcccaccgggaagacccggtcacgtaggacagatggggcctgtgggggcaccagggaggcctgggccacccggacctcccggtcctaagggccagcagggtaatcgaggcttgggattttacggcgtcaagggtgagaaaggcgatgtaggacagcctggcccaaacggaataccatccgacaccctgcatcccatcatagccccaacaggcgtcacatttcaccctgaccagtataagggagagaaaggctcagaaggggaacccggaattcgcggaattagtctgaagggagaggaaggaatcatggggtttcctggtctgagaggttatcctgggctatctggcgaaaaggggtctcctggtcagaagggcagccggggactcgacggctatcagggaccagacggcccaaggggaccgaagggagaggcgggtgatccagggccaccaggcctccctgcctattcgccccacccctcgctggccaaaggtgccaggggtgaccccggttttccgggagcacaaggggaacccggttcccaaggagagcctggggaccctgggctaccaggaccacctggcctgtccatcggcgacggcgatcagcgccgaggattgcccggtgagatgggtccaaagggattcattggcgatccaggcatccccgctctctatgggggtccaccagggccagatggaaaacggggaccccctggacctcccggacttcctgggccaccgggacctgacggattcctatttggactcaaaggtgcaaaaggaagagcaggattccccggactgcctggctctcccggtgcacgaggcccaaaaggttggaaaggcgatgccggagagtgccggtgcaccgaaggggatgaagcaattaagggcctccctggtttacctggaccaaaaggatttgcaggcattaatggagagccagggagaaagggggatcgcggagaccccggacagcacggattaccaggattccccggactgaagggtgtgcctggaaatatcggggcaccgggtcctaaaggggcaaagggagattctcggaccataaccaccaaaggagagcgtgggcagccaggggtgcctggagtgcctggcatgaagggagacgatggttcacctggccgtgatgggcttgacgggttccccggattgccaggccctcctggcgacgggatcaagggcccacccggagacccaggatatccgggtatacctggaactaagggtacacccggtgagatgggccctcctggtctggggcttccaggtctgaaagggcagcgaggattccccggagatgctggcctgcccggacctcctggattcctggggccacccggtcccgcaggaacacctggtcagatagactgtgacacagatgtcaagcgggcagtcggcggagaccgccaggaagcaattcagcccggttgcattggcggtcccaaggggttgcctggccttcctggaccacctggccctacaggcgcaaaaggcctccgcggaatccctggttttgctggtgccgatggcggacctggtcccagagggctgccaggagacgcagggagagaaggatttcctggcccaccaggcttcatcggacctcgcggatcgaagggtgctgtggggctccctggccctgatggctcccctggcccaatagggctgcccggtcctgacggcccacctggcgagagagggctcccgggagaagtgctcggagcacagcccggtccccgaggtgacgcaggcgtgccagggcaacccggtctcaaagggctgcctggagacagggggcctcccggatttagaggcagccaagggatgcccggtatgcccggtctgaagggacagcccggtctccctggacctagcggacagcctggcctctatggaccgccagggctccacgggttcccaggcgcacctggccaagaagggcctctgggactccccggtatcccgggacgagagggacttccaggcgaccggggagatccgggagacaccggtgcgcctggcccagtcgggatgaagggactgtctggggaccgaggagacgcaggtttcaccggagagcaggggcatcccggatcaccaggttttaaagggattgatggaatgcccggaacaccagggctgaaaggggacagaggctcccccggaatggacggatttcagggcatgcccggactgaagggacgcccagggttccctggatctaaaggagaggccggattcttcggtataccaggccttaagggcctggccggagaaccgggattcaaggggagccgaggcgatcctggccctcccggaccccctccagtgattctccccggaatgaaggatataaagggcgagaaaggcgatgagggacccatgggcctgaagggctacctgggggctaaggggatccagggcatgcccggaatccctggactgtccggaattcctggactccccggtaggccaggccatattaagggggtgaaaggggacattggagtacccggaattcccggtctcccaggattcccgggtgtagccggacccccaggaatcaccggctttcccggtttcatcggctcccggggtgataagggggctcccggaagagctgggctgtatggagaaataggcgctaccggcgatttcggcgatattggcgacaccatcaatctgccgggaaggccaggcctgaagggcgagagaggcacgacagggatcccgggactgaagggctttttcggagagaaagggaccgaaggagacattgggttcccagggattacgggtgtgacaggcgttcaagggcctccaggcctcaagggtcaaaccgggtttcctggactgactggtccccctggttcccagggtgaattgggcagaattggcctgccagggggtaagggcgacgatgggtggcctggtgcccctgggctgccaggcttccccggactgcgcggaatccggggactgcacggcttgcctggcaccaagggattccctggcagccctggttcagatatccatggcgatcctgggtttcccggaccaccaggagaaaggggggacccaggtgaggctaacactctacctgggccagtgggcgtgcctggacaaaagggggatcagggggctcctggcgaacgcggtccacccggatccccaggtttacagggcttccccggtataacacctccctccaatataagcggagcaccaggcgataaaggcgctcccggaatttttggactcaaggggtatagaggaccacctggcccacccggaagcgctgcgctccccggatctaagggggataccggcaaccccggtgctcctggtacgcccggaactaaagggtgggccggagactccggccctcagggcagaccaggtgtctttgggttaccaggtgagaagggacctaggggcgagcaagggttcatggggaatacagggccaacgggagccgttggagatcgtggacctaaaggacctaagggagaccctgggttccccggagctcctgggaccgtaggtgcccctggaatagccggtattccgcagaaaattgcagtgcagcccggaaccgtaggacctcaaggtaggcgaggccctcccggtgcacctggtgagatgggacctcaggggccacctggcgaacccggttttcgaggggctcctggcaaagctggtccgcagggcagaggaggcgtgtcggcagtccctggattcagaggcgacgaggggccaataggccatcaggggcctattggacaggagggggctcctggcaggccagggtcaccgggtcttcctgggatgcctgggagaagcgtgtcaatcggctacctcctcgttaaacattctcagaccgatcaggaaccgatgtgccccgtcggtatgaacaagctttggagcggttattcccttttgtatttcgaggggcaagagaaggcacataaccaggacttaggcctggccggatcctgcttagcgagattttccacaatgccctttttgtactgtaaccctggcgacgtctgttattatgcctctcggaacgataagtcctattggctgtcgactaccgcgccactaccaatgatgcctgtggcagaggatgaaatcaagccctacatttcacgctgctcagtgtgcgaggccccagctatcgccatcgccgtacactcacaggacgtatctattcctcactgcccagccggttggcgaagcctctggatagggtatagttttctgatgcatacagccgctggggatgaagggggaggccaaagcttggtgagcccaggatcttgcttggaggacttccgagcaactcctttcattgagtgtaacggcggaagaggaacatgtcactactacgcaaacaagtatagcttctggcttaccaccatcccagagcagagctttcaagggagcccctcggccgacacgctcaaggccggtctaatccggacgcacatttcacgttgtcaggtctgtatgaagaacctcta

SEQ ID NO: 121617 - DNA, 318 bp, Artificial Sequence
  derived and/or modified sequence
atgggacgggaccagcgagccgtggcaggacccgctctgcgaaggtggctgctgctgggtacagtgacagtcggatttttggcccaatctgtgctggccggagtcaaaaagtttgacgtaccctgtggaggacgcgactgttccggcggatgccaatgctatccagaaaagggcggtcgagggcagccagggcctgttggccctcagggctacaatggtcccccaggactgcaaggtttccctggactgcagggtcgcaaaggcgataaaggggagagaggagcacctggcgtcacagggccaaaaggagacgtttag

SEQ ID NO: 121618 - DNA, 375 bp, Artificial Sequence
  derived and/or modified sequence
atgaccctgaatgagcacgccgccttcaagcacctgttcaacaaggcccacctggccccacccctcatccacctgaccctgagcggccacagcacctgcttccgggagcaccgggtgggcggcaaggtgacagaccagcaggaccccaaggccgaggagttcttcctggtgcagaacaagatgaagagcctgccctgcctgcccctgagcacccagacccagcagcccagcgacttcagcatcttcagcccccccttcccccccttctacagcaccaagccacccctgagctcctggcctgtgctgaatgagctgctgggcaccccaccccgctggggcggcggccgggcagagggcctgctgaccagccagtag

SEQ ID NO: 121619 - DNA, 375 bp, Artificial Sequence
  derived and/or modified sequence
atgaccctgaatgagcacgccgccttcaagcacctgttcaacaaggcccacctggccccacccctcatccacctgaccctgagcggccacagcacctgcttccgggagcaccgggtgggcggcaaggtgacagaccagcaggaccccaaggccgaggagttcttcctggtgcagaacaagatgaagagcctgccctgcctgctgctgagcacccagacccggcagcccagcgacttcagcatcttcagcccccccttcccccctgtgtacagcaccaagccacccctgagctcctggcctgtgctgaatgagctgctgggcaccccaccaagaagaggaggcggccgggcagagggcctgctgaccagccagtag

SEQ ID NO: 121620 - DNA, 375 bp, Artificial Sequence
  derived and/or modified sequence
atgaccccaaatgagcacccagccttcaagcacctgttcaacaaggcccacctggccccacccctcatccacctgaccctgagcggccacagcacctgcttccgggagcaccgggtgggcggcaaggtgacagaccagcaggaccccaaggccgaggagttcttcctggtgcagaacaagatgaagagcctgccctgcctgctgctgagcacccagacccggcagcccagcgacttcagcatcttcagcccccccttcctgcccttctacagcaccaagccacccctgagctcctggcctgtgctgaatgagctgctgggcaccccaccaagaagaggaggcggccgggcagagggcctgctgaccagccagtag

SEQ ID NO: 121621 - DNA, 375 bp, Artificial Sequence
  derived and/or modified sequence
atgaccctgaatgagcacgccgccttcaagcacctgttcaacaaggcccacctggccccacccctcatccacctgaccctgagcggccacagcacctgcttccgggagcaccgggtgggcggcaaggtgacagaccagcaggaccccaaggccgaggagttcttcctggtgcagaacaagatgaagagcctgccctgcctgctgctgagcacccagacaggccagcccagcgacttcagcatcttcagcccccccttcccccccttctacagcaccaagccacccctgagctcctggcccatccccaatgagcccctgggcaccccaccaagaagaggccggggccgggcagagggcctgctgaccagccagtag

SEQ ID NO: 121622 - protein, 1691 aa, Artificial Sequence
  derived and/or modified sequence
MLINKLWLLLVTLCLTEELAAAGEKSYGKPCGGQDCSGSCQCFPEKGARGRPGPIGIQGPTGPQGFTGSTGLSGLKGERGFPGLLGPYGPKGDKGPMGVPGFLGINGIPGHPGQPGPRGPPGLDGCNGTQGAVGFPGPDGYPGLLGPPGLPGQKGSKGDPVLAPGSFKGMKGDPGLPGLDGITGPQGAPGFPGAVGPAGPPGLQGPPGPPGPLGPDGNMGLGFQGEKGVKGDVGLPGPAGPPPSTGELEFMGFPKGKKGSKGEPGPKGFPGISGPPGFPGLGTTGEKGEKGEKGIPGLPGPRGPMGSEGVQGPPGQQGKKGTLGFPGLNGFQGIEGQKGDIGLPGPDVFIDIDGAVISGNPGDPGVPGLPGLKGDEGIQGLRGPSGVPGLPALSGVPGALGPQGFPGLKGDQGNPGRTTIGAAGLPGRDGLPGPPGPPGPPSPEFETETLHNKESGFPGLRGEQGPKGNLGLKGIKGDSGFCACDGGVPNTGPPGEPGPPGPWGLIGLPGLKGARGDRGSGGAQGPAGAPGLVGPLGPSGPKGKKGEPILSTIQGMPGDRGDSGSQGFRGVIGEPGKDGVPGLPGLPGLPGDGGQGFPGEKGLPGLPGEKGHPGPPGLPGNGLPGLPGPRGLPGDKGKDGLPGQQGLPGSKGITLPCIIPGSYGPSGFPGTPGFPGPKGSRGLPGTPGQPGSSGSKGEPGSPGLVHLPELPGFPGPRGEKGLPGFPGLPGKDGLPGMIGSPGLPGSKGATGDIFGAENGAPGEQGLQGLTGHKGFLGDSGLPGLKGVHGKPGLLGPKGERGSPGTPGQVGQPGTPGSSGPYGIKGKSGLPGAPGFPGISGHPGKKGTRGKKGPPGSIVKKGLPGLKGLPGNPGLVGLKGSPGSPGVAGLPALSGPKGEKGSVGFVGFPGIPGLPGIPGTRGLKGIPGSTGKMGPSGRAGTPGEKGDRGNPGPVGIPSPRRPMSNLWLKGDKGSQGSAGSNGFPGPRGDKGEAGRPGPPGLPGAPGLPGIIKGVSGKPGPPGFMGIRGLPGLKGSSGITGFPGMPGESGSQGIRGSPGLPGASGLPGLKGDNGQTVEISGSPGPKGQPGESGFKGTKGRDGLIGNIGFPGNKGEDGKVGVSGDVGLPGAPGFPGVAGMRGEPGLPGSSGHQGAIGPLGSPGLIGPKGFPGFPGLHGLNGLPGTKGTHGTPGPSITGVPGPAGLPGPKGEKGYPGIGIGAPGKPGLRGQKGDRGFPGLQGPAGLPGAPGISLPSLIAGQPGDPGRPGLDGERGRPGPAGPPGPPGPSSNQGDTGDPGFPGIPGPKGPKGDQGIPGFSGLPGELGLKGMRGEPGFMGTPGKVGPPGDPGFPGMKGKAGPRGSSGLQGDPGQTPTAEAVQVPPGPLGLPGIDGIPGLTGDPGAQGPVGLQGSKGLPGIPGKDGPSGLPGPPGALGDPGLPGLQGPPGFEGAPGQQGPFGMPGMPGQSMRVGYTLVKHSQSEQVPPCPIGMSQLWVGYSLLFVEGQEKAHNQDLGFAGSCLPRFSTMPFIYCNINEVCHYARRNDKSYWLSTTAPIPMMPVSQTQIPQYISRCSVCEAPSQAIAVHSQDITIPQCPLGWRSLWIGYSFLMHTAAGAEGGGQSLVSPGSCLEDFRATPFIECSGARGTCHYFANKYSFWLTTVEERQQFGELPVSETLKAGQLHTRVSRCQVCMKSL

SEQ ID NO: 121623 - protein, 1028 aa, Artificial Sequence
  derived and/or modified sequence
MRAARALLPLLLQACWTAAQDEPETPRAVAFQDCPVDLFFVLDTSESVALRLKPYGALVDKVKSFTKRFIDNLRDRYYRCDRNLVWNAGALHYSDEVEIIQGLTRMPGGRDALKSSVDAVKYFGKGTYTDCAIKKGLEQLLVGGSHLKENKYLIVVTDGHPLEGYKEPCGGLEDAVNEAKHLGVKVFSVAITPDHLEPRLSIIATDHTYRRNFTAADWGQSRDAEEAISQTIDTIVDMIKNNVEQVCCSFECQPARGPPGLRGDPGFEGERGKPGLPGEKGEAGDPGRPGDLGPVGYQGMKGEKGSRGEKGSRGPKGYKGEKGKRGIDGVDGVKGEMGYPGLPGCKGSPGFDGIQGPPGPKGDPGAFGLKGEKGEPGADGEAGRPGSSGPSGDEGQPGEPGPPGEKGEAGDEGNPGPDGAPGERGGPGERGPRGTPGTRGPRGDPGEAGPQGDQGREGPVGVPGDPGEAGPIGPKGYRGDEGPPGSEGARGAPGPAGPPGDPGLMGERGEDGPAGNGTEGFPGFPGYPGNRGAPGINGTKGYPGLKGDEGEAGDPGDDNNDIAPRGVKGAKGYRGPEGPQGPPGHQGPPGPDECEILDIIMKMCSCCECKCGPIDLLFVLDSSESIGLQNFEIAKDFVVKVIDRLSRDELVKFEPGQSYAGVVQYSHSQMQEHVSLRSPSIRNVQELKEAIKSLQWMAGGTFTGEALQYTRDQLLPPSPNNRIALVITDGRSDTQRDTTPLNVLCSPGIQVVSVGIKDVFDFIPGSDQLNVISCQGLAPSQGRPGLSLVKENYAELLEDAFLKNVTAQICIDKKCPDYTCPITFSSPADITILLDGSASVGSHNFDTTKRFAKRLAERFLTAGRTDPAHDVRVAVVQYSGTGQQRPERASLQFLQNYTALASAVDAMDFINDATDVNDALGYVTRFYREASSGAAKKRLLLFSDGNSQGATPAAIEKAVQEAQRAGIEIFVVVVGRQVNEPHIRVLVTGKTAEYDVAYGESHLFRVPSYQALLRGVFHQTVSRKVALG

SEQ ID NO: 121624 - protein, 589 aa, Artificial Sequence
  derived and/or modified sequence
MRAARALLPLLLQACWTAAQDEPETPRAVAFQDCPVDLFFVLDTSESVALRLKPYGALVDKVKSFTKRFIDNLRDRYYRCDRNLVWNAGALHYSDEVEIIQGLTRMPGGRDALKSSVDAVKYFGKGTYTDCAIKKGLEQLLVGGSHLKENKYLIVVTDGHPLEGYKEPCGGLEDAVNEAKHLGVKVFSVAITPDHLEPRLSIIATDHTYRRNFTAADWGQSRDAEEAISQTIDTIVDMIKNNVEQVCCSFECQPARGPPGLRGDPGFEGERGKPGLPGEKGEAGDPGRPGDLGPVGYQGMKGEKGSRGEKGSRGPKGYKGEKGKRGIDGVDGVKGEMGYPGLPGCKGSPGFDGIQGPPGPKGDPGAFGLKGEKGEPGADGEAGRPGSSGPSGDEGQPGEPGPPGEKGEAGDEGNPGPDGAPGERGGPGERGPRGTPGTRGPRGDPGEAGPQGDQGREGPVGVPGDPGEAGPIGPKGYRGDEGPPGSEGARGAPGPAGPPGDPGLMGERGEDGPAGNGTEGFPGFPGYPGNRGAPGINGTKGYPGLKGDEGEAGDPGDDNNDIAPRLLRVLLVTGLDLGPTALEAAADQH

SEQ ID NO: 121625 - protein, 107 aa, Artificial Sequence
  derived and/or modified sequence
MRAARALLPLLLQACWTAAQDEPETPRAVAFQDCPVDLFFVLDTSESVALRLKPYGALVDKVKSFTKRFIDNLRDRYYRCDRNLVWNAGALHYSDEVEIIQGLTRMP

SEQ ID NO: 121626 - DNA, 3087 bp, Artificial Sequence
  derived and/or modified sequence
atgagagcggcgagagccctcctcccactgttactccaagcttgctggactgctgcccaggacgaacccgaaacaccaagggccgttgcattccaggattgccccgtggatctcttttttgtattggacacctccgaatccgttgcccttcgtttgaagccatatggtgcactggttgataaggtgaaatcctttacgaaacgctttatcgataacctgcgcgatcggtactacagatgcgatcgaaacttggtgtggaatgcaggggccctgcattactccgatgaggttgagatcatacaggggcttacacggatgcctggggggcgcgatgcattgaaaagttcggtggacgcagtgaagtactttggcaaaggcacatataccgactgcgctatcaagaaagggctggagcagttattggtgggggggagtcacctgaaagagaacaagtacctgatcgtggtgacagacggccatcccctggagggatacaaggaaccttgtggcggactcgaagatgccgtgaacgaagcgaaacacctgggggtgaaggtgttctctgttgccataacacccgaccaccttgaacctaggctctcaatcatcgcaacagaccacacctatcgaaggaacttcacggcggccgattggggacagtctcgggatgcggaggaggcaatcagccagaccattgataccatcgttgacatgattaagaacaacgttgagcaggtctgttgttccttcgaatgccagcccgcaaggggaccccctggattacgtggagacccaggcttcgagggagagcgtggcaaacccggcctccccggcgaaaagggagaggctggggaccccgggcggccaggagatctggggccggtgggctatcagggaatgaagggtgaaaaggggagccgaggagagaaaggaagtaggggcccaaaggggtacaagggcgagaaaggcaaaagagggattgatggcgtcgacggcgtcaagggtgaaatggggtaccccggcctgcccggatgcaagggctccccaggatttgatggcattcagggccccccgggcccaaaaggggaccctggggcattcggattgaagggtgagaagggcgagccaggagccgacggcgaggctgggagacctgggagcagtgggcctagtggagatgaaggtcagcccggcgagccgggccctccaggggagaagggcgaagcaggcgatgagggcaatccaggtccggacggagcccctggcgagaggggtggccctggggaaaggggccctagaggaaccccgggaacccgggggccccgcggggaccccggggaggccggccctcaaggagatcagggacgcgagggccctgtgggagttcctggtgatccgggagaggcaggtcctattggccccaaggggtacaggggcgatgagggccctcctggaagcgagggagcccggggagcacctggacccgctggcccacccggggaccctggactgatgggagagaggggcgaagacgggccagcaggtaacggaacagaaggattcccaggattccccggataccctggcaatcgcggggcccctggaatcaatggaacgaagggctatccaggcctgaagggagatgagggcgaggctggggaccccggcgatgataacaatgacatcgcgcctcgcggagttaaaggcgcaaaaggttatcggggccctgaaggccctcagggcccccctgggcaccaaggacctcccggccccgatgaatgcgagatcctggatattattatgaaaatgtgctcatgttgcgaatgtaagtgcgggcccatcgacttattatttgttctggactctagtgagtcaatcggtctgcagaactttgaaatagctaaagatttcgtcgttaaggtgatcgaccgcttgagcagggacgaactggtcaagtttgaaccaggtcaatcctacgccggggtcgtccagtactcccattcacagatgcaagaacatgtgagcttgagaagtccatccatccgtaacgtgcaggagctgaaggaagccattaagagtctgcagtggatggctggcgggacctttaccggggaagcccttcagtacacccgggatcagctcctgccaccaagccctaacaacaggatagctttggtcattaccgacggccgatccgatacccagagagacacaaccccactcaatgtgctttgttctccggggattcaggtggtgtccgtgggaattaaggacgtctttgacttcatcccggggagcgatcagctgaatgtcatatcgtgtcagggcctcgctccatcacaggggagacctggcctgtccctggtaaaggaaaattatgcagaactgctggaagacgcattcctcaagaacgtcactgctcaaatatgcatagataagaaatgtcccgactatacgtgccccataacttttagctctccagcggatatcacaatcctactggacggctctgccagcgtgggctcgcacaacttcgataccactaagcgattcgctaaacggctcgccgagcgatttttaaccgcgggacgcaccgatcctgcacatgatgttagagtcgcagtggtgcaatattccggtactggccaacagagaccagagcgagcctccctgcagtttcttcagaattataccgcgctcgccagtgccgtggacgctatggacttcatcaacgatgccactgacgttaacgatgctctggggtatgtgacaaggttctaccgcgaggcctctagcggcgcagcgaagaagcgtctgctgctgttctctgatggcaactcgcagggggccacgcctgccgcaatagaaaaggcggtccaagaggctcagagagctgggatcgagatatttgtggttgtggtgggtcggcaggttaatgaaccccacatcagggtactcgtgacggggaagaccgccgagtatgatgtggcgtatggagaaagccacctctttcgggtcccttcataccaagctctgctgcgaggggtgtttcaccagactgtgtccagaaaggtggccctgggttag

SEQ ID NO: 121627 - DNA, 1770 bp, Artificial Sequence
  derived and/or modified sequence
atgagagctgccagggcactgctccctcttctcctgcaggcttgttggacagcggcacaagatgaaccggaaaccccgcgggctgtcgccttccaggattgccctgtggacctgtttttcgtcctggatacgtctgaatccgtggccctgagattgaagccttacggcgctctagtagacaaggtcaaatccttcaccaaacgtttcatagataatttgagagatcgatactaccgatgcgatcggaacctggtctggaacgctggcgctctgcactactccgatgaggtcgaaattatccagggtctgacacgaatgcctggcgggagagacgccctgaaaagttcagtcgacgccgtaaagtatttcggaaaaggtacttataccgactgtgctataaagaagggtcttgaacagcttctggtgggaggctctcacctgaaagaaaacaaatatttaatcgtggtgacagatggtcaccctttggagggatacaaggaaccatgtggcgggttagaagatgccgtcaatgaagccaaacatctgggggttaaggtgttctcggtcgccattactccagaccatctcgaacctcggctttcaatcattgctacagatcacacatacaggcggaactttaccgctgctgattggggccagtctagagacgccgaggaggccatctcccagaccattgataccatcgttgacatgatcaagaataatgtggaacaggtatgttgttcatttgaatgccagcccgcccgcggaccaccaggccttagaggggatcccgggtttgaaggggagagaggcaagcctggcctcccaggggagaagggggaggccggcgaccctggacgacctggcgacctggggccagtgggctatcagggtatgaaaggcgaaaaaggcagtcggggagagaagggcagtcgcggccctaaggggtataagggcgaaaaagggaagcgcggaattgacggtgtggatggggtcaagggtgaaatgggataccccggcctccctggctgtaagggcagccccggctttgatggcatccagggaccacccgggcctaagggagatcctggggcttttggcctgaagggcgaaaagggagaaccgggggcggatggggaagcaggtagaccagggagttctggcccttccggggatgaaggccaacccggagaacccgggcctcctggggagaaaggcgaggcgggggatgaaggtaatccaggtccggacggagctcccggtgaaagaggggggcctggcgagaggggtccgcgaggaactcctggcacccgtgggcctcgcggggatcccggcgaggcaggacctcaaggcgaccaaggacgggagggaccggtcggggtgccgggtgatcccggggaagccggacccattggcccgaaggggtacagaggagacgagggaccacctggctcagaaggagctcggggcgccccagggcccgcgggacccccgggagatcccggactaatgggcgaacggggcgaggacggtccggcaggcaatggtaccgagggctttcctggctttccaggatatcccgggaatcgtggcgcaccagggatcaacggtaccaagggctacccagggctgaagggcgacgagggagaggccggcgatcccggcgacgacaataatgatatcgccccgaggctgctgcgtgtgcttctggtgaccgggttggacctcggtcccacagccctggaggccgctgccgaccagcactag

SEQ ID NO: 121628 - DNA, 324 bp, Artificial Sequence
  derived and/or modified sequence
atgcgcgcggcccgagcattactgcctctcctgttacaggcgtgctggactgctgcacaggacgagccagaaacacctagggccgtggcatttcaggactgccctgtagacctgttctttgtgctagatacttctgaatcagtggctctgcgtctgaagccatatggggcattggtcgacaaagttaagagttttaccaaacgctttattgacaatttgcgagaccgatactatagatgtgatagaaacttagtgtggaacgccggcgctctccattactctgacgaggtagaaatcatccagggcctgaccaggatgccatag

SEQ ID NO: 121629 - DNA, 3087 bp, Artificial Sequence
  derived and/or modified sequence
atgagagctgcccgggccctgctgcccctgctgctgcaggcctgctggacagctgcccaggatgagcctgagacccccagggctgtggccttccaggactgccctgtggacctcttctttgtgctggacaccagcgagagcgtggccctgcggctgaagccctatggagccctggtggacaaggtgaagagcttcaccaagcgcttcatcgacaacctgcgggaccgctactaccgctgtgacaggaacctggtgtggaatgctggggccctgcactacagtgatgaggtggagatcatccagggcctgaccaggatgcctgggggcagagatgccctgaagagctctgtggatgctgtgaagtactttgggaagggcacctacacagactgtgccatcaagaagggcctggagcagctgctggtgggcggcagccacctgaaggagaacaagtacctgattgtggtgacagatggccaccccctggagggctacaaggagccctgtggcggcctggaggatgctgtgaatgaggccaagcacctgggcgtgaaggtgttttctgtggccatcaccccagaccacctggagccccggctgagcatcatcgccacagaccacacctacagaagaaacttcaccgctgctgactggggccagagcagagatgctgaggaggccatcagccagaccatcgacaccatcgtggacatgatcaagaacaacgtggagcaggtgtgctgcagctttgagtgccagcctgcccggggccccccaggcctgcggggggaccccggctttgaaggagagcggggcaagccaggcctgcctggagagaagggggaggccggggaccccggccggcctggggacctgggccctgtgggctaccagggcatgaagggggagaagggcagcagaggagagaagggcagccggggccccaagggctacaagggggagaagggcaagaggggcattgatggagtggatggagtgaagggggagatgggctacccaggcctgcccggctgcaagggcagccctggctttgatggcatccagggccccccaggccccaagggggaccccggggccttcggcctgaagggggagaagggggagcccggggctgatggagaggccggccggcccggcagcagcggccccagcggagatgagggccagcctggagagcccggccccccaggagagaagggggaggccggagatgagggcaaccctggcccagatggagcccctggagagcggggcggccctggagagcggggcccccggggcaccccaggcacccggggccccaggggggaccctggagaggccggcccccagggcgaccagggccgggagggccctgtgggcgtgcctggggaccccggggaggccggccccatcggccccaagggctacagaggagatgagggccccccaggcagcgagggcgcccggggggcccctggccctgctggccccccaggggaccccggcctgatgggagagcggggggaggatggccctgctggaaatggaacagagggcttccctggcttccctggctacccaggcaacagaggagcccctggcatcaatggcaccaagggctacccaggcctgaagggagatgaaggagaggccggggaccctggagatgacaacaatgacatcgccccccggggcgtgaagggggccaagggctaccggggccctgagggcccccagggccccccaggccaccagggccccccaggcccagatgaatgtgagatcctggacatcatcatgaagatgtgcagctgctgtgagtgcaagtgtggccccatcgacctgctgtttgtgctggacagcagcgagagcatcggcctgcagaactttgaaattgccaaggactttgtggtgaaggtgattgaccggctgagcagagatgagctggtgaagtttgagcccggccagagctatgctggggtggtgcagtacagccacagccagatgcaggagcacgtgtccctgcggagccccagcatcagaaatgtgcaggagctgaaggaggccatcaagagcctgcagtggatggccggcggcaccttcaccggggaggccctgcagtacacccgggaccagctgctgccccccagccccaacaacagaattgccctggtgatcacagatggccgcagtgacacccagagggacaccacccccctgaatgtgctgtgcagccctggcatccaggtggtgtctgtgggcatcaaggatgtgtttgacttcatccctggcagtgaccagctgaatgtcatcagctgccagggcctggcccccagccagggccggcccggcctgagcctggtgaaggaaaattatgcagagctgctggaggatgccttcctgaagaatgtgacagcccagatctgcatcgacaagaagtgcccagactacacctgccccatcaccttcagcagccctgctgacatcaccatcctgctggatggcagcgcctctgtgggcagccacaactttgacaccaccaagagatttgccaagaggctggccgagcgcttcctgacagctggccgcacagatcctgcccatgatgtgcgggtggccgtggtgcagtacagcggcaccggccagcagaggcctgagcgggccagcctgcagttcctgcagaactacacagccctggccagcgctgtggatgccatggacttcatcaatgatgccacagatgtgaatgatgccctgggctacgtgacccgcttctaccgggaggccagcagcggggccgccaagaagaggctgctgctcttcagtgatggcaacagccagggcgccaccccagctgccatcgagaaggctgtgcaggaggcccagagagctggcatcgagatctttgtggtggtggtgggccggcaggtgaatgagccccacatccgggtgctggtgacaggcaagacagcagaatatgatgtggcctacggggagagccacctgttccgggtgcccagctaccaggccctgctgcggggcgtcttccaccagacagtgtccaggaaggtggccctgggctag

SEQ ID NO: 121630 - DNA, 1770 bp, Artificial Sequence
  derived and/or modified sequence
atgagagctgcccgggccctgctgcccctgctgctgcaggcctgctggacagctgcccaggatgagcctgagacccccagggctgtggccttccaggactgccctgtggacctcttctttgtgctggacaccagcgagagcgtggccctgcggctgaagccctatggagccctggtggacaaggtgaagagcttcaccaagcgcttcatcgacaacctgcgggaccgctactaccgctgtgacaggaacctggtgtggaatgctggggccctgcactacagtgatgaggtggagatcatccagggcctgaccaggatgcctgggggcagagatgccctgaagagctctgtggatgctgtgaagtactttgggaagggcacctacacagactgtgccatcaagaagggcctggagcagctgctggtgggcggcagccacctgaaggagaacaagtacctgattgtggtgacagatggccaccccctggagggctacaaggagccctgtggcggcctggaggatgctgtgaatgaggccaagcacctgggcgtgaaggtgttttctgtggccatcaccccagaccacctggagccccggctgagcatcatcgccacagaccacacctacagaagaaacttcaccgctgctgactggggccagagcagagatgctgaggaggccatcagccagaccatcgacaccatcgtggacatgatcaagaacaacgtggagcaggtgtgctgcagctttgagtgccagcctgcccggggccccccaggcctgcggggggaccccggctttgaaggagagcggggcaagccaggcctgcctggagagaagggggaggccggggaccccggccggcctggggacctgggccctgtgggctaccagggcatgaagggggagaagggcagcagaggagagaagggcagccggggccccaagggctacaagggggagaagggcaagaggggcattgatggagtggatggagtgaagggggagatgggctacccaggcctgcccggctgcaagggcagccctggctttgatggcatccagggccccccaggccccaagggggaccccggggccttcggcctgaagggggagaagggggagcccggggctgatggagaggccggccggcccggcagcagcggccccagcggagatgagggccagcctggagagcccggccccccaggagagaagggggaggccggagatgagggcaaccctggcccagatggagcccctggagagcggggcggccctggagagcggggcccccggggcaccccaggcacccggggccccaggggggaccctggagaggccggcccccagggcgaccagggccgggagggccctgtgggcgtgcctggggaccccggggaggccggccccatcggccccaagggctacagaggagatgagggccccccaggcagcgagggcgcccggggggcccctggccctgctggccccccaggggaccccggcctgatgggagagcggggggaggatggccctgctggaaatggaacagagggcttccctggcttccctggctacccaggcaacagaggagcccctggcatcaatggcaccaagggctacccaggcctgaagggagatgaaggagaggccggggaccctggagatgacaacaatgacatcgccccccggctgctgcgggtgctgctggtgacaggcctggacctgggccccacagccctggaggccgctgctgaccagcactag

SEQ ID NO: 121631 - DNA, 324 bp, Artificial Sequence
  derived and/or modified sequence
atgagagctgcccgggccctgctgcccctgctgctgcaggcctgctggacagctgcccaggatgagcctgagacccccagggctgtggccttccaggactgccctgtggacctcttctttgtgctggacaccagcgagagcgtggccctgcggctgaagccctatggagccctggtggacaaggtgaagagcttcaccaagcgcttcatcgacaacctgcgggaccgctactaccgctgtgacaggaacctggtgtggaatgctggggccctgcactacagtgatgaggtggagatcatccagggcctgaccaggatgccctag

SEQ ID NO: 121632 - DNA, 3087 bp, Artificial Sequence
  derived and/or modified sequence
atgcgggccgcccgggccctgctgcccctgctgctgcaggcctgctggacagctgcgcaggacgagcccgagacaccgcgggccgtggcatttcaggattgtcctgtggacctcttttttgtacttgacacgtccgaaagtgttgccttgcgactgaaaccttatggtgccctggttgacaaggtgaagagtttcaccaagcgttttatcgacaatctaagagatcgctattacaggtgtgatcggaacttagtctggaatgccggcgcgctgcattatagcgatgaggtggagattatccaaggcctgaccagaatgccgggggggcgggacgcgctgaaatctagcgttgacgccgtcaaatacttcggcaaaggcacttacacagattgtgccattaagaagggcctggaacagcttctcgttgggggtagccaccttaaggagaataaatacctgatcgtcgttaccgatgggcatccattagagggttataaggagccttgcggcggtctggaggatgcggtgaacgaggccaagcatttgggtgttaaggtttttagcgtggccatcacacctgaccacctggaaccccgcctctcaatcatcgctacagatcacacctaccgtcgaaacttcactgccgcggactggggccagtctcgggacgctgaagaggcgatcagtcagacaatcgacaccattgttgacatgataaagaataacgtggagcaggtgtgttgtagcttcgaatgccagccagcacgaggtccccccggtctccgaggtgacccagggttcgaaggcgaacgcgggaagccaggcctgccaggggaaaagggcgaagccggagatcctggcaggccaggggatttaggcccagttggctatcaggggatgaaaggagagaaggggagtaggggagagaagggatccaggggccccaaaggatacaagggtgagaagggaaagaggggcatcgatggcgtcgacggcgtcaaaggggagatgggttaccctgggctaccaggttgtaaggggtcccctgggtttgacgggattcaaggcccccctggacccaagggggacccgggtgcattcgggcttaagggggagaagggagaaccaggagccgatggcgaagctggtaggccagggtctagcgggccaagcggggatgaagggcagcccggtgagccaggcccgcccggggaaaagggcgaggccggtgacgaggggaatcctggcccagatggagcccccggagaaagaggtgggcccggcgaacgtggccctcgaggcactccaggcacaagaggtccacgcggggatccaggcgaggctggaccacagggcgaccagggacgggaaggccccgtcggggtgccaggggatccaggagaagccggtccaatagggccaaaggggtacagaggcgatgagggcccacctggaagcgaaggcgccagaggcgctcccggcccagccggccctcctggtgatccaggcctgatgggcgaaaggggagaggacgggcccgcaggcaatgggactgaggggttccctggattccccggatatcccggaaatcgcggggctcccggaatcaacgggacaaaggggtacccgggcctcaagggggacgagggcgaagcaggagaccctggggacgacaataacgatatcgccccaaggggcgtgaagggcgcaaagggctataggggtccagaaggcccacagggccctcccggccatcaggggccaccaggccccgacgaatgcgagatcctggacatcataatgaaaatgtgtagttgctgcgagtgcaaatgtggccctattgatcttctttttgtcttagacagctcagagtcaattggcctgcaaaatttcgaaattgcaaaagattttgtggttaaggtcattgaccggctgagccgcgacgaactggtgaagttcgagccggggcaatcttacgcaggcgtcgtccagtactcacatagccagatgcaggagcacgtgtcattgcgatccccgagcatcagaaacgtgcaggaattgaaagaggcaatcaaaagcctgcagtggatggcggggggcacgttcactggggaggctctccaatataccagagatcagttgttaccgccttcacctaataatcggatcgcattagtgattaccgatggacgaagcgacactcagcgagacaccactcctctgaacgttctctgtagtccaggaattcaagttgtgagtgttgggataaaggacgtgttcgacttcattcctggaagcgatcagctgaacgtcatcagctgccaaggcttagcaccaagtcagggcaggccaggcctcagccttgttaaggaaaactatgcagaactgctagaggacgcattcttgaaaaacgtaactgctcaaatatgcatcgataaaaagtgcccagactatacctgtcctataacattttcaagcccggctgatatcacgattctcctcgacggatcagcatctgttgggagtcataatttcgatacaactaagagatttgccaaacggttggcggagcggtttttgacggccggaaggacagatccagcccacgacgtccgggttgctgttgtccagtactccggcacaggccagcagcgtccggagcgagcgagcttacagttcctgcagaactatacagcattggcctctgcagtggacgccatggattttatcaacgatgcaactgacgtgaatgatgctctcggatacgtaacgaggttctacagagaagccagctccggcgctgcaaagaaaagactgctgcttttctccgatggtaatagccagggcgcaacccccgcagcaatcgagaaagcagtccaagaagcacagagagccggcattgagattttcgtagtggtggtgggccgacaggtgaatgagccacacatccgagtactcgttacgggcaaaaccgccgaatatgatgtggcatacggagaatctcatctgtttcgcgtgccctcctatcaagcactcttacggggggttttccaccagactgtttccaggaaagtagccctggggtag

SEQ ID NO: 121633 - DNA, 1770 bp, Artificial Sequence
  derived and/or modified sequence
atgcgggccgcccgggccctgctgcccctgctgctgcaggcctgctggacagcagcccaggatgagcccgagactcctagggctgtcgccttccaagattgtcccgtggatctctttttcgtgctcgatacctcggaatcagtggcacttcgtctcaagccatacggggcactggtggacaaagtcaagtcgtttacaaagaggtttattgacaacttgcgcgaccggtattacaggtgcgatagaaatctggtgtggaacgccggcgctctgcattattcagacgaagtggagattatacagggcctcacacggatgcctggcggtagggacgccctgaagagcagcgtggatgctgtaaaatatttcggtaaaggtacttataccgattgtgccattaagaaaggactcgagcaactcctagtcgggggctcccatcttaaggaaaacaagtacctgatcgtagtaactgacggacaccctctagagggctataaggagccctgcggtggtttagaggacgctgtgaacgaggctaagcacctgggcgtgaaagtatttagcgtcgctatcacccctgatcacctggagccacgactgtcaatcatcgccaccgatcatacgtatcggcgcaactttactgccgcagactgggggcaatcccgcgatgccgaggaagccatctcacagaccattgataccatagtagacatgatcaagaacaatgttgagcaggtgtgttgctctttcgagtgccagcccgcccgcggcccaccaggtctccggggagatcctgggtttgagggagagcggggcaagcccgggctgccaggcgagaaaggtgaagccggcgatccggggaggcctggggatcttggccccgtgggctatcaggggatgaagggcgagaagggctctcgcggagaaaaagggagtagaggtcccaaaggctataagggggagaagggtaaaagagggatagacggggtggatggggtcaagggtgaaatgggttaccccggtcttccaggctgtaaaggctctccggggttcgacggcattcaggggccaccaggccccaagggcgatcccggcgcatttggcctgaagggtgagaagggggaacctggcgctgatggagaggcaggtcgaccaggatcaagcgggccttctggagatgaaggccaacctggtgagccagggcctccaggtgaaaaaggggaagctggagatgaaggcaacccgggccctgatggtgccccaggggaaaggggaggcccgggagagagaggccccagaggtacacccgggacaagaggcccgaggggagaccctggggaggctggtccccagggggaccaaggtagggaagggcctgtgggagtgccgggtgatcccggcgaagccggcccgatcggcccaaaggggtaccgtggagatgagggccccccagggagcgaaggcgcaaggggggctccaggccccgcggggccgccaggagatcctggtttgatgggagaaaggggggaagacggcccagctggcaacggcacggagggcttcccaggtttccccggttatcctggaaacaggggggcccccggtatcaatgggacgaaaggttaccctggactgaagggcgacgaaggcgaggccggcgatcctggcgatgataacaacgatattgcccctaggctgctgagggtattgttggtgaccgggctcgaccttgggcctacagcactcgaagctgccgccgatcaacactag

SEQ ID NO: 121634 - DNA, 324 bp, Artificial Sequence
  derived and/or modified sequence
atgcgggccgcccgggccctgctgcccctgctgctgcaggcctgctggaccgcagctcaagatgagcctgagaccccacgagctgttgcctttcaagattgccccgtggatctcttcttcgtcctagatacatcagaaagtgtggctttgcgactcaagccgtacggcgcgttagtggataaagtcaagagtttcaccaaaagatttatcgacaatctgcgggatcgttactacagatgcgacaggaatctggtgtggaacgctggtgcattgcactactctgacgaggtcgagattattcaggggttaacccggatgccttag

SEQ ID NO: 121635 - DNA, 3087 bp, Artificial Sequence
  derived and/or modified sequence
atgagggcagcccgagctctcctccctcttctgctgcaggcctgttggacagccgcacaggacgaacctgaaacccccagagccgtggccttccaagattgtcctgtggatttattctttgtgctggacactagtgagtccgtggcccttcgactgaaaccttacggcgctctcgtggataaggtcaagtcctttactaagcggttcattgacaaccttagggaccggtattaccggtgcgacagaaacttagtgtggaatgctggcgctctgcattactctgacgaggtggagattatacaaggcctcacaagaatgcccggaggaagggatgctctgaagtcttcagtagatgccgtcaagtacttcggaaagggtacatacaccgattgtgcaattaagaaagggctggagcaactgttggtaggtggaagccacctgaaggaaaacaagtacctcatagtagtgaccgatggccaccctctggaggggtataaagagccttgtggcggactggaagacgctgtgaatgaggcaaaacacctgggcgtcaaggttttttccgttgcaatcactccagaccacttagaaccacgcctgtctattatagcaacagaccatacataccggcgaaatttcacagctgccgattgggggcagagccgagacgcggaagaggccatctcccagacgatagatacaatcgtggacatgatcaagaataacgtagagcaggtttgctgctccttcgagtgtcaaccggcaaggggtcctcctggtctccgcggagacccaggcttcgagggcgagcgcggaaagcctggtttacccggtgagaagggagaggctggcgatcccggaaggcctggggacctcgggcctgtgggttatcaaggaatgaaaggtgagaagggctcccgtggagaaaaaggatcacggggtccgaagggctataaaggagaaaaaggaaagcgtggtatcgacggagtggatggcgtcaagggcgagatgggttaccccggactcccaggatgcaagggctcacctggctttgacgggatccagggccctcctggaccaaaaggagaccccggagcgttcggccttaagggcgagaaaggggaacctggagcagatggcgaggccggtaggcccggatcctcaggacctagcggagacgagggccagccaggcgagccaggcccacctggtgaaaagggtgaagccggagacgagggcaatcctggcccagatggagccccaggggagagaggagggccaggcgagagaggcccaagaggcacacctggaacacgcggtccgagaggggaccccggtgaagcagggcctcagggggaccaggggagggaaggccctgtaggagtccctggcgacccaggagaggccggtcccatcggccctaagggatatcgaggcgacgagggacctccagggtctgagggtgccaggggggctcctggaccagctggaccccctggggatcctggactcatgggtgagcggggagaagatggcccagcgggtaatggaacagagggatttcctggattccccggatacccgggtaatagaggagcccctgggatcaatggaaccaaaggctaccctggactgaagggcgacgaaggcgaggcaggggatcctggcgatgataacaacgacattgcccctcggggtgtgaaaggggctaaagggtaccggggacctgaaggtccccagggacccccagggcatcagggacctcctggacccgacgagtgcgagattctagatataatcatgaagatgtgcagctgttgtgaatgtaagtgcggacctattgacctgctgttcgtgctggattcttccgaaagcatcggcctccaaaatttcgaaattgcaaaggacttcgtagtgaaggtaatcgatcgtctctcccgagacgaactcgtgaagttcgaacctgggcagtcctacgcaggggtggtgcagtactcccacagccagatgcaggagcacgtcagccttcggagcccatcgatccgtaacgtacaggagctaaaggaagccatcaaatccctccagtggatggcgggaggcactttcacaggggaggccttgcagtacactagggatcagctgttgcctccgagcccgaataataggattgcgctggtgatcacagatggcagatccgatactcagagggatacaactcctttgaatgtcctgtgcagccctggcatccaggtggtgtccgtgggaatcaaagacgtgttcgacttcatccccggaagtgaccagctgaacgtgatctcatgccagggcttagcaccctcacaaggccgacccggactgagcctggtaaaagagaattatgccgaactactggaggacgcctttctcaagaatgtgaccgcccagatctgcatcgacaagaagtgtcctgattacacctgtcccattacgttttcgtcgcccgcagacatcacgatcctcctggatggtagcgcttcagtgggaagtcacaacttcgacaccacgaagcgatttgctaaaagactcgcagaacggtttttgactgcgggtaggaccgacccagcccatgacgtcagagttgccgtggtccagtatagcggaaccgggcagcagagacctgagagagccagtcttcagtttcttcagaactacactgccctagcttctgctgtggatgcaatggatttcattaacgacgcaaccgacgtcaacgacgccctgggatatgtcacacgcttctaccgcgaagcaagtagtggcgcagccaagaagcgccttttgcttttcagcgacggcaattctcagggcgctacaccggctgccattgagaaagccgtccaggaagcccagagggcaggtattgagatatttgttgtggtggttgggcgtcaggttaatgagccccacatccgcgttttggtaaccggaaaaacagcagagtacgatgttgcttacggggagtctcatttgtttagagtgccttcttaccaggcattgctgagaggcgtctttcaccagaccgtgtcccgtaaggtggccctcgggtag

SEQ ID NO: 121636 - DNA, 1770 bp, Artificial Sequence
  derived and/or modified sequence
atgcgagcagccagggcactgctgcctctcctgctgcaggcatgctggacagcggctcaagatgagcctgagactcctagagctgttgcgttccaagattgtcccgtggacctctttttcgtgttggacacgtcagaatccgtggccctgcgtctcaagccctatggtgccctcgtggacaaagtcaaatcttttacaaaacgctttatagataacctccgggacaggtattacaggtgcgatcggaatcttgtttggaacgccggtgcattgcactacagcgatgaggttgagatcatccaggggctgacccggatgcccggaggccgagatgcacttaagtcctcagtagatgcagtgaagtatttcggcaagggcacatacacagactgtgccattaaaaaaggactcgagcagctgctggttgggggatcacatctcaaggaaaacaagtacctcatcgtggtaaccgacggacacccccttgagggttataaggagccttgtgggggactggaggacgccgtgaatgaggctaaacatcttggggtcaaagtcttcagcgttgctatcacacccgatcacctcgagccgaggctatctattatcgctactgatcatacctaccggagaaacttcaccgccgcagactggggacagtcccgcgacgcagaagaagcgatatctcagaccattgacaccattgttgacatgataaagaacaacgttgaacaggtctgttgttccttcgagtgtcaacccgcaagaggaccccctggactgagaggcgacccagggttcgagggcgagcgaggaaagccaggcctgcccggagagaaaggggaggcaggagatcctggacgccctggggatttggggcctgtcggctaccaaggaatgaaaggtgagaagggctcgcgcggagagaaaggttctaggggccctaaggggtacaaaggagaaaagggtaagagagggattgatggcgtggacggagtgaaaggagaaatgggataccccggattgccagggtgcaagggcagtcccggtttcgacgggattcagggaccacctggccctaagggcgatcctggcgctttcggccttaagggggaaaaaggagaacccggtgctgacggggaagctggaagacccggttcaagcgggccatccggtgacgagggtcagcccggtgagcctggtccacccggagagaagggcgaggcaggagacgaaggaaaccctgggcctgacggtgcgcctggcgagaggggcggacccggtgagagagggccacggggaacaccaggaaccaggggcccacgcggagaccctggggaggccggtccacagggagatcagggcagagaaggtccggtaggagtgccaggagacccaggagaagcaggcccaataggacccaagggatataggggggatgaagggcctcccggtagcgagggggctaggggcgctcccggtcccgcaggaccacctggggatccaggcctgatgggagagcgaggtgaggacggtcccgctggaaacggcacagaaggcttccctggctttcctgggtatccaggcaaccggggagctcctggaattaatgggaccaagggttatccaggcttaaaaggagatgagggtgaagccggagaccctggagatgataataacgacatcgcacccagattgctcagggtattgctcgttacagggctggacctcggcccaacagccctagaggctgcagcggatcagcactag

SEQ ID NO: 121637 - DNA, 324 bp, Artificial Sequence
  derived and/or modified sequence
atgagagcagcaagggccctgctccctttgctgttgcaagcatgttggactgccgctcaggacgaaccagagacaccgagagctgtggccttccaagactgtcctgttgatctcttcttcgtactggatactagcgaaagtgtggctctccgactcaaaccgtacggagctttagtggataaagtaaagtccttcacaaaaaggtttattgataatctgcgagaccggtactaccgatgcgatcgaaacctcgtgtggaatgccggagctcttcactacagtgatgaggtggagattatccagggattgacccggatgccttag

SEQ ID NO: 121638 - DNA, 4238 bp, Artificial Sequence
  derived and/or modified sequence
tccttgccctccgctctcactctggctgggagcagaaggcagcctcggtctctgggcggcggcggcggcccactctgccctggccgcgctgtgtggtgaccgcaggccccagacatgagggcggcccgtgctctgctgcccctgctgctgcaggcctgctggacagccgcgcaggatgagccggagaccccgagggccgtggccttccaggactgccccgtggacctgttctttgtgctggacacctctgagagcgtggccctgaggctgaagccctacggggccctcgtggacaaagtcaagtccttcaccaagcgcttcatcgacaacctgagggacaggtactaccgctgtgaccgaaacctggtgtggaacgcaggcgcgctgcactacagtgacgaggtggagatcatccaaggcctcacgcgcatgcctggcggccgcgacgcactcaaaagcagcgtggacgcggtcaagtactttgggaagggcacctacaccgactgcgctatcaagaaggggctggagcagctcctcgtggggggctcccacctgaaggagaataagtacctgattgtggtgaccgacgggcaccccctggagggctacaaggaaccctgtggggggctggaggatgctgtgaacgaggccaagcacctgggcgtcaaagtcttctcggtggccatcacacccgaccacctggagccgcgtctgagcatcatcgccacggaccacacgtaccggcgcaacttcacggcggctgactggggccagagccgcgacgcagaggaggccatcagccagaccatcgacaccatcgtggacatgatcaaaaataacgtggagcaagtgtgctgctccttcgaatgccagcctgcaagaggacctccggggctccggggcgaccccggctttgagggagaacgaggcaagccggggctcccaggagagaagggagaagccggagatcctggaagacccggggacctcggacctgttgggtaccagggaatgaagggagaaaaagggagccgtggggagaagggctccaggggacccaagggctacaagggagagaagggcaagcgtggcatcgacggggtggacggcgtgaagggggagatggggtacccaggcctgccaggctgcaagggctcgcccgggtttgacggcattcaaggaccccctggccccaagggagaccccggtgcctttggactgaaaggagaaaagggcgagcctggagctgacggggaggcggggagaccagggagctcgggaccatctggagacgagggccagccgggagagcctgggccccccggagagaaaggagaggcgggcgacgaggggaacccaggacctgacggtgcccccggggagcggggtggccctggagagagaggaccacgggggaccccaggcacgcggggaccaagaggagaccctggtgaagctggcccgcagggtgatcagggaagagaaggccccgttggtgtccctggagacccgggcgaggctggccctatcggacctaaaggctaccgaggcgatgagggtcccccagggtccgagggtgccagaggagccccaggacctgccggaccccctggagacccggggctgatgggtgaaaggggagaagacggccccgctggaaatggcaccgagggcttccccggcttccccgggtatccgggcaacaggggcgctcccgggataaacggcacgaagggctaccccggcctcaagggggacgagggagaagccggggaccccggagacgataacaacgacattgcaccccgaggagtcaaaggagcaaaggggtaccggggtcccgagggcccccagggacccccaggacaccaaggaccgcctgggccggacgaatgcgagattttggacatcatcatgaaaatgtgctcttgctgtgaatgcaagtgcggccccatcgacctcctgttcgtgctggacagctcagagagcattggcctgcagaacttcgagattgccaaggacttcgtcgtcaaggtcatcgaccggctgagccgggacgagctggtcaagttcgagccagggcagtcgtacgcgggtgtggtgcagtacagccacagccagatgcaggagcacgtgagcctgcgcagccccagcatccggaacgtgcaggagctcaaggaagccatcaagagcctgcagtggatggcgggcggcaccttcacgggggaggccctgcagtacacgcgggaccagctgctgccgcccagcccgaacaaccgcatcgccctggtcatcactgacgggcgctcagacactcagagggacaccacaccgctcaacgtgctctgcagccccggcatccaggtggtctccgtgggcatcaaagacgtgtttgacttcatcccaggctcagaccagctcaatgtcatttcttgccaaggcctggcaccatcccagggccggcccggcctctcgctggtcaaggagaactatgcagagctgctggaggatgccttcctgaagaatgtcaccgcccagatctgcatagacaagaagtgtccagattacacctgccccatcacgttctcctccccggctgacatcaccatcctgctggacggctccgccagcgtgggcagccacaactttgacaccaccaagcgcttcgccaagcgcctggccgagcgcttcctcacagcgggcaggacggaccccgcccacgacgtgcgggtggcggtggtgcagtacagcggcacgggccagcagcgcccagagcgggcgtcgctgcagttcctgcagaactacacggccctggccagtgccgtcgatgccatggactttatcaacgacgccaccgacgtcaacgatgccctgggctatgtgacccgcttctaccgcgaggcctcgtccggcgctgccaagaagaggctgctgctcttctcagatggcaactcgcagggcgccacgcccgctgccatcgagaaggccgtgcaggaagcccagcgggcaggcatcgagatcttcgtggtggtcgtgggccgccaggtgaatgagccccacatccgcgtcctggtcaccggcaagacggccgagtacgacgtggcctacggcgagagccacctgttccgtgtccccagctaccaggccctgctccgcggtgtcttccaccagacagtctccaggaaggtggcgctgggctagcccaccctgcacgccggcaccaaaccctgtcctcccacccctccccactcatcactaaacagagtaaaatgtgatgcgaattttcccgaccaacctgattcgctagattttttttaaggaaaagcttggaaagccaggacacaacgctgctgcctgctttgtgcagggtcctccggggctcagccctgagttggcatcacctgcgcagggccctctggggctcagccctgagctagtgtcacctgcacagggccctctgaggctcagccctgagctggcgtcacctgtgcagggccctctggggctcagccctgagctggcctcacctgggttccccaccccgggctctcctgccctgccctcctgcccgccctccctcctgcctgcgcagctccttccctaggcacctctgtgctgcatcccaccagcctgagcaagacgccctctcggggcctgtgccgcactagcctccctctcctctgtccccatagctggtttttcccaccaatcctcacctaacagttactttacaattaaactcaaagcaagctcttctcctcagcttggggcagccattggcctctgtctcgttttgggaaaccaaggtcaggaggccgttgcagacataaatctcggcgactcggccccgtctcctgagggtcctgctggtgaccggcctggaccttggccctacagccctggaggccgctgctgaccagcactgaccccgacctcagagagtactcgcaggggcgctggctgcactcaagaccctcgagattaacggtgctaaccccgtctgctcctccctcccgcagagactggggcctggactggacatgagagccccttggtgccacagagggctgtgtcttactagaaacaacgcaaacctctccttcctcagaatagtgatgtgttcgacgttttatcaaaggccccctttctatgttcatgttagttttgctccttctgtgtttttttctgaaccatatccatgttgctgacttttccaaataaaggttttcactcctctc

SEQ ID NO: 121639 - DNA, 2163 bp, Artificial Sequence
  derived and/or modified sequence
gcagaaggcagcctcggtctctgggcggcggcggcggcccactctgccctggccgcgctgtgtggtgaccgcaggccccagacatgagggcggcccgtgctctgctgcccctgctgctgcaggcctgctggacagccgcgcaggatgagccggagaccccgagggccgtggccttccaggactgccccgtggacctgttctttgtgctggacacctctgagagcgtggccctgaggctgaagccctacggggccctcgtggacaaagtcaagtccttcaccaagcgcttcatcgacaacctgagggacaggtactaccgctgtgaccgaaacctggtgtggaacgcaggcgcgctgcactacagtgacgaggtggagatcatccaaggcctcacgcgcatgcctggcggccgcgacgcactcaaaagcagcgtggacgcggtcaagtactttgggaagggcacctacaccgactgcgctatcaagaaggggctggagcagctcctcgtggggggctcccacctgaaggagaataagtacctgattgtggtgaccgacgggcaccccctggagggctacaaggaaccctgtggggggctggaggatgctgtgaacgaggccaagcacctgggcgtcaaagtcttctcggtggccatcacacccgaccacctggagccgcgtctgagcatcatcgccacggaccacacgtaccggcgcaacttcacggcggctgactggggccagagccgcgacgcagaggaggccatcagccagaccatcgacaccatcgtggacatgatcaaaaataacgtggagcaagtgtgctgctccttcgaatgccagcctgcaagaggacctccggggctccggggcgaccccggctttgagggagaacgaggcaagccggggctcccaggagagaagggagaagccggagatcctggaagacccggggacctcggacctgttgggtaccagggaatgaagggagaaaaagggagccgtggggagaagggctccaggggacccaagggctacaagggagagaagggcaagcgtggcatcgacggggtggacggcgtgaagggggagatggggtacccaggcctgccaggctgcaagggctcgcccgggtttgacggcattcaaggaccccctggccccaagggagaccccggtgcctttggactgaaaggagaaaagggcgagcctggagctgacggggaggcggggagaccagggagctcgggaccatctggagacgagggccagccgggagagcctgggccccccggagagaaaggagaggcgggcgacgaggggaacccaggacctgacggtgcccccggggagcggggtggccctggagagagaggaccacgggggaccccaggcacgcggggaccaagaggagaccctggtgaagctggcccgcagggtgatcagggaagagaaggccccgttggtgtccctggagacccgggcgaggctggccctatcggacctaaaggctaccgaggcgatgagggtcccccagggtccgagggtgccagaggagccccaggacctgccggaccccctggagacccggggctgatgggtgaaaggggagaagacggccccgctggaaatggcaccgagggcttccccggcttccccgggtatccgggcaacaggggcgctcccgggataaacggcacgaagggctaccccggcctcaagggggacgagggagaagccggggaccccggagacgataacaacgacattgcaccccgtctcctgagggtcctgctggtgaccggcctggaccttggccctacagccctggaggccgctgctgaccagcactgaccccgacctcagagagtactcgcaggggcgctggctgcactcaagaccctcgagattaacggtgctaaccccgtctgctcctccctcccgcagagactggggcctggactggacatgagagccccttggtgccacagagggctgtgtcttactagaaacaacgcaaacctctccttcctcagaatagtgatgtgttcgacgttttatcaaaggccccctttctatgttcatgttagttttgctccttctgtgtttttttctgaaccatatccatgttgctgacttttccaaataaaggttttcactcctc

SEQ ID NO: 121640 - DNA, 2004 bp, Artificial Sequence
  derived and/or modified sequence
agaaggcagcctcggtctctgggcggcggcggcggcccactctgccctggccgcgctgtgtggtgaccgcaggccccagacatgagggcggcccgtgctctgctgcccctgctgctgcaggcctgctggacagccgcgcaggatgagccggagaccccgagggccgtggccttccaggactgccccgtggacctgttctttgtgctggacacctctgagagcgtggccctgaggctgaagccctacggggccctcgtggacaaagtcaagtccttcaccaagcgcttcatcgacaacctgagggacaggtactaccgctgtgaccgaaacctggtgtggaacgcaggcgcgctgcactacagtgacgaggtggagatcatccaaggcctcacgcgcatgcctggcggccgcgacgcactcaaaagcagcgtggacgcggtcaagtactttgggaagggcacctacaccgactgcgctatcaagaaggggctggagcagctcctcgtggggggctcccacctgaaggagaataagtacctgattgtggtgaccgacgggcaccccctggagggctacaaggaaccctgtggggggctggaggatgctgtgaacgaggccaagcacctgggcgtcaaagtcttctcggtggccatcacacccgaccacctggagccgcgtctgagcatcatcgccacggaccacacgtaccggcgcaacttcacggcggctgactggggccagagccgcgacgcagaggaggccatcagccagaccatcgacaccatcgtggacatgatcaaaaataacgtggagcaagtgtgctgctccttcgaatgccagcctgcaagaggacctccggggctccggggcgaccccggctttgagggagaacgaggcaagccggggctcccaggagagaagggagaagccggagatcctggaagacccggggacctcggacctgttgggtaccagggaatgaagggagaaaaagggagccgtggggagaagggctccaggggacccaagggctacaagggagagaagggcaagcgtggcatcgacggggtggacggcgtgaagggggagatggggtacccaggcctgccaggctgcaagggctcgcccgggtttgacggcattcaaggaccccctggccccaagggagaccccggtgcctttggactgaaaggagaaaagggcgagcctggagctgacggggaggcggggagaccagggagctcgggaccatctggagacgagggccagccgggagagcctgggccccccggagagaaaggagaggcgggcgacgaggggaacccaggacctgacggtgcccccggggagcggggtggccctggagagagaggaccacgggggaccccaggcacgcggggaccaagaggagaccctggtgaagctggcccgcagggtgatcagggaagagaaggccccgttggtgtccctggagacccgggcgaggctggccctatcggacctaaaggctaccgaggcgatgagggtcccccagggtccgagggtgccagaggagccccaggacctgccggaccccctggagacccggggctgatgggtgaaaggggagaagacggccccgctggaaatggcaccgagggcttccccggcttccccgggtatccgggcaacaggggcgctcccgggataaacggcacgaagggctaccccggcctcaagggggacgagggagaagccggggaccccggagacgataacaacgacattgcaccccgaggagtcaaaggagcaaaggggtaccggggtcccgagggcccccagggacccccaggacaccaaggaccgcctgggccggacgaatgcgagattttggacatcatcatgaaaatgtgctcctgcagaatgcaagtgcggccccatcgacctcctgttcgtgctggacagctcagagagcattggcctgcagaacttcgagagccacctgttccgtgtccccagctacca

SEQ ID NO: 121641 - DNA, 3087 bp, Artificial Sequence
  derived and/or modified sequence
atgagagccgccagagccctgctgcccctgctgctgcaggcctgctggaccgccgcccaggacgagcccgagacccccagagccgtggccttccaggactgccccgtggacctgttcttcgtgctggacaccagcgagagcgtggccctgagactgaagccctacggcgccctggtggacaaggtgaagagcttcaccaagagattcatcgacaacctgagagacagatactacagatgcgacagaaacctggtgtggaacgccggcgccctgcactacagcgacgaggtggagatcatccagggcctgaccagaatgcccggcggcagagacgccctgaagagcagcgtggacgccgtgaagtacttcggcaagggcacctacaccgactgcgccatcaagaagggcctggagcagctgctggtgggcggcagccacctgaaggagaacaagtacctgatcgtggtgaccgacggccaccccctggagggctacaaggagccctgcggcggcctggaggacgccgtgaacgaggccaagcacctgggcgtgaaggtgttcagcgtggccatcacccccgaccacctggagcccagactgagcatcatcgccaccgaccacacctacagaagaaacttcaccgccgccgactggggccagagcagagacgccgaggaggccatcagccagaccatcgacaccatcgtggacatgatcaagaacaacgtggagcaggtgtgctgcagcttcgagtgccagcccgccagaggcccccccggcctgagaggcgaccccggcttcgagggcgagagaggcaagcccggcctgcccggcgagaagggcgaggccggcgaccccggcagacccggcgacctgggccccgtgggctaccagggcatgaagggcgagaagggcagcagaggcgagaagggcagcagaggccccaagggctacaagggcgagaagggcaagagaggcatcgacggcgtggacggcgtgaagggcgagatgggctaccccggcctgcccggctgcaagggcagccccggcttcgacggcatccagggcccccccggccccaagggcgaccccggcgccttcggcctgaagggcgagaagggcgagcccggcgccgacggcgaggccggcagacccggcagcagcggccccagcggcgacgagggccagcccggcgagcccggcccccccggcgagaagggcgaggccggcgacgagggcaaccccggccccgacggcgcccccggcgagagaggcggccccggcgagagaggccccagaggcacccccggcaccagaggccccagaggcgaccccggcgaggccggcccccagggcgaccagggcagagagggccccgtgggcgtgcccggcgaccccggcgaggccggccccatcggccccaagggctacagaggcgacgagggcccccccggcagcgagggcgccagaggcgcccccggccccgccggcccccccggcgaccccggcctgatgggcgagagaggcgaggacggccccgccggcaacggcaccgagggcttccccggcttccccggctaccccggcaacagaggcgcccccggcatcaacggcaccaagggctaccccggcctgaagggcgacgagggcgaggccggcgaccccggcgacgacaacaacgacatcgcccccagaggcgtgaagggcgccaagggctacagaggccccgagggcccccagggcccccccggccaccagggcccccccggccccgacgagtgcgagatcctggacatcatcatgaagatgtgcagctgctgcgagtgcaagtgcggccccatcgacctgctgttcgtgctggacagcagcgagagcatcggcctgcagaacttcgagatcgccaaggacttcgtggtgaaggtgatcgacagactgagcagagacgagctggtgaagttcgagcccggccagagctacgccggcgtggtgcagtacagccacagccagatgcaggagcacgtgagcctgagaagccccagcatcagaaacgtgcaggagctgaaggaggccatcaagagcctgcagtggatggccggcggcaccttcaccggcgaggccctgcagtacaccagagaccagctgctgccccccagccccaacaacagaatcgccctggtgatcaccgacggcagaagcgacacccagagagacaccacccccctgaacgtgctgtgcagccccggcatccaggtggtgagcgtgggcatcaaggacgtgttcgacttcatccccggcagcgaccagctgaacgtgatcagctgccagggcctggcccccagccagggcagacccggcctgagcctggtgaaggagaactacgccgagctgctggaggacgccttcctgaagaacgtgaccgcccagatctgcatcgacaagaagtgccccgactacacctgccccatcaccttcagcagccccgccgacatcaccatcctgctggacggcagcgccagcgtgggcagccacaacttcgacaccaccaagagattcgccaagagactggccgagagattcctgaccgccggcagaaccgaccccgcccacgacgtgagagtggccgtggtgcagtacagcggcaccggccagcagagacccgagagagccagcctgcagttcctgcagaactacaccgccctggccagcgccgtggacgccatggacttcatcaacgacgccaccgacgtgaacgacgccctgggctacgtgaccagattctacagagaggccagcagcggcgccgccaagaagagactgctgctgttcagcgacggcaacagccagggcgccacccccgccgccatcgagaaggccgtgcaggaggcccagagagccggcatcgagatcttcgtggtggtggtgggcagacaggtgaacgagccccacatcagagtgctggtgaccggcaagaccgccgagtacgacgtggcctacggcgagagccacctgttcagagtgcccagctaccaggccctgctgagaggcgtgttccaccagaccgtgagcagaaaggtggccctgggctag

SEQ ID NO: 121642 - DNA, 1770 bp, Artificial Sequence
  derived and/or modified sequence
atgagagccgccagagccctgctgcccctgctgctgcaggcctgctggaccgccgcccaggacgagcccgagacccccagagccgtggccttccaggactgccccgtggacctgttcttcgtgctggacaccagcgagagcgtggccctgagactgaagccctacggcgccctggtggacaaggtgaagagcttcaccaagagattcatcgacaacctgagagacagatactacagatgcgacagaaacctggtgtggaacgccggcgccctgcactacagcgacgaggtggagatcatccagggcctgaccagaatgcccggcggcagagacgccctgaagagcagcgtggacgccgtgaagtacttcggcaagggcacctacaccgactgcgccatcaagaagggcctggagcagctgctggtgggcggcagccacctgaaggagaacaagtacctgatcgtggtgaccgacggccaccccctggagggctacaaggagccctgcggcggcctggaggacgccgtgaacgaggccaagcacctgggcgtgaaggtgttcagcgtggccatcacccccgaccacctggagcccagactgagcatcatcgccaccgaccacacctacagaagaaacttcaccgccgccgactggggccagagcagagacgccgaggaggccatcagccagaccatcgacaccatcgtggacatgatcaagaacaacgtggagcaggtgtgctgcagcttcgagtgccagcccgccagaggcccccccggcctgagaggcgaccccggcttcgagggcgagagaggcaagcccggcctgcccggcgagaagggcgaggccggcgaccccggcagacccggcgacctgggccccgtgggctaccagggcatgaagggcgagaagggcagcagaggcgagaagggcagcagaggccccaagggctacaagggcgagaagggcaagagaggcatcgacggcgtggacggcgtgaagggcgagatgggctaccccggcctgcccggctgcaagggcagccccggcttcgacggcatccagggcccccccggccccaagggcgaccccggcgccttcggcctgaagggcgagaagggcgagcccggcgccgacggcgaggccggcagacccggcagcagcggccccagcggcgacgagggccagcccggcgagcccggcccccccggcgagaagggcgaggccggcgacgagggcaaccccggccccgacggcgcccccggcgagagaggcggccccggcgagagaggccccagaggcacccccggcaccagaggccccagaggcgaccccggcgaggccggcccccagggcgaccagggcagagagggccccgtgggcgtgcccggcgaccccggcgaggccggccccatcggccccaagggctacagaggcgacgagggcccccccggcagcgagggcgccagaggcgcccccggccccgccggcccccccggcgaccccggcctgatgggcgagagaggcgaggacggccccgccggcaacggcaccgagggcttccccggcttccccggctaccccggcaacagaggcgcccccggcatcaacggcaccaagggctaccccggcctgaagggcgacgagggcgaggccggcgaccccggcgacgacaacaacgacatcgcccccagactgctgagagtgctgctggtgaccggcctggacctgggccccaccgccctggaggccgccgccgaccagcactag

SEQ ID NO: 121643 - DNA, 324 bp, Artificial Sequence
  derived and/or modified sequence
atgagagccgccagagccctgctgcccctgctgctgcaggcctgctggaccgccgcccaggacgagcccgagacccccagagccgtggccttccaggactgccccgtggacctgttcttcgtgctggacaccagcgagagcgtggccctgagactgaagccctacggcgccctggtggacaaggtgaagagcttcaccaagagattcatcgacaacctgagagacagatactacagatgcgacagaaacctggtgtggaacgccggcgccctgcactacagcgacgaggtggagatcatccagggcctgaccagaatgccctag

SEQ ID NO: 121644 - protein, 921 aa, Artificial Sequence
  derived and/or modified sequence
MKTCWKIPVFFFVCSFLEPWASAAVKRRPRFPVNSNSNGGNELCPKIRIGQDDLPGFDLISQFQVDKAASRRAIQRVVGSATLQVAYKLGNNVDFRIPTRNLYPSGLPEEYSFLTTFRMTGSTLKKNWNIWQIQDSSGKEQVGIKINGQTQSVVFSYKGLDGSLQTAAFSNLSSLFDSQWHKIMIGVERSSATLFVDCNRIESLPIKPRGPIDIDGFAVLGKLADNPQVSVPFELQWMLIHCDPLRPRRETCHELPARITPSQTTDERGPPGEQGPPGPPGPPGVPGIDGIDGDRGPKGPPGPPGPAGEPGKPGAPGKPGTPGADGLTGPDGSPGSIGSKGQKGEPGVPGSRGFPGRGIPGPPGPPGTAGLPGELGRVGPVGDPGRRGPPGPPGPPGPRGTIGFHDGDPLCPNACPPGRSGYPGLPGMRGHKGAKGEIGEPGRQGHKGEEGDQGELGEVGAQGPPGAQGLRGITGIVGDKGEKGARGLDGEPGPQGLPGAPGDQGQRGPPGEAGPKGDRGAEGARGIPGLPGPKGDTGLPGVDGRDGIPGMPGTKGEPGKPGPPGDAGLQGLPGVPGIPGAKGVAGEKGSTGAPGKPGQMGNSGKPGQQGPPGEVGPRGPQGLPGSRGELGPVGSPGLPGKLGSLGSPGLPGLPGPPGLPGMKGDRGVVGEPGPKGEQGASGEEGEAGERGELGDIGLPGPKGSAGNPGEPGLRGPEGSRGLPGVEGPRGPPGPRGVQGEQGATGLPGVQGPPGRAPTDQHIKQVCMRVIQEHFAEMAASLKRPDSGATGLPGRPGPPGPPGPPGENGFPGQMGIRGLPGIKGPPGALGLRGPKGDLGEKGERGPPGRGPNGLPGAIGLPGDPGPASYGRNGRDGERGPPGVAGIPGVPGPPGPPGLPGFCEPASCTMQAGQRAFNKGPDP

SEQ ID NO: 121645 - DNA, 2766 bp, Artificial Sequence
  derived and/or modified sequence
atgaagacctgctggaagatccccgtgttcttcttcgtgtgcagcttcctggagccctgggccagcgccgccgtgaagagaagacccagattccccgtgaacagcaacagcaacggcggcaacgagctgtgccccaagatcagaatcggccaggacgacctgcccggcttcgacctgatcagccagttccaggtggacaaggccgccagcagaagagccatccagagagtggtgggcagcgccaccctgcaggtggcctacaagctgggcaacaacgtggacttcagaatccccaccagaaacctgtaccccagcggcctgcccgaggagtacagcttcctgaccaccttcagaatgaccggcagcaccctgaagaagaactggaacatctggcagatccaggacagcagcggcaaggagcaggtgggcatcaagatcaacggccagacccagagcgtggtgttcagctacaagggcctggacggcagcctgcagaccgccgccttcagcaacctgagcagcctgttcgacagccagtggcacaagatcatgatcggcgtggagagaagcagcgccaccctgttcgtggactgcaacagaatcgagagcctgcccatcaagcccagaggccccatcgacatcgacggcttcgccgtgctgggcaagctggccgacaacccccaggtgagcgtgcccttcgagctgcagtggatgctgatccactgcgaccccctgagacccagaagagagacctgccacgagctgcccgccagaatcacccccagccagaccaccgacgagagaggcccccccggcgagcagggcccccccggcccccccggcccccccggcgtgcccggcatcgacggcatcgacggcgacagaggccccaagggcccccccggcccccccggccccgccggcgagcccggcaagcccggcgcccccggcaagcccggcacccccggcgccgacggcctgaccggccccgacggcagccccggcagcatcggcagcaagggccagaagggcgagcccggcgtgcccggcagcagaggcttccccggcagaggcatccccggcccccccggcccccccggcaccgccggcctgcccggcgagctgggcagagtgggccccgtgggcgaccccggcagaagaggcccccccggcccccccggcccccccggccccagaggcaccatcggcttccacgacggcgaccccctgtgccccaacgcctgcccccccggcagaagcggctaccccggcctgcccggcatgagaggccacaagggcgccaagggcgagatcggcgagcccggcagacagggccacaagggcgaggagggcgaccagggcgagctgggcgaggtgggcgcccagggcccccccggcgcccagggcctgagaggcatcaccggcatcgtgggcgacaagggcgagaagggcgccagaggcctggacggcgagcccggcccccagggcctgcccggcgcccccggcgaccagggccagagaggcccccccggcgaggccggccccaagggcgacagaggcgccgagggcgccagaggcatccccggcctgcccggccccaagggcgacaccggcctgcccggcgtggacggcagagacggcatccccggcatgcccggcaccaagggcgagcccggcaagcccggcccccccggcgacgccggcctgcagggcctgcccggcgtgcccggcatccccggcgccaagggcgtggccggcgagaagggcagcaccggcgcccccggcaagcccggccagatgggcaacagcggcaagcccggccagcagggcccccccggcgaggtgggccccagaggcccccagggcctgcccggcagcagaggcgagctgggccccgtgggcagccccggcctgcccggcaagctgggcagcctgggcagccccggcctgcccggcctgcccggcccccccggcctgcccggcatgaagggcgacagaggcgtggtgggcgagcccggccccaagggcgagcagggcgccagcggcgaggagggcgaggccggcgagagaggcgagctgggcgacatcggcctgcccggccccaagggcagcgccggcaaccccggcgagcccggcctgagaggccccgagggcagcagaggcctgcccggcgtggagggccccagaggcccccccggccccagaggcgtgcagggcgagcagggcgccaccggcctgcccggcgtgcagggcccccccggcagagcccccaccgaccagcacatcaagcaggtgtgcatgagagtgatccaggagcacttcgccgagatggccgccagcctgaagagacccgacagcggcgccaccggcctgcccggcagacccggcccccccggcccccccggcccccccggcgagaacggcttccccggccagatgggcatcagaggcctgcccggcatcaagggcccccccggcgccctgggcctgagaggccccaagggcgacctgggcgagaagggcgagagaggcccccccggcagaggccccaacggcctgcccggcgccatcggcctgcccggcgaccccggccccgccagctacggcagaaacggcagagacggcgagagaggcccccccggcgtggccggcatccccggcgtgcccggcccccccggcccccccggcctgcccggcttctgcgagcccgccagctgcaccatgcaggccggccagagagccttcaacaagggccccgacccctag

SEQ ID NO: 121646 - DNA, 987 bp, Artificial Sequence
  derived and/or modified sequence
atgaagacctgctggaagatccccgtgttcttcttcgtgtgcagcttcctggagccctgggccagcgccgccgtgaagagaagacccagattccccgtgaacagcaacagcaacggcggcaacgagctgtgccccaagatcagaatcggccaggacgacctgcccggcttcgacctgatcagccagttccaggtggacaaggccgccagcagaagagccatccagagagtggtgggcagcgccaccctgcaggtggcctacaagctgggcaacaacgtggacttcagaatccccaccagaaacctgtaccccagcggcctgcccgaggagtacagcttcctgaccaccttcagaatgaccggcagcaccctgaagaagaactggaacatctggcagatccaggacagcagcggcaaggagcaggtgggcatcaagatcaacggccagacccagagcgtggtgttcagctacaagggcctggacggcagcctgcagaccgccgccttcagcaacctgagcagcctgttcgacagccagtggcacaagatcatgatcggcgtggagagaagcagcgccaccctgttcgtggactgcaacagaatcgagagcctgcccatcaagcccagaggccccatcgacatcgacggcttcgccgtgctgggcaagctggccgacaacccccaggtgagcgtgcccttcgagctgcagtggatgctgatccactgcgaccccctgagacccagaagagagacctgccacgagctgcccgccagaatcacccccagccagaccaccgacgagagaggcccccccggcgagcagggcccccccggcccccccggcccccccggcgtgcccggcatcgacggcatcgacggcgacagaggccccaagggcccccccggcccccccggccccgccggcgagcccggcaagcccggcgcccccggcaagcccggcacccccggcgccgacaccagcccctag

SEQ ID NO: 121647 - DNA, 2766 bp, Artificial Sequence
  derived and/or modified sequence
atgaaaacctgttggaagatacccgttttttttttcgtctgttctttcctggaaccttgggcctcagctgccgtaaagcggcgccctcgcttcccagtgaactctaattcaaatggaggcaatgagctttgtccaaaaattagaataggtcaggacgatctcccgggctttgacctgattagccagttccaggtagataaggccgctagcaggcgcgctattcagagggtggtggggtccgccactctgcaggttgcttataagcttggcaacaacgtggattttcgtatccctactagaaacctgtatccctctggccttcctgaagaatacagcttcctgactacctttagaatgactggtagcactctcaaaaaaaactggaacatatggcagatccaggacagtagcggcaaagagcaagtagggattaaaatcaacggtcagacacaaagtgtcgtgtttagttacaaaggactggacggtagtctgcagactgcagctttctctaatcttagcagtctcttcgactcacaatggcataaaatcatgatcggcgtggagaggagcagtgctactctgtttgtcgattgcaacaggatcgagagcctcccaattaagcctagagggcccatcgatatcgatgggttcgcagtcctcggcaaactggccgacaatccccaggtgtccgtgccgtttgaattacagtggatgctcatccattgcgaccctctcagacctcgccgcgaaacttgccacgaattgcctgcacggatcaccccctcccagacgactgacgaacgcggccctcccggtgaacagggaccaccaggccctcccgggcccccgggcgtgcccggtatcgacggaatcgatggcgaccgggggcccaagggaccccccggcccccccggaccagcgggcgagccgggaaagcccggcgcccccggcaagcccggcaccccaggcgctgatgggcttacgggacccgatggctccccaggatccattgggtcaaaaggacagaaaggtgagccaggtgtcccaggatctaggggctttcctggtagaggaatcccaggacccccaggcccccctgggacagccggcttacccggcgagctcgggcgcgttgggcctgtgggggaccctggtcgcagaggacccccagggccgcccggccctccgggtcctcgcggcaccattgggttccacgatggagaccctctgtgcccaaatgcttgcccacccgggcgctcagggtacccaggcctgcccggcatgcgtggacataagggggccaaaggggagattggcgagccgggccgccagggacataagggcgaagagggcgatcagggcgaacttggagaggttggcgcccaaggccccccgggagcccaggggctgcgtggtattactggcattgtcggcgataagggcgagaagggggctaggggtctcgatggtgaacccgggccccagggcctgccgggggcacccggcgatcaggggcagcggggcccccccggtgaggcaggtccaaagggagataggggcgcagagggcgctcgggggatccccggactcccaggacccaagggggacactggactgcctggcgtcgacggacgagatggcataccaggcatgccggggacgaagggcgaacccgggaaaccgggtcctcctggcgacgccggactgcagggcctccccggggtccccggcatcccaggggccaaaggcgtcgcaggcgaaaaagggtccacaggtgccccagggaaacctggtcagatgggcaacagcggaaagcccggccaacaaggccccccaggcgaggtgggtccccggggcccacaaggattgccgggcagtcgtggggagctgggtcctgtgggatctcccggactgccaggtaagctggggtcgctcggcagtcccggactgccaggcctacccggtccccccggcctgccggggatgaagggcgatcgcggtgtagtaggagagccaggacctaaaggcgagcagggggccagtggagaggagggcgaggccggcgaacggggcgagttaggtgacataggactccctgggcctaagggctccgcaggcaacccgggcgaacccggattgaggggacctgagggatcccggggattgcctggggtcgaagggccccgggggcctcctggacctagaggtgtacaaggcgagcagggcgccactgggctcccgggagtccaagggccacctgggcgtgctcccaccgaccaacacattaagcaggtgtgcatgagggttattcaggagcactttgctgagatggcggctagcctgaagcgcccagacagtggagcgactgggcttcccggccgtccagggcccccaggaccgccaggcccacccggcgaaaacggcttcccagggcagatggggatacgcggcttgcctgggataaagggccctccgggcgctctagggctaagaggacccaagggcgatctcggagaaaaaggagaaagggggccgcccggccgcgggcccaatggcctaccaggcgctattggcctcccgggggatcccggccccgcctcttacggacgcaacggtcgggacggcgaaaggggcccgccaggtgttgccgggatacctggcgtgcccgggcctccgggcccacccgggctgcccggattctgcgaaccagcaagttgtacgatgcaagcaggccagagagcctttaacaaaggcccagacccatag

SEQ ID NO: 121648 - DNA, 987 bp, Artificial Sequence
  derived and/or modified sequence
atgaaaacatgttggaaaatccccgtcttcttcttcgtatgcagtttcctggagccttgggcctctgcggccgtgaagagacgacctagatttcctgtcaattctaattcaaacgggggcaatgagctatgcccaaagattcggatcggccaagacgatttgcctggcttcgaccttatcagccagtttcaagttgacaaggcagcatctcgtcgagctattcaacgggtcgtcggttccgcaaccctgcaagtcgcatataaacttgggaataacgtggacttccggattcccactagaaacctgtacccaagtggtctgccagaggaatattccttcttgacaactttcaggatgactggatccacacttaagaagaactggaacatatggcaaatccaggatagtagcggaaaagagcaggtagggattaagatcaatgggcagacacagtctgtagtgttcagctacaagggactagacgggtcgcttcaaaccgccgctttctccaatctgtccagtctgttcgattcgcaatggcataagatcatgatcggtgtagagcgtagtagcgcgacgttgtttgtggattgtaaccgcatcgaatcactacctatcaagccacggggacctatagacattgatggatttgcggtgctaggaaaattggcagacaatcctcaggtgtcagttccgtttgagctgcagtggatgctgatccactgtgaccctctcaggccgagacgcgaaacttgccatgagctgccagcgcgcattacaccatcacagaccaccgatgagagaggcccacctggtgaacagggcccaccagggccacctggacccccaggagtgccaggcatcgatgggattgatggggatcggggccccaaaggaccgcctggccctcccggacctgcgggcgagccaggaaagcctggcgcccccggaaagcccggcaccccgggcgcagatacatccccttag

SEQ ID NO: 121649 - DNA, 2766 bp, Artificial Sequence
  derived and/or modified sequence
atgaagacctgctggaagatccctgtgttcttctttgtgtgcagcttcctggagccctgggccagcgctgctgtgaagagaagaccccgcttccctgtgaacagcaacagcaatggaggaaatgagctgtgccccaagatcagaattggccaggatgacctgcccggctttgacctgatcagccagttccaggtggacaaggccgccagcagaagagccatccagagggtggtgggcagcgccaccctgcaggtggcctacaagctgggcaacaacgtggacttccgcatccccaccaggaacctgtaccccagcggcctgcctgaggagtacagcttcctgaccaccttcaggatgacaggcagcaccctgaagaagaactggaacatctggcagatccaggacagcagcggcaaggagcaggtgggcatcaagatcaatggccagacccagagcgtggtgttctcctacaagggcctggatggcagcctgcagacagctgccttcagcaacctgagcagcctgtttgacagccagtggcacaagatcatgattggagtggagaggagcagcgccaccctgtttgtggactgcaacagaattgagagcctgcccatcaagccccggggccccatcgacattgatggctttgctgtgctgggcaagctggccgacaacccccaggtgtctgtgccctttgagctgcagtggatgctgatccactgtgaccccctgcggccccggcgggagacctgccacgagctgcctgcccgcatcacccccagccagaccacagatgagcggggccccccaggagagcagggccccccaggccccccaggccccccaggagtgcccggcattgatggcattgatggagaccggggccccaagggccccccaggccccccaggccctgctggggagcccgggaagccaggggcccctgggaagccaggcaccccaggagcagatggcctgaccggcccagatggcagccctggcagcatcggcagcaagggccagaagggggagcccggggtgcccggcagccggggcttccctggccggggcatccctggccccccaggccccccaggcacagctggcctgcccggggagctgggccgggtgggccctgtgggggaccccggccggcggggccccccaggccccccaggccccccaggcccccggggcaccatcggcttccatgatggagaccccctgtgccccaatgcctgccccccaggccgcagcggctacccaggcctgcccggcatgaggggccacaagggggccaagggggagatcggggagcccggccggcagggccacaagggggaggagggggaccagggcgagctgggggaggtgggcgcccagggccccccaggggcccagggcctgcggggcatcaccggcatcgtgggggacaagggggagaagggggcccggggcctggatggagagcccggcccccagggcctgcccggggcccctggggaccagggccagaggggccccccaggagaggccggccccaagggggacagaggagctgagggcgcccggggcatccctggcctgcccggccccaagggggacaccggcctgcccggggtggatggaagagatggcatccctggcatgcctggcaccaagggggagcccgggaagccaggccccccaggagatgctggcctgcagggcctgcccggggtgcccggcatccctggggccaagggcgtggccggggagaagggcagcactggagcccctgggaagccaggccagatgggcaacagcggcaagccaggccagcagggccccccaggagaggtgggcccccggggcccccagggcctgcccggcagcagaggagagctgggccctgtgggcagccctggcctgcccgggaagctgggcagcctgggcagccctggcctgcccggcctgcccggccccccaggcctgcccggcatgaagggggacagaggagtggtgggggagcccggccccaagggggagcagggcgccagcggggaggagggggaggccggggagcggggggagctgggggacatcggcctgcccggccccaagggcagcgctggcaaccctggagagcccggcctgcggggccctgagggcagccggggcctgcccggggtggagggcccccggggccccccaggcccccggggcgtgcagggcgagcagggcgccaccggcctgcccggggtgcagggccccccaggccgggcccccacagaccagcacatcaagcaggtgtgcatgagggtcatccaggagcactttgctgagatggccgccagcctgaagaggccagacagcggggccaccggcctgcccggccggcccggccccccaggccccccaggccccccaggagaaaatggcttccctggccagatgggcatccggggcctgcccggcatcaagggccccccaggggccctgggcctgcggggccccaagggggacctgggggagaagggggagcggggccccccaggccggggccccaacggcctgcccggggccatcggcctgcccggggaccccggccctgccagctatggaagaaatggaagagatggagagcggggccccccaggagtggccggcatccctggggtgcccggccccccaggccccccaggcctgcccggcttctgtgagcccgccagctgcaccatgcaggccggccagagggccttcaacaagggccctgacccctag

SEQ ID NO: 121650 - DNA, 987 bp, Artificial Sequence
  derived and/or modified sequence
atgaagacctgctggaagatccctgtgttcttctttgtgtgcagcttcctggagccctgggccagcgctgctgtgaagagaagaccccgcttccctgtgaacagcaacagcaatggaggaaatgagctgtgccccaagatcagaattggccaggatgacctgcccggctttgacctgatcagccagttccaggtggacaaggccgccagcagaagagccatccagagggtggtgggcagcgccaccctgcaggtggcctacaagctgggcaacaacgtggacttccgcatccccaccaggaacctgtaccccagcggcctgcctgaggagtacagcttcctgaccaccttcaggatgacaggcagcaccctgaagaagaactggaacatctggcagatccaggacagcagcggcaaggagcaggtgggcatcaagatcaatggccagacccagagcgtggtgttctcctacaagggcctggatggcagcctgcagacagctgccttcagcaacctgagcagcctgtttgacagccagtggcacaagatcatgattggagtggagaggagcagcgccaccctgtttgtggactgcaacagaattgagagcctgcccatcaagccccggggccccatcgacattgatggctttgctgtgctgggcaagctggccgacaacccccaggtgtctgtgccctttgagctgcagtggatgctgatccactgtgaccccctgcggccccggcgggagacctgccacgagctgcctgcccgcatcacccccagccagaccacagatgagcggggccccccaggagagcagggccccccaggccccccaggccccccaggagtgcccggcattgatggcattgatggagaccggggccccaagggccccccaggccccccaggccctgctggggagcccgggaagccaggggcccctgggaagccaggcaccccaggagctgacaccagcccctag

SEQ ID NO: 121651 - DNA, 4761 bp, Artificial Sequence
  derived and/or modified sequence
cctttgcttttagccctcaccgggggcaggagggaccaaggctgggcccagaacacatagtcctagggtaacagtgaaggggtcgtgaggggacagtgactcccttccaaccccttcttcatagggactgttggcaaacaaagaaaatcaactgggaaaatgaagacctgctggaaaattccagttttcttctttgtgtgcagtttcctggaaccctgggcatctgcagctgtcaagcgtcgccccagattccctgtcaattccaattctaatggtggaaatgaactctgtccaaagatcaggattggccaagatgacttaccagggtttgatctgatctctcagttccaggtagataaagcagcatctagaagagctatccagagagtagtgggatcagctacattgcaggtggcttacaagttgggaaataatgtagacttcaggattccaactaggaatttatatcccagtggactgcctgaagaatactccttcttgacgacgtttcgaatgactggaagcactctcaaaaagaactggaacatttggcagattcaggattcctctgggaaggagcaagttggcataaagattaatggccaaacacaatctgttgtattttcatacaagggactggatggaagtctccaaacagcagccttttcgaatttgtcctccttgtttgattcccagtggcataagatcatgattggcgtggagaggagtagtgctactctttttgttgactgcaacaggattgaatctttacctataaagccaagaggcccaattgacattgatggctttgctgtgctgggaaaacttgcagataatcctcaagtttctgttccatttgaacttcaatggatgctgatccattgtgaccccctgcggcccaggagagaaacttgccatgagctgccagccagaataacgcccagccagaccaccgacgagagaggtcccccgggtgagcagggtcctcccgggcctccgggcccccctggagttccaggcatcgatggcatcgacggtgaccgaggtcctaagggccccccgggccccccgggtcctgcaggtgaaccgggaaagccaggagctccaggcaagcctggcacacctggcgctgatggattaacaggacctgatggatcccctggctccattgggtcaaagggacaaaaaggagaacctggtgtgcctggatcgcgtggatttccaggccgtggtattcctggaccccctggtcctcctgggacagcaggactccctggagagcttggccgtgtaggacctgttggtgaccctgggagaagaggaccacctggcccccctggccccccaggacccagaggaacaattggctttcatgatggagatccattgtgtcccaatgcctgtccaccaggtcgctcaggatatccaggcctaccaggcatgaggggtcataaaggggctaaaggagaaattggtgaaccaggaagacaaggacacaagggtgaagaaggtgaccagggagaactcggagaagttggagctcaaggacctccaggagcccagggtttgcgaggcatcaccggcatagttggggacaaaggggaaaaaggtgctcggggcttagatggtgaacctgggcctcagggtcttcctggtgcacctggtgatcaaggacagcgaggacctccaggagaagcaggtcccaaaggagatagaggggctgaaggtgctagaggaattcctggtctccctgggcccaaaggagacacgggtttgccaggtgtggatggccgtgatgggatccctggaatgcctggaacaaagggtgaaccaggaaaacctgggcctcctggtgatgcaggattgcaggggttaccaggtgtacctggaattcctggtgcaaagggtgttgctggtgaaaagggtagcacaggtgctccagggaagcctggtcagatgggaaattcaggcaaaccgggccaacaggggcctccaggagaggtgggaccccgaggaccccaggggcttcctggcagtagaggagaattaggaccagtgggatccccaggcctaccaggtaaactgggttctctgggtagccctggcctccctggcttgcctgggccccctggacttcctggaatgaaaggtgacaggggtgtagtcggtgaaccgggtccaaagggtgaacagggtgcctctggtgaagaaggtgaagcaggagaaaggggggaacttggagatataggattacctggcccaaagggatctgcaggtaatcctggggaacctggcttgagagggcctgagggaagtcgggggcttcctggagtggaaggaccaagaggaccacctggaccccggggtgtgcagggagaacagggtgccaccggcctgcctggtgtccagggccctccgggtagagcaccgacagatcagcacattaagcaggtttgcatgagagtcatacaagaacattttgctgagatggctgccagtcttaagcgtccagactcaggtgccactgggcttcctggaaggcctggccctcctggtccccccggccctcctggagagaatggtttcccaggccagatgggaattcgtggccttccgggcattaaggggccccctggtgctcttggtttgaggggacctaaaggtgacttgggagaaaagggggagcgtggccctccaggaagaggtcccaacggtttgcctggagctataggtctcccaggtgacccaggccctgccagctatggcagaaatggccgagacggtgagcgaggccccccaggggtggcaggaattcctggagtgcctggacccccgggacctcctgggcttcccggtttctgtgagccagcctcctgcaccatgcaggctggtcagcgagcatttaacaaagggcctgacccttgaaaggcttactgctgcatggctgtctgcatgaaccacgcctggtgaaggagcctgggtgagaaacaccatccaaagctggggcaaagatgattaccttcagcatgattacaatgtattaccttcagtatgattacagaagtcctacttgacaatcacatatagaagaacggtgctattcagtaagttctctttcctttcccttggagggaagacagcagagtcatcagttaaaaaaaaaaaaagaaaaccaaacacctcccttgaataaatttatactcctgttcccaggatcttgagctttagtgtgctatacctatgtgtcttatcgtgggccactgtgccaataaacaaaaacaactgtttggtttacctcagttgcagtagttattttcatttagaagttgttctcagattattgtttcagttatatagaggattactagactagttatgaagaaaccccactacattcaatggaattggtgcttaaaatctcatcgatgtgctgtctctggagtgataagaaagggctacatctcccgaaatgatttctttacgtcatgtattggtttccttcttcaccttgaacttttgttgaactgtatgtactttaccccaaacctgttaatattttgagcgcttctatgtgaaagcaaagaaataattttaatactctggcattcataaattttattgatgagattatttattttaaaggtttgaggtaacatctctggttgtaccaaagaagaaataaatatggtttcttaatctcttgcatgttttcttataaataatcatgttcaatgaaaagaagttactgagcttatttagatacattaaacattacttaactactggttctataggtgtatgtttataatattagtgttttttctacataaagtaatttaaaaagctgttccacagagggtgttaccctgtgacagatgcgtatgtgtgtgtgtgtgtgtgtgtgtgtgttttagtgtgtatggagagagcttcatggaccttttcgaaatgttaattccctagaaagatgtgcagctgcatgcgcatctatatttttgtatagtatttcagagatttcgtggacttttttaagtctagccttgctttatttctaggttaagaaccactgccttcattccaatggcttgttagctccctcctactcagaactttattgtaaacatgatttatgtttcaccatttcttgtaaattttataaatgcagctcagctaaagcactgtattcttaacaagtatttcctgaccacttaagcactttattattatctgtgtaatcatattggcttgctgtttcattaacatctacttaactatccaacagacttaatatattcattttatatcacagagcctgtgagtaacctgtgctggggcataaaacaatagctcaacatagtatctttagttagtttatggaactaaattctgtcaagtcaaaggagagtgagccctaatataattttttatatatatttttctcgtgtgtacttttatacattttaaattctagtcctagttgtttggttaaatcaatcattatgtaatctgtatttggatttctttaaaactgcttacagcatctagttttatgcttctagcatgaattttgcttaagaagattccaactttgccatatagatcagtgctatttacatagactgaaagaatgttctttcccttttttcaaatatgacttttgaaaataaaggtctctgttatagctccctaaaacaatccttaaaaaaatggcaaactttttcaggagctgtgacacataattaaataaaggcatagaaatta

SEQ ID NO: 121652 - DNA, 1372 bp, Artificial Sequence
  derived and/or modified sequence
ccctcaccgggggcaggagggaccaaggctgggcccagaacacatagtcctagggtaacagtgaaggggtcgtgaggggacagtgactcccttccaaccccttcttcatagggactgttggcaaacaaagaaaatcaactgggaaaatgaagacctgctggaaaattccagttttcttctttgtgtgcagtttcctggaaccctgggcatctgcagctgtcaagcgtcgccccagattccctgtcaattccaattctaatggtggaaatgaactctgtccaaagatcaggattggccaagatgacttaccagggtttgatctgatctctcagttccaggtagataaagcagcatctagaagagctatccagagagtagtgggatcagctacattgcaggtggcttacaagttgggaaataatgtagacttcaggattccaactaggaatttatatcccagtggactgcctgaagaatactccttcttgacgacgtttcgaatgactggaagcactctcaaaaagaactggaacatttggcagattcaggattcctctgggaaggagcaagttggcataaagattaatggccaaacacaatctgttgtattttcatacaagggactggatggaagtctccaaacagcagccttttcgaatttgtcctccttgtttgattcccagtggcataagatcatgattggcgtggagaggagtagtgctactctttttgttgactgcaacaggattgaatctttacctataaagccaagaggcccaattgacattgatggctttgctgtgctgggaaaacttgcagataatcctcaagtttctgttccatttgaacttcaatggatgctgatccattgtgaccccctgcggcccaggagagaaacttgccatgagctgccagccagaataacgcccagccagaccaccgacgagagaggtcccccgggtgagcagggtcctcccgggcctccgggcccccctggagttccaggcatcgatggcatcgacggtgaccgaggtcctaagggccccccgggccccccgggtcctgcaggtgaaccgggaaagccaggagctccaggcaagcctggcacacctggcgctgataccagtccttgattttgtccctggaatatgaagtgaagtaagaaatggcgtctgttcttagcataccatggtgcatcactcaagttactcttcaagttaccactttatgtgttttccaaaaactaaagacttttctaaatgaaagaaagcactcgaaaacctataattatgatttccaagaatttttgactacagtttaagacatatccttcattttgaaagaaaaataaataactggatttttactgtta

SEQ ID NO: 121653 - DNA, 2766 bp, Artificial Sequence
  derived and/or modified sequence
atgaagacctgctggaagatccccgtgttcttcttcgtgtgcagcttcctcgaaccttgggccagcgctgctgtgaagaggcggcctcgtttcccagttaactcaaatagtaacggaggtaatgaactgtgtccgaagattcggatcggccaggacgatctgccaggctttgaccttatcagccagttccaggtggataaagccgcttcacgtagagccattcagcgtgtggtcggtagcgccactctccaggtggcttacaagctgggaaacaatgtcgactttaggattcctacaagaaatttatatccatctgggctccccgaagaatactcattcctcactacgtttcggatgactggttctaccttgaaaaagaattggaatatctggcagatacaggattcttcgggcaaggagcaggtgggtattaaaataaacggacaaactcagagtgtagtgttctcctacaaaggcctcgacggatcattgcaaacagctgccttctccaacctgagtagtctttttgactcacaatggcacaaaatcatgatcggcgtggaaagatcctccgccaccctctttgttgactgtaatcgcatcgagtctctacccataaagccgcgtggaccaatcgatattgatggctttgccgtgctcgggaagcttgctgacaaccctcaggtcagcgtcccgttcgaacttcagtggatgctgattcattgcgaccctcttcgaccacgtcgggagacatgtcacgaacttcccgctcggatcacccccagtcaaacgaccgacgagagggggccgccgggcgagcagggcccccctggccctccaggcccccccggggtacccgggatcgatggcatcgatggcgatcgcggccccaagggcccgcccggccctccaggtccagccggagagcctggtaaaccaggcgctccaggcaagccagggacacctggcgcagacgggctgactgggccagatggctcaccagggagtatcggcagcaaggggcagaaaggagagcctggggtcccgggctccagaggattcccaggcaggggaatccccggccctccagggcctcctggaaccgcaggactgcctggagagctcggccgcgtgggcccggtaggagatccagggaggcgagggccaccagggcctcccgggccacccgggccccgcggcaccatcggattccacgatggcgacccactctgtcctaatgcctgcccgcccgggcggtcagggtatccagggctgcctggaatgagagggcataaaggggctaagggggaaattggagagccaggcaggcagggccacaaaggcgaagaaggggaccaaggggaacttggagaggtcggtgcccagggaccacctggtgctcaggggttgcggggaatcacggggatcgttggagataagggagagaagggtgcccgcggattggacggtgagcccgggcctcagggcctccctggtgcccccggagatcaagggcagcggggcccccctggggaggccgggccaaagggcgacaggggcgccgaaggagcgcgaggcatccccggcttaccaggaccaaagggcgacacaggtctgccgggcgtggatggacgtgacggcatcccgggcatgccagggaccaaaggggagcccggaaagccaggaccaccaggagacgccggtcttcagggtctgccgggcgttcccgggatccccggggcaaaaggcgttgctggtgaaaagggatctacaggggcccccggcaagcccggacagatgggaaactctggcaagccaggtcagcagggcccacctggcgaggttggtccaaggggcccccagggactgccaggaagccgcggtgaactgggccccgttggctcacctggtctcccggggaaactagggtcccttgggtctcctggactgcctggcttgcccggaccgcccggtctcccagggatgaagggcgaccggggtgtcgtgggggaaccaggccccaagggggagcagggcgcgtccggggaggagggcgaggccggagagcgtggggagttaggggatattggactgcctggccccaaagggtcagccggcaatccaggtgagccggggttaagagggcctgaggggagccgagggttgccgggtgtcgaaggccctagaggtccccccggaccacgcggggtccagggcgagcagggagcgacgggtctgcccggcgtgcagggccctcctggcagagcgccgacagatcagcatatcaaacaggtctgtatgcgtgtgattcaggagcactttgccgagatggcggccagtctgaaacggccagacagtggcgctacaggtctgcccgggcggcctggaccacctggtcctccaggaccgcctggtgagaacgggtttcctggccagatgggaatacgggggctgccggggatcaaaggccctccaggcgcacttggactccgaggccctaagggagatcttggagagaaaggagagcggggtcctccgggacgtggaccgaacggtctccccggcgctatcggccttccaggtgatcctgggccagcttcctacggacggaacggacgagacggtgagcggggacctccgggggttgcgggcataccaggggtccccggaccccccggtcccccggggcttcctgggttctgtgagccagcaagctgcaccatgcaggcaggtcagagagcattcaacaagggtcccgatccgtag

SEQ ID NO: 121654 - DNA, 987 bp, Artificial Sequence
  derived and/or modified sequence
atgaagacctgctggaagatccccgtgttcttcttcgtgtgcagcttcctggagccatgggcgtcggccgcagtcaagcgacgacctagattccctgtaaatagcaactccaatggtggcaacgaactttgtcctaaaataaggataggacaagacgacctgcctggctttgacctgatatctcagttccaagtggataaagctgcctctcgtagggctattcaacgggtcgtgggcagcgctaccttacaggtcgcttataagctgggtaacaacgtagacttcagaatccctacccgcaatctctatccatccggactgccggaggagtactcttttttaaccaccttccgaatgacgggaagcaccctgaagaagaactggaacatatggcagatccaggactctagcgggaaggagcaggtcgggatcaaaatcaacggacagacccagtccgtcgtgttctcctacaaaggactggatgggagtctgcagacagcagccttctcaaatctcagctccctcttcgacagtcaatggcataaaataatgatcggggtcgagcgatcttctgctacactgttcgtggattgtaaccggattgagagcctaccaatcaaaccaagagggccaattgatattgatggctttgccgtgctgggcaagcttgccgacaatcctcaggtgagcgtaccattcgaactgcaatggatgcttatccactgtgatccactccgcccacggagagaaacatgtcacgagcttcccgcccgaattactccaagtcagacaaccgacgagcgcggccccccaggtgagcaaggtccacctgggccgcctggaccacccggcgtgcctggaattgacggcattgatggcgatcgcggccccaaaggccccccaggaccacccggccccgccggcgagcccgggaagcccggagctcctggcaagccagggactcccggggctgatacaagcccttag

SEQ ID NO: 121655 - DNA, 2766 bp, Artificial Sequence
  derived and/or modified sequence
atgaaaacttgttggaaaattcccgtctttttttttgtgtgttcattcctggagccctgggccagcgcagcggttaagagacggccacgtttccctgttaactccaatagtaatggtggcaacgagttgtgcccgaagataaggattggccaggatgatttgccagggtttgacctaattagtcagttccaagtagacaaggcagcatctaggcgcgctatccagagagtggttggatccgcaactcttcaggtggcctacaagctcgggaataatgtcgacttcaggatcccaaccaggaatctctatcctagcgggctacctgaagaatactcctttctgacaaccttccgaatgactggatctacactgaaaaaaaattggaatatctggcaaatccaagactcctcaggcaaagagcaagtgggcatcaaaatcaatggacagactcagagtgtcgtgttttcttacaaagggttagacggctccctccagaccgctgccttttccaacctgtccagcctgttcgactcgcagtggcacaagatcatgattggtgtggaaaggtcttccgcaaccctgttcgtcgactgcaataggattgaaagcttgcctattaagcccagaggtccaattgacatcgacggttttgctgtactgggcaaattggcagacaatcctcaagtttccgttcccttcgaactccagtggatgctgatccactgcgatccgctgagaccgagacgggagacgtgccacgagttacccgctaggattactcccagtcagactacggacgagcgagggcctcccggagagcaggggcctcccggaccccctggcccaccgggtgttccaggaatcgatggcatcgacggtgacaggggcccaaagggaccaccaggtccaccagggccagcaggtgaacctggcaagcctggagcccctggaaagcccggtactcccggtgccgacgggcttaccggccctgatggcagccctggctctattggatcaaagggacagaagggggagccaggcgttcctgggtcacgcggtttccccggacgcggaattccgggtccccctggacccccaggcacagctgggctaccaggagaacttggcagagtgggtccagtcggggaccctggccgacgagggccacccggtcccccagggccaccaggtcctagaggcactatcgggttccacgatggagatccgttgtgccctaatgcttgtcctcctgggagatccgggtacccagggctgcctggcatgcgcggacacaagggcgcaaagggggaaatcggcgagcccggacggcagggacataaaggagaagaaggcgaccagggtgagcttggagaggtgggcgctcagggcccacctggcgcacaggggctgcggggtattacaggcattgtgggagacaagggggagaagggtgcaagaggactggatggcgagcccggaccccagggcctgccaggagcacctggtgaccaggggcaaagaggacccccaggcgaggccggacccaagggggacagaggagcagagggcgctaggggtattcccggtctacctggaccaaaaggcgataccggactgcccggtgtggatggacgcgacggcatacccggaatgcctggcacaaaaggagagccaggtaaacccggacctcctggggacgctggcctccagggtctgcctggcgttcctggtattcctggtgcgaaaggcgtcgcaggtgagaagggaagtaccggggcacccggtaagccaggtcagatggggaatagtggtaaaccaggccagcagggcccacccggagaggtggggcctcggggaccgcagggcctaccgggttctcgaggcgaactgggtccagtcggctccccaggtttgcccggaaagcttggaagtcttggttcgccaggactgcccggtttaccaggcccacccggtctgcccggtatgaagggcgatcggggagtggtgggagagcctgggcctaaaggggaacaaggagccagcggtgaggaaggtgaggccggagagcgcggagaactcggcgatataggtctcccgggtccaaagggtagtgctgggaacccaggagagccaggcctgcgcggtcccgaagggtcaagaggactcccgggagtggaggggccacgtggcccacctgggccaagaggtgtccagggcgaacaaggagcgactggccttcccggtgtgcagggccctcccggaagggccccaacggaccagcacataaagcaagtgtgtatgcgcgtaatccaggaacactttgctgagatggcagccagcctcaaacgcccagactcaggcgcaaccggcctacctggcagaccaggtcccccaggccctcccggacctccaggtgagaacggcttccctggtcagatggggatacgcggtttgccaggcataaaagggccaccaggggcattaggtcttcggggtcccaagggcgatttgggagagaagggcgagcgcggtccgcctgggagggggcctaatgggctgcccggagctatcggactgcccggtgatcctggcccagcctcgtacggaagaaacgggagagacggagagcgaggtcctcccggagtggcgggtataccaggtgtccccggtcctccaggaccgccagggctacctggattctgcgaacctgcttcctgcaccatgcaggctggtcaacgcgctttcaataaaggacctgacccatag

SEQ ID NO: 121656 - DNA, 987 bp, Artificial Sequence
  derived and/or modified sequence
atgaaaacgtgctggaagattcctgtcttctttttcgtgtgttctttcctggagccatgggcttctgcggctgtgaagagacggcctcggttccctgtcaatagcaattccaacggaggaaacgagctttgccctaagattcgcattggtcaggatgatttgcccggttttgacttaatctctcagttccaggtagataaggccgcatccagacgtgccatacaaagggttgtgggttcagctactctccaggtggcatataaacttggcaacaacgtagacttccggattcctacaagaaacttataccctagcggacttccggaggaatattcttttctgaccacctttcgtatgaccggcagtacattgaaaaagaactggaacatctggcagatccaggactctagtggcaaggaacaggtcggcattaaaataaacggccaaacccagagcgtcgtcttttcatacaaaggcctggatggatcccttcagactgcggcatttagcaacttaagttccctgttcgacagccagtggcacaaaattatgatcggggtagagcgaagcagtgccaccctctttgtcgactgtaataggatcgagtcacttccaataaaaccccgtggccctatcgatattgacgggtttgcagtgctgggaaagctggcggataacccacaggtttccgtacccttcgagctccaatggatgctcatccactgtgatccactccgccctagaagagagacatgtcacgaattgcccgctaggataacaccatcacagacgacagacgaacggggtccaccaggggaacagggtccccctggaccacctggtccaccgggtgttcctggtatcgatggcatcgatggcgacagaggacccaaaggacctcctggaccaccaggcccagcgggagaaccaggtaagccaggcgctcctggaaagcccggtacccccggagccgacacgagtccttag

SEQ ID NO: 121657 - protein, 684 aa, Artificial Sequence
  derived and/or modified sequence
MAGPRACAPLLLLLLLGELLAAAGAQRVGLPGPPGPPGPPGKPGQDGIDGEAGPPGLPGPPGPKGAPGKPGKPGEAGLPGLPGVDGLTGRDGPPGPKGAPGERGSLGPPGPPGLGGKGLPGPPGEAGVSGPPGGIGLRGPPGPSGLPGLPGPPGPPGPPGHPGVLPEGATDLQCPSICPPGPPGPPGMPGFKGPTGYKGEQGEVGKDGEKGDPGPPGPAGLPGSVGLQGPRGLRGLPGPLGPPGDRGPIGFRGPPGIPGAPGKAGDRGERGPEGFRGPKGDLGRPGPKGTPGVAGPSGEPGMPGKDGQNGVPGLDGQKGEAGRNGAPGEKGPNGLPGLPGRAGSKGEKGERGRAGELGEAGPSGEPGVPGDAGMPGERGEAGHRGSAGALGPQGPPGAPGVRGFQGQKGSMGDPGLPGPQGLRGDVGDRGPGGAAGPKGDQGIAGSDGLPGDKGELGPSGLVGPKGESGSRGELGPKGTQGPNGTSGVQGVPGPPGPLGLQGVPGVPGITGKPGVPGKEASEQRIRELCGGMISEQIAQLAAHLRKPLAPGSIGRPGPAGPPGPPGPPGSIGHPGARGPPGYRGPTGELGDPGPRGNQGDRGDKGAAGAGLDGPEGDQGPQGPQGVPGTSKDGQDGAPGEPGPPGDPGLPGAIGAQGTPGICDTSACQGAVLGGVGEKSGSRSS

SEQ ID NO: 121658 - DNA, 576 bp, Artificial Sequence
  derived and/or modified sequence
atgtggtggtcgagcacacagaatgctggaaccgagggtgaggccggacctccaggactccccggtccaccaggccccaaaggcgcaccaggcaaaccgggaaaaccaggagaggccggcctgcctgggcttcctggagtggatgggctgactggccgcgatggcccccctggtcctaagggcgctcccggggagcgcgggagtcttgggccaccaggaccaccaggactcggcggaaagggtctgcccggcccgcctggagaggctggggtgtccggaccacccggagggattggactgcggggccctcccgggccgagcgggctgccagggcttcccggcccaccggggccacccgggcccccaggccatcccggggtactccccgagggagctaccgacctacagtgtccatctatttgcccgcccgggcccccaggcccaccagggatgcccggctttaagggtcctaccggatacaagggggagcagggagaagtggggaaagacggagagaagggcgaccctggaccacctgggcccgcaggactgcccggctctgtgggtctgcagtag

SEQ ID NO: 121659 - DNA, 576 bp, Artificial Sequence
  derived and/or modified sequence
atgtggtggtctagcacccaaaacgcaggcacagagggtgaggctgggccaccaggcctcccgggtccacctggcccaaaaggcgctccagggaagccagggaagccgggcgaagcaggcttgccaggcttaccaggcgtggacggcctgactggaagggatggaccccctggccccaaaggagctcccggcgaacgcgggagcctcggtcccccggggccacccggacttgggggcaagggcctccccgggccccccggagaggctggtgtcagcggacctcctgggggaattggattgcgaggacccccaggacctagtgggctccccggcctgcccggaccacccggtccaccggggcctcccggccacccaggcgtcctgcccgagggagccacagatctccaatgtccttctatatgtccaccaggtccaccagggccaccaggcatgcctgggttcaagggcccaacaggatacaaaggtgaacaaggagaggtaggtaaagatggcgaaaaaggagacccaggaccccccggccccgctgggttgcccggtagcgttggtcttcagtag

SEQ ID NO: 121660 - DNA, 576 bp, Artificial Sequence
  derived and/or modified sequence
atgtggtggagcagcacacagaatgctggaaccgagggagaggctggtccacccgggctgccgggcccgccaggaccaaaaggcgcccccggaaaaccaggaaagccgggagaagcggggctccctggattaccaggcgtcgatggtcttacaggcagagacggtcccccaggccccaaaggagctcccggtgagaggggaagtctcggccctcccggcccgccagggctgggcggcaaggggctacccggccctccaggggaagctggcgtttctggccctcccggaggcatagggttacgggggccgccaggccccagcggcctgccggggctgcctggtcctcccggacctcccggcccccctggtcatcctggcgtgcttcctgagggggcgactgacttacagtgtccatcgatttgtccaccaggcccaccaggacctccgggaatgcccggatttaaagggcccaccggatacaagggcgagcaaggagaagtgggaaaggacggtgaaaaaggagatcccggaccaccgggcccagctggcttgccagggagtgtaggccttcagtag

SEQ ID NO: 121661 - RNA, 576 nt, Artificial Sequence
  derived and/or modified sequence
augugguggucuagcacccaaaacgcaggcacagagggugaggcugggccaccaggccucccggguccaccuggcccaaaaggcgcuccagggaagccagggaagccgggcgaagcaggcuugccaggcuuaccaggcguggacggccugacuggaagggauggacccccuggccccaaaggagcucccggcgaacgcgggagccucggucccccggggccacccggacuugggggcaagggccuccccgggccccccggagaggcuggugucagcggaccuccugggggaauuggauugcgaggacccccaggaccuagugggcuccccggccugcccggaccacccgguccaccggggccucccggccacccaggcguccugcccgagggagccacagaucuccaauguccuucuauauguccaccagguccaccagggccaccaggcaugccuggguucaagggcccaacaggauacaaaggugaacaaggagagguagguaaagauggcgaaaaaggagacccaggaccccccggccccgcuggguugcccgguagcguuggucuucaguag

SEQ ID NO: 121662 - RNA, 576 nt, Artificial Sequence
  derived and/or modified sequence
augugguggagcagcacacagaaugcuggaaccgagggagaggcugguccacccgggcugccgggcccgccaggaccaaaaggcgcccccggaaaaccaggaaagccgggagaagcggggcucccuggauuaccaggcgucgauggucuuacaggcagagacggucccccaggccccaaaggagcucccggugagaggggaagucucggcccucccggcccgccagggcugggcggcaaggggcuacccggcccuccaggggaagcuggcguuucuggcccucccggaggcauaggguuacgggggccgccaggccccagcggccugccggggcugccugguccucccggaccucccggccccccuggucauccuggcgugcuuccugagggggcgacugacuuacaguguccaucgauuuguccaccaggcccaccaggaccuccgggaaugcccggauuuaaagggcccaccggauacaagggcgagcaaggagaagugggaaaggacggugaaaaaggagaucccggaccaccgggcccagcuggcuugccagggaguguaggccuucaguag

SEQ ID NO: 121663 - protein, 188 aa, Artificial Sequence
  derived and/or modified sequence
MDHSHHMGMSYMDSNSTMQPSHHHPTTSASHSHGGGDSSMMMMPMTFYFGFKNVELLFSGLVINTAGEMAGAFVAVFLLAMFYEGLKIARESLLRKSQVSIRYNSMPVPGPNGTILMETHKTVGQQMLSFPHLLQTCWDYRHEPPHLSLSPSYYSDLNYPKKAKVLLRVSVELMIQEALMITAGDSLC

SEQ ID NO: 121664 - protein, 190 aa, Artificial Sequence
  derived and/or modified sequence
MDHSHHMGMSYMDSNSTMQPSHHHPTTSASHSHGGGDSSMMMMPMTFYFGFKNVELLFSGLVINTAGEMAGAFVAVFLLAMFYEGLKIARESLLRKSQVSIRYNSMPVPGPNGTILMETHKTVGQQMLSFPHLLQTVLHIIQVVISYFLMLIFMTYNGYLCIAVAAGAGTGYFLFSWKKAVVVDITEHCH

SEQ ID NO: 121665 - DNA, 567 bp, Artificial Sequence
  derived and/or modified sequence
atggaccactcacaccacatgggcatgtcttacatggattccaattccactatgcagcccagccaccaccacccaaccactagcgcatctcactcccatggtgggggagactcttccatgatgatgatgccaatgaccttctacttcggcttcaagaatgtcgaactcctcttttccggcctcgttatcaacaccgcaggggaaatggccggagcatttgtcgcagtgttcttgctcgcgatgttctatgaaggcctgaaaattgctcgggagagcttgctcaggaaatcccaggtgagcattaggtacaatagcatgcccgtgcccggcccaaacggaaccatcttgatggagactcacaagacagtgggccaacagatgctgagctttcctcatctcctccagacttgctgggactacagacatgaaccccctcacttaagtttaagtccttcatactactcggatcttaattaccctaaaaaagctaaggtgctgctccgcgtatccgtggaattaatgatccaggaggcattaatgatcaccgccggcgattccctctgttag

SEQ ID NO: 121666 - DNA, 573 bp, Artificial Sequence
  derived and/or modified sequence
atggaccacagtcaccatatgggaatgtcctatatggatagcaacagtactatgcagccctcccaccatcatccgacgacctcagctagccactctcatggcggcggggactcatcaatgatgatgatgcctatgactttctatttcggattcaaaaacgtagagctcttattcagcggactggtcatcaataccgctggggagatggctggggccttcgtcgcagtctttcttctagcgatgttttacgaagggttgaaaatcgcccgcgagtctctcctgcggaagagtcaggtgagcatcaggtacaatagtatgcccgttccaggccctaatggaaccatacttatggagacccacaagacggtcggccagcagatgctgtcttttcctcacctgctccagacagttctgcatatcatccaagtagtgatctcatatttccttatgctgattttcatgacatacaacggctacttgtgtatcgctgtcgcagctggggctggcacaggttacttcctattcagttggaagaaagccgtggtcgttgacatcactgagcattgtcactag

SEQ ID NO: 121667 - DNA, 567 bp, Artificial Sequence
  derived and/or modified sequence
atggaccacagccaccacatgggcatgagctacatggacagcaacagcaccatgcagcccagccaccaccaccccaccaccagcgccagccacagccatggaggaggagacagctccatgatgatgatgcccatgaccttctacttcggcttcaagaatgtggagctgctcttcagcggcctggtgatcaacacagctggggagatggccggggcctttgtggccgtgttcctgctggccatgttttatgagggcctgaagatcgcccgggagagcctgctgaggaagagccaggtgtccatccgctacaacagcatgcctgtgcccggccccaacggcaccatcctgatggagacccacaagacagtgggccagcagatgctgtccttcccccacctgctgcagacctgctgggactacagacatgagcccccccacctgagcctgagccccagctactacagcgacctgaactaccccaagaaggccaaggtgctgctgcgggtgtctgtggagctgatgatccaggaggccctgatgatcacagctggggacagcctgtgctag

SEQ ID NO: 121668 - DNA, 573 bp, Artificial Sequence
  derived and/or modified sequence
atggaccacagccaccacatgggcatgagctacatggacagcaacagcaccatgcagcccagccaccaccaccccaccaccagcgccagccacagccatggaggaggagacagctccatgatgatgatgcccatgaccttctacttcggcttcaagaatgtggagctgctcttcagcggcctggtgatcaacacagctggggagatggccggggcctttgtggccgtgttcctgctggccatgttttatgagggcctgaagatcgcccgggagagcctgctgaggaagagccaggtgtccatccgctacaacagcatgcctgtgcccggccccaacggcaccatcctgatggagacccacaagacagtgggccagcagatgctgtccttcccccacctgctgcagacagtgctgcacatcatccaggtggtgatctcctacttcctgatgctgatcttcatgacctacaacggctacctgtgcatcgctgtggccgccggggccggcaccggctacttcctgttctcctggaagaaggctgtggtggtggacatcacagagcactgccactag

SEQ ID NO: 121669 - DNA, 567 bp, Artificial Sequence
  derived and/or modified sequence
atggaccacagccaccacatgggcatgagctacatggacagcaacagtacgatgcaaccatctcaccaccacccaaccacctctgcatcccattctcatggggggggagattcctctatgatgatgatgccaatgacattttactttgggttcaaaaacgtggagctgctattttctggattggtaattaatactgctggcgagatggccggcgctttcgtcgccgtattccttctcgctatgttttatgagggcttgaagatagcgagagagtctctgcttagaaaaagccaggtgagtattcgatataatagtatgcccgttcccggccccaacgggaccattctgatggagacacacaaaacggttgggcagcagatgctgtcattcccacatcttctccagacctgctgggactaccggcacgaaccgcctcatttatcgttgtcacctagttattactctgacttaaactaccctaagaaagcaaaggtcctcctgcgtgtatccgtcgagctgatgattcaggaggccctcatgatcactgccggagactcactttgttag

SEQ ID NO: 121670 - DNA, 573 bp, Artificial Sequence
  derived and/or modified sequence
atggaccacagccaccacatgggcatgagctacatggacagcaactcaactatgcagccatcccaccatcaccccacaacatctgcatcccactcccatggaggaggtgattcttccatgatgatgatgcccatgactttttattttggatttaagaatgttgaactgctgttctcaggcctcgtcatcaatactgccggcgagatggctggggcgtttgtggccgtgttcctgctggcaatgttttacgagggattgaaaatcgcccgcgagtccttactccgtaagagccaagtaagtattaggtataattccatgcccgtaccagggcccaatggtaccatactcatggagactcataaaacagtaggacaacagatgctaagctttccccaccttcttcagaccgtgctccacataatccaggtggtcataagctactttctgatgctgatattcatgacctacaacggctacctctgcattgccgtcgcagctggagccggaactgggtactttctgttctcctggaaaaaggcggtcgtagttgacataacagaacattgccattag

SEQ ID NO: 121671 - DNA, 567 bp, Artificial Sequence
  derived and/or modified sequence
atggaccatagccatcatatggggatgtcgtatatggattccaactcaacaatgcagccgagccatcatcatccaactacttcagcatcacatagccatgggggtggcgactcaagtatgatgatgatgcccatgacgttctatttcggcttcaagaacgtcgagctcttattcagcggtttagtcattaataccgctggggagatggccggtgccttcgtggctgtctttttgttagccatgttctatgaaggattaaagatcgcccgagaatccctcctaaggaagtcccaggtttccatccgctataactccatgcctgttcctgggcctaacgggaccattctcatggagacacataaaactgttgggcagcagatgctgtccttcccacatttgcttcagacatgttgggactatcggcacgagccacctcacctcagcctctctcccagttattactctgatttgaattatcccaagaaggcgaaggtcctgctgcgggtgagtgtcgaactgatgattcaagaagccttgatgatcacggccggtgattccctctgttag

SEQ ID NO: 121672 - DNA, 573 bp, Artificial Sequence
  derived and/or modified sequence
atggatcacagccaccatatggggatgagttacatggacagcaattctaccatgcagccatcccatcatcacccgaccacaagcgcttcccacagccatggcggaggcgacagctccatgatgatgatgcccatgaccttctacttcggattcaaaaatgttgaactgttgtttagcgggctcgttattaacaccgctggcgaaatggcaggcgctttcgttgcagtctttcttttggccatgttttatgaaggcctgaagattgcaagggagtcactgctgcgcaaaagccaggtcagcatccgatataattccatgcctgtcccagggcctaatggcacaatcttaatggagactcacaaaactgtgggacagcagatgctgagcttccctcacttgctacagacagtgctgcatattattcaggtggtcataagttactttttaatgctcattttcatgacctataacggatacttgtgtattgcagtcgctgctggagcgggaacaggatattttctgtttagctggaagaaagccgtggtcgtggacatcactgagcactgccactag

SEQ ID NO: 121673 - DNA, 1224 bp, Artificial Sequence
  derived and/or modified sequence
gccgttcgaagagtcgtgagggggtgacgggttaagattcggagagagaggtgctagtggctggacttgacctggaaagaatcttctgctgactctcaacttttcctggaaaaaatggatcattcccaccatatggggatgagctatatggactccaacagtaccatgcaaccttctcaccatcacccaaccacttcagcctcacactcccatggtggaggagacagcagcatgatgatgatgcctatgaccttctactttggctttaagaatgtggaactactgttttccggtttggtgatcaatacagctggagaaatggctggagcttttgtggcagtgtttttactagcaatgttctatgaaggactcaagatagcccgagagagcctgctgcgtaagtcacaagtcagcattcgctacaattccatgcctgtcccaggaccaaatggaaccatccttatggagacacacaaaactgttgggcaacagatgctgagctttcctcacctcctgcaaacatgctgggattacaggcatgagccaccacacctgtccctctccccctcgtattactcagacttaaactaccccaaaaaggctaaagtcctgctaagagtctccgtagaactgatgattcaagaggctcttatgatcacagctggtgattccctgtgttgaattagtgaaaacaggccaggcacagtaatcccagcactttgagaggactgcttaatgtcaggagctcaagcccagcttgggcaacacagatgcctgtctctacataaaacaataaaaatttttaaaaaaaatttttttttaatgcccagaacaatagggcatgattcaaaattatcctccgagctgcctctctggttctttctgggaaaaacacttaggcaagttgagaaaggaaggaaagttggaataatggcaaaactgttagaagcattcctctttcctccattgcctgtcctcccaacattatacccaaactagttacaaagccattctgtaaagagatcgggtacctacaatttcttcagatttacacaatatccactagaatttaatttctacaagggcagggatctttgttgagtggcacatggtagacactcaataaatacttattgaatagatgggttaagtgaaagtggcagggatcaactagagtgtcctgtgcttagggtcttttaataaagatggaaagaatgatgttaa

SEQ ID NO: 121674 - DNA, 4744 bp, Artificial Sequence
  derived and/or modified sequence
gcggtggtggacacgtcgagccgggtagaagtggaggggccgttcgaagagtcgtgagggggtgacgggttaagattcggagagagaggtgctagtggctggacttgacctggaaagaatcttctgctgactctcaacttttcctggaaaaaatggatcattcccaccatatggggatgagctatatggactccaacagtaccatgcaaccttctcaccatcacccaaccacttcagcctcacactcccatggtggaggagacagcagcatgatgatgatgcctatgaccttctactttggctttaagaatgtggaactactgttttccggtttggtgatcaatacagctggagaaatggctggagcttttgtggcagtgtttttactagcaatgttctatgaaggactcaagatagcccgagagagcctgctgcgtaagtcacaagtcagcattcgctacaattccatgcctgtcccaggaccaaatggaaccatccttatggagacacacaaaactgttgggcaacagatgctgagctttcctcacctcctgcaaacagtgctgcacatcatccaggtggtcataagctacttcctcatgctcatcttcatgacctacaacgggtacctctgcattgcagtagcagcaggggccggtacaggatacttcctcttcagctggaagaaggcagtggtagtggatatcacagagcattgccattgacatcaaactctatggcgtggccttatcgattgcagtgggaagttgttgaagacttgaagacgtgattcctgctccaatcatcccttcttgctcctctttgtgcacgtacacacacacacacacacacacacacacacacccctgctcaacagaggtttagtttacagtctctgaactaaagtagtaacctcccaaattgttttttctaataagctgagattcccatttctcttaaggagaagccacccatgagatgtcttttccttctccatcatcttagagccaagttatatgttcttgtctaatccatgtagctttttgttcaatgacttgatcatctgcttcctttttgaatttttaacagatagtaagtaaatttggtggttttttcccctgggtcagtgatggaaaggggttaacttcagccaggattgatggcagctgagggaaattcttgcccaactaaacccagaactcaaacttaacattagaaaataaggtccagggccggacacagtggcccatgcctgtaatcccagcactttggggggccaaggcaggctggatcacctgaggacaggagttcgagaccagtctggccaacatggggaaaccccgtctctactaaaaatacaaaaattagccgggcatggtggtgggcgcctgtaatcccagctactcagaaggctgaggcaggagaatcacttgaacctaggaggcggaggttgcagtgagccaagatggcgccattgcactccagcctgggtgacaagagtgaaactccatctcaaaaaaaaagaaaagaaggtccagcttttggattcaatgagtgggaaatacattgtgcctttctctagatgtgatacgttataccaaaatctttgtagtgtgcagagcggtggtttgagactaaatacaggcttagaacttgcagagtgtgtattcttggatggctgatgcatcgacttgcattcccacttaacactttgattagcatgaacttgccaatcaaaaaatgacaatcaatttgagaaaatagaaatagatatttttaaataaaaccattcacagtttactttgtcttgataccttggtttgtcccagctgaagtgaagcaagagagtttgaattaatttttccattataatgttttcgcatgtctgcctctaaaactgtgattttcaagctttagcgtgcatcagaatcacctgtagggcttgttaaaacactaattgctgggcctcaacccaaaagcccccaaagtggcacttctgagttcctgctgatgttacaagggaccacacttttgagaatctgtgctttaagctaaggaaatattgcctggtgggttggctgcctggtattgggcatggaaatttgaattgctgattggtagatggtgtgtctggacttaactcacgtagtaaatactgctgatcaatacctaatcattccacatttattgagctccacctgtgtgtatgtgtacccaagcacacatgtgtgaagggctatagccaaagtatttttactagcctgtatgaaatcactagtccttatttttaaaggtctatggtttcttggaagtagtttgattgttgagagagacctttgatctgcagtgtaaatctaccagtcatgggccagaagggcaaaagcccagctttctctttggaaagactcaggctgtggtttgttgatggccaggttttcctcaggctccaacaactgtgcttataccaagcagatcctcatcctccatataatcatctttgttattcgtgggggtttaattacattacaagtggccaaaacccctgttctcagtgaagaaccacattggatttgtattctgttcagttgtagtctacactgcagtcttattcctggttcaaactacctctttaaattgatttgtcttgtgctggtctgttaaatcctgccctccttggtgctagatccagttgtgcctcagggcagaggaaacaaaacacagctatcctgttggcctgtgttgtggttttgaagtttgtactttctctgtgggtgccagttaaatattggagagcaaggaatgtggacttgtatggctttgaaccaagagagggttatgagcctactggattgaggttaaaatccaagaaccaacatttagagctttgtgcttttctctcattccatcactttgtaatgatgatacttaacatgagcagggtgaatgacaggtactgacgaagtccaacacaaaggtataatacagcctgttgtctaaagccaaggagtcataaaaccatgagaaataaataggaatcaatagttagtagtgacattggtgctctctagaaatctcagcatgagctgctatagaataccctcccagcaacaaaacctaatcagtaaggccagctagacccaatggctcatgcctgtaatcccaacactttgggaggccaaggtgggaggatggcttgtgtccagaagttcgagaccagcctggacaacatagtgagatcctatctctataaaaaatcaaaaattagccaggcatggtggtgcatacctatagtcctggctatttgggaggctgaggcaggaggattgctttagccctggaggtcgaggctgcagtaagccatgattgcgccactgcactcagcccgggtgacaaagcaagaccctgtctcagaaaaaaagaaaattcaaggccagttaagacaaaatgctatgactttgaaattcacagaaagaaataacagtttagattaggtcttcaggtattcaggatagagataatctcctgaaaaacctgaatttcagagattcttagactggctgccaaaggatgaagctagtgaaggagaaaaagcttaaattccatcttgagctcttggattgtgataatacaatgatttcattaacttttcatttctgtatacctgttcatttggaatttaatgcttgacttctttgttcattttggatctaaacttctcttttcttccttccccattcacatctattagaagactgcatcaccatttctttggcccccttactctgttgtcctttcccttttctttcagtttttttaatcgcatgtctagtatattaagtctccatagccctcctgatgcagtagacagtgctatgctgtggatataataccaaccagaaattggcatttataaacctgttaagagactttaagcatgcttcaagaggcagttgacccactggaatttctataaggctggtacccttcccagagttacagaatcttaggtgccgtctctagtctgtgagggaggaactcccagcatccccattgcccacaaatggaatcctcactgtatccactaggagattagaaattaaggtttcttcactacttctatggtagggttgtctgaaattccctttcaggctgtgggtactggtcttgggttctagtcataaggggttccttataaggagcaggcggaggggagtacactttcatgtgatttaattttgatcctgccctctccagctgctccttcaaaagatacatcaaaagatagaaactctgggctgggcacagtggctcacacactttgggaggccaagcgggggtgcagatcacctgaggtcaggagtttgagaccagcctggccaatgtggtgaaaccccatctctactaaaaatacaaaaattagctgggcgtggtggtgcatgcctgtaatcccagctactcgggaggctgaggcaggagaatcgcttgaacccaggaggcggaggttgcagtgagccaagatggcgccattgcactccagcctgggcgacaagagcaaaactccgtctcaaaaaaaaaaaaaagatacaaagtctgcatttgatataatgccttaattactgggtctacaattaatgttgactgttttagattgtaagctcctggagagcagtattgctgtagtaggaatgttttaacagtgtcatatgaaaaagaacaaaataaatattttgattttgtgattcta

SEQ ID NO: 121675 - DNA, 567 bp, Artificial Sequence
  derived and/or modified sequence
atggaccacagccaccacatgggcatgagctacatggacagcaacagcaccatgcagcccagccaccaccaccccaccaccagcgccagccacagccacggcggcggcgacagcagcatgatgatgatgcccatgaccttctacttcggcttcaagaacgtggagctgctgttcagcggcctggtgatcaacaccgccggcgagatggccggcgccttcgtggccgtgttcctgctggccatgttctacgagggcctgaagatcgccagagagagcctgctgagaaagagccaggtgagcatcagatacaacagcatgcccgtgcccggccccaacggcaccatcctgatggagacccacaagaccgtgggccagcagatgctgagcttcccccacctgctgcagacctgctgggactacagacacgagcccccccacctgagcctgagccccagctactacagcgacctgaactaccccaagaaggccaaggtgctgctgagagtgagcgtggagctgatgatccaggaggccctgatgatcaccgccggcgacagcctgtgctag

SEQ ID NO: 121676 - DNA, 573 bp, Artificial Sequence
  derived and/or modified sequence
atggaccacagccaccacatgggcatgagctacatggacagcaacagcaccatgcagcccagccaccaccaccccaccaccagcgccagccacagccacggcggcggcgacagcagcatgatgatgatgcccatgaccttctacttcggcttcaagaacgtggagctgctgttcagcggcctggtgatcaacaccgccggcgagatggccggcgccttcgtggccgtgttcctgctggccatgttctacgagggcctgaagatcgccagagagagcctgctgagaaagagccaggtgagcatcagatacaacagcatgcccgtgcccggccccaacggcaccatcctgatggagacccacaagaccgtgggccagcagatgctgagcttcccccacctgctgcagaccgtgctgcacatcatccaggtggtgatcagctacttcctgatgctgatcttcatgacctacaacggctacctgtgcatcgccgtggccgccggcgccggcaccggctacttcctgttcagctggaagaaggccgtggtggtggacatcaccgagcactgccactag

SEQ ID NO: 121677 - protein, 143 aa, Artificial Sequence
  derived and/or modified sequence
MAMHFIFSDTAVLLFDFWSVHSPAGMALSVLVLLLLAVLYEGIKVGKAKLLNQVLVNLPTSISQQTIAETDGDSAGSDSFPVGRTHHRWYLCHFGQSLIHVIQVVIGYFIMLAVMSYNTWIFLGVVLGSAVGYYLAYPLLSTA

SEQ ID NO: 121678 - DNA, 432 bp, Artificial Sequence
  derived and/or modified sequence
atggctatgcacttcattttttccgataccgcggtgttactgttcgacttttggtccgtccattcacctgccggcatggccctgagcgtgctggtcctgttacttctggcagtgttatatgaaggtataaaagtggggaaggccaagctgctcaatcaggtgctagtcaatctgccaacgagcatctcgcagcagactattgctgagaccgacggcgatagtgccggatccgatagcttcccggtgggtcggacccatcaccgatggtacctgtgccactttggacagagtctaattcatgtcattcaggtagttattggttacttcatcatgctggccgtgatgtcgtataacacttggatttttctgggcgtagtgctgggcagtgccgttggctattatctggcctaccctctgttgagcacggcttag

SEQ ID NO: 121679 - DNA, 432 bp, Artificial Sequence
  derived and/or modified sequence
atggccatgcacttcatcttcagtgacacagctgtgctgctgtttgacttctggagcgtgcacagccctgctggcatggccctgtctgtgctggtgctgctgctgctggccgtgctgtatgagggcatcaaggtgggcaaggccaagctgctgaaccaggtgctggtgaacctgcccaccagcatcagccagcagaccatcgccgagacagatggagacagcgctggcagtgacagcttccctgtgggccgcacccaccaccgctggtacctgtgccacttcggccagagcctcatccacgtgatccaggtggtgattggctacttcatcatgctggccgtgatgagctacaacacctggatcttcctgggcgtggtgctgggcagcgctgtgggctactacctggcctaccccctgctgagcacagcctag

SEQ ID NO: 121680 - DNA, 432 bp, Artificial Sequence
  derived and/or modified sequence
atggccatgcacttcatcttcagcgacaccgccgtgctgctgttcgatttctggtccgttcacagccccgcaggcatggcactcagcgtactggttctcctgttgctagcagtactgtatgagggcataaaggtgggtaaggctaagctgttaaatcaggtactggtcaacctccccactagcatctcccagcagacgatcgccgagactgatggcgacagtgcaggtagcgactctttccctgtcggacgaacacaccacaggtggtatctttgtcatttcgggcagagcctgattcatgtgatacaggtcgtcattggatattttattatgttagccgtcatgtcctacaacacatggatctttttaggtgtggtgcttggaagcgcagttggctactaccttgcgtaccctctcctgtccaccgcttag

SEQ ID NO: 121681 - DNA, 432 bp, Artificial Sequence
  derived and/or modified sequence
atggccatgcattttatcttctccgacaccgccgtcctcttattcgacttttggtccgtgcactctccggctgggatggccctgtcagtcctggtcctgttgttgctagctgtgctctacgaggggatcaaggtgggaaaggccaagctgctaaaccaggttcttgttaaccttccgacgagcatatctcagcagacaatagccgagaccgatggagattcggcaggtagcgactccttcccagtaggtaggactcaccaccgatggtacctgtgccatttcggacagagcctcattcatgtgatccaagtggtaataggatactttatcatgcttgcagtcatgagctacaacacctggattttcctgggcgtcgtgctcgggagtgctgtgggttattatttggcctatcctctcctctcaacggcatag

SEQ ID NO: 121682 - DNA, 1785 bp, Artificial Sequence
  derived and/or modified sequence
ctcgcccggaccacgtgatccgtgcggccagggtagctatcgcggcggcggcggcggcggcggttgaactgactcggagcgaggagacccgagcgagcagacgcggccctggcgcccgccctgcgcactcaccatggcgatgcatttcatcttctcagatacagcggtgcttctgtttgatttctggagtgtccacagtcctgctggcatggccctttcggtgttggtgctcctgcttctggctgtactgtatgaaggcatcaaggttggcaaagccaagctgctcaaccaggtactggtgaacctgccaacctccatcagccagcagaccatcgcagagacagacggggactctgcaggctcagattcattccctgttggcagaacccaccacaggtggtatttgtgtcactttggccagtctctaatccatgtcatccaggtggtcatcggctacttcatcatgctggccgtaatgtcctacaacacctggattttccttggtgtggtcttgggctctgctgtgggctactacctagcttacccacttctcagcacagcttagctggtgaggaacgtgcaggcactgaggctggagggacatggagccccctcttccagacactatacttccaactgccctttcttctgatggctattcctccaccttattcccagcccctggaaactttgagctgaagccagcacttgctccctggagttcggaagccattgcagcaaccttccttctcagccagcctacgtagggcccaggcatggtcttgtgtcttaagacagctgctgtgaccaaagggagaatggagataacaggggtggcagggttactgagcccatgacaatgcttctctgtgactcaaaccaggaatttccaaagatttcaagccagggagaagggttcttggtgatgcagggcatggaacctggacaccctcagctctcctgctttgtgccttatctacaggagcatcgcccattggacttcctgacctcttctgtctttgagggacagagaccaagctagatcctttttctcacctttctgcctttggaacacatgaagatcatctcgtctatggatcatgttgacaaactaagttttttttatttttcccattgaactcctagttggcaattttgcacattcatacaaaaaaatttttaatgaaatgatttcattgattcatgatggatggcagaaactgctgagacctatttccctttcttggggagagaataagtgacagctgattaaaggcagagacacaggactgctttcaggctcctggtttattctctgatagactgagctccttccaccagaaggcactgcctgcaggaagaagatgatctgatggccgtgggtgtctgggaagctcttcgtggcctcaatgccctcctttatcctcatctttcttctatgcagaacaaaaagctgcatctaataatgttcaatacttaatattctctatttattacttactgcttactcgtaatgatctagtggggaaacatgattcattcacttaaaatactgattaagccatgggcaggtactgactgaagatgcaatccaaccaaagccattacattttttgagttagatgggactctctggatagttgaacctcttcactttataaaaaaggaaagagagaaaatcactgctgtatactaaatacctcacagattagatgaaaagatggttgtaagctttgggaattaaaaacaaacaaatacattttagtaaatatatatttttaaata

SEQ ID NO: 121683 - DNA, 432 bp, Artificial Sequence
  derived and/or modified sequence
atggccatgcacttcatcttcagcgacaccgccgtgctgctgttcgacttctggagcgtgcacagccccgccggcatggccctgagcgtgctggtgctgctgctgctggccgtgctgtacgagggcatcaaggtgggcaaggccaagctgctgaaccaggtgctggtgaacctgcccaccagcatcagccagcagaccatcgccgagaccgacggcgacagcgccggcagcgacagcttccccgtgggcagaacccaccacagatggtacctgtgccacttcggccagagcctgatccacgtgatccaggtggtgatcggctacttcatcatgctggccgtgatgagctacaacacctggatcttcctgggcgtggtgctgggcagcgccgtgggctactacctggcctaccccctgctgagcaccgcctag

SEQ ID NO: 121684 - DNA, 510 bp, Artificial Sequence
  derived and/or modified sequence
atgctggcgactcgggttttttctctggttggaaaacgtgctataagcacttccgtctgcgtacgagcccacgagagcgttgtcaagagcgaagacttctccctcccagcgtatatggaccgccgagatcaccctctgccagaggttgcccacgtaaagcatctgagcgccagtcaaaaggccctgaaagaaaaagaaaaggcaagctggagctcgctgtccatggatgaaaaggtcgagctgtatagaataaagttcaaggagtccttcgccgagatgaaccggggatcaaacgaatggaaaacagtggtaggcggagcaatgttctttataggattcacggcactggtcattatgtggcagaaacactacgtatacggaccgctgccacagtcatttgataaggagtgggtcgccaaacaaacgaaacggatgcttgacatgaaagtcaatcccattcaggggttggcatctaagtgggattacgaaaagaacgagtggaaaaagtag

SEQ ID NO: 121685 - DNA, 510 bp, Artificial Sequence
  derived and/or modified sequence
atgctggccaccagggtcttcagcctggtgggcaagagggccatcagcacctctgtgtgtgtgcgggcccacgagagcgtggtgaagtctgaggacttcagcctgcctgcctacatggacagaagagaccaccccctgcctgaggtggcccacgtgaagcacctgagcgccagccagaaggccctgaaggagaaggagaaggcctcctggagcagcctgtccatggatgagaaggtggagctgtaccgcatcaagttcaaggagagctttgctgagatgaacagaggcagcaatgagtggaagacagtggtgggcggggccatgttcttcatcggcttcaccgccctggtgatcatgtggcagaagcactacgtgtatggccccctgccccagagctttgacaaggagtgggtggccaagcagaccaagaggatgctggacatgaaggtgaaccccatccagggcctggccagcaagtgggactatgagaagaatgagtggaagaagtag

SEQ ID NO: 121686 - DNA, 510 bp, Artificial Sequence
  derived and/or modified sequence
atgctggccacccgggtgttcagcctggtgggcaagcgggccatcagtacaagcgtgtgcgtgagggcccatgagtctgtggtcaaaagcgaagacttttcgctccccgcttatatggatcgccgcgaccatcctctgccagaagtggcccacgttaagcatctttctgcctcgcaaaaggccctgaaggaaaaggagaaggcatcctggtcaagtctttctatggatgaaaaagtagagttgtataggataaaatttaaagaaagcttcgccgagatgaatcgtggatccaatgagtggaaaactgtcgttggcggtgctatgttttttattggattcactgcccttgtgattatgtggcagaaacattacgtttatggccccctcccccaatcattcgacaaagagtgggttgctaaacagaccaagaggatgttagacatgaaagtcaacccaatccaaggactggcaagtaaatgggactatgaaaaaaatgagtggaagaaatag

SEQ ID NO: 121687 - DNA, 510 bp, Artificial Sequence
  derived and/or modified sequence
atgctggctactagggtgttctctctggtgggaaagcgcgctattagcacttcagtttgtgtccgggcacatgagagcgttgtaaaaagcgaggacttttcacttccagcttatatggacaggagagaccaccccctgcctgaagtcgcccatgtcaaacacctgagcgcctctcagaaggccttgaaggaaaaagaaaaggccagttggtcgtccctaagcatggacgagaaggtagagttataccgcattaagtttaaggagagctttgcagagatgaataggggctccaatgagtggaagactgtggtcggcggagccatgttcttcattggctttactgcgcttgtgataatgtggcagaaacactacgtctacggcccacttccgcaaagtttcgacaaggagtgggtggccaagcagacaaaacgcatgctggacatgaaggttaaccccatccagggactcgctagcaaatgggactacgagaagaacgagtggaaaaaatag

SEQ ID NO: 121688 - DNA, 708 bp, Artificial Sequence
  derived and/or modified sequence
gcggccttgctctcttccggtcgcgggacaccgggtgtagagggcggtcgcggcgggcagtggcggcagaatgttggctaccagggtatttagcctagttggcaagcgagcaatttccacctctgtgtgtgtacgagctcatgaaagtgttgtgaagagcgaagacttttcgctcccagcttatatggatcggcgtgaccaccccttgccggaggtggcccatgtcaagcacctgtctgccagccagaaggcattgaaggagaaggagaaggcctcctggagcagcctctccatggatgagaaagtcgagttgtatcgcattaagttcaaggagagctttgctgagatgaacaggggctcgaacgagtggaagacggttgtgggcggtgccatgttcttcatcggtttcaccgcgctcgttatcatgtggcagaagcactatgtgtacggccccctcccgcaaagctttgacaaagagtgggtggccaagcagaccaagaggatgctggacatgaaggtgaaccccatccagggcttagcctccaagtgggactacgaaaagaacgagtggaagaagtgagagatgctggcctgcgcctgcacctgcgcctggctctgtcaccgccatgcaactccatgcctatttactggaaacctgttatgccaaacagttgtaccactgctaataaatgaccagtttacctgaaa

SEQ ID NO: 121689 - DNA, 510 bp, Artificial Sequence
  derived and/or modified sequence
atgctggccaccagagtgttcagcctggtgggcaagagagccatcagcaccagcgtgtgcgtgagagcccacgagagcgtggtgaagagcgaggacttcagcctgcccgcctacatggacagaagagaccaccccctgcccgaggtggcccacgtgaagcacctgagcgccagccagaaggccctgaaggagaaggagaaggccagctggagcagcctgagcatggacgagaaggtggagctgtacagaatcaagttcaaggagagcttcgccgagatgaacagaggcagcaacgagtggaagaccgtggtgggcggcgccatgttcttcatcggcttcaccgccctggtgatcatgtggcagaagcactacgtgtacggccccctgccccagagcttcgacaaggagtgggtggccaagcagaccaagagaatgctggacatgaaggtgaaccccatccagggcctggccagcaagtgggactacgagaagaacgagtggaagaagtag

SEQ ID NO: 121690 - protein, 129 aa, Artificial Sequence
  derived and/or modified sequence
MASRLLRGAGTLAAQALRARGPSGAAAMRSMASGGGVPTDEEQATGLEREIMLAAKKGLDPYNVLAPKGASGTREDPNLVPSISNKRIVGCICEEDNTSVVWFWLHKGEAQRCPRCGAHYKLVPQQLAH

SEQ ID NO: 121691 - DNA, 390 bp, Artificial Sequence
  derived and/or modified sequence
atggcctcccgtctactgcgcggcgctgggacgttggcagcccaggctctccgcgcccgtggcccaagcggagctgcggccatgcgcagtatggcgagtggcggaggggttccgacagatgaggaacaagctacaggtctggagcgcgagatcatgttggcagccaaaaagggcctagatccgtataatgtgctcgcaccaaaaggagcaagcgggacacgggaggaccctaatttggttccatcgatctcaaataagcgtatcgtggggtgcatatgcgaggaggataacaccagtgttgtgtggttctggcttcacaagggtgaggcccagcgctgtccacgatgcggagcccactacaaactagttccccagcagcttgcacattag

SEQ ID NO: 121692 - DNA, 390 bp, Artificial Sequence
  derived and/or modified sequence
atggccagccggctgctgcggggagctggcaccctggccgcccaggccctgcgggcccggggccccagcggggccgccgccatgaggtccatggccagcggcggcggcgtgcccacagatgaggagcaggccaccggcctggagcgggagatcatgctggccgccaagaagggcctggacccctacaacgtgctggcccccaagggggccagcggcacccgggaggaccccaacctggtgcccagcatcagcaacaagagaattgtgggctgcatctgtgaggaggacaacacctctgtggtgtggttctggctgcacaagggggaggcccagcgctgcccccgctgtggggcccactacaagctggtgccccagcagctggcccactag

SEQ ID NO: 121693 - DNA, 390 bp, Artificial Sequence
  derived and/or modified sequence
atggccagccggctgctgcggggcgccggcaccctggccgcccaggctctgcgtgcacgggggccttctggtgccgccgccatgagaagtatggcctccggcgggggtgtgcccactgacgaagagcaagctaccgggctcgagcgtgaaataatgctggctgcgaaaaaaggtctcgatccttataacgtcctcgcccctaaaggagccagcggcacacgcgaggaccctaacttagtaccatcaatatccaacaagcggattgtgggatgcatctgcgaggaggataacacatccgtcgtgtggttctggctgcacaagggggaagcccagagatgtccaaggtgcggtgcgcactataagctcgtgccgcagcagctggcgcactag

SEQ ID NO: 121694 - DNA, 390 bp, Artificial Sequence
  derived and/or modified sequence
atggcgtcccgtctgctgaggggcgctggtacactggctgctcaggctcttagagcaagaggtccttcaggagccgcagcgatgcgctctatggcgtctggcggtggggttcctactgatgaggaacaggccactggcctggagcgggagattatgctagccgcaaagaaagggttggatccttataatgttcttgcgcctaagggcgcttccggcacaagagaagatccaaaccttgtcccctccatttccaacaaaaggatcgtcgggtgcatttgtgaagaggataataccagcgtggtctggttttggttgcataagggcgaggcccaacgttgcccaaggtgcggggcacactataaactagttccccagcagctagcccactag

SEQ ID NO: 121695 - DNA, 712 bp, Artificial Sequence
  derived and/or modified sequence
gtctctgcagcttgttcccggaagttttgctgctagtcgcggacgcaatggcttcaaggttacttcgcggagctggaacgctggccgcgcaggccctgagggctcgcggccccagtggcgcggccgcgatgcgctccatggcatctggaggtggtgttcccactgatgaagagcaggcgactgggttggagagggagatcatgctggctgcaaagaagggactggacccatacaatgtactggccccaaagggagcttcaggcaccagggaagaccctaatttagtcccctccatctccaacaagagaatagtaggctgcatctgtgaagaggacaataccagcgtcgtctggttttggctgcacaaaggcgaggcccagcgatgcccccgctgtggagcccattacaagctggtgccccagcagctggcacactgagcacctgcactaaattactcaaaatgtgctgtaaagtttcttctttccagtaaagactagccattgcattggctccttctcccatagatggctggtcttatttcttacccgtattctttggtaggcatggaatatgcttattttgggaaaagctgtctgttaatgctagcttgccatccacttactgaaagtgtataaccagtgtatagtgcttagattaataataagaatagatcgacaacccgtaatgcaatgaatgggaccacctggtatga

SEQ ID NO: 121696 - DNA, 390 bp, Artificial Sequence
  derived and/or modified sequence
atggccagcagactgctgagaggcgccggcaccctggccgcccaggccctgagagccagaggccccagcggcgccgccgccatgagaagcatggccagcggcggcggcgtgcccaccgacgaggagcaggccaccggcctggagagagagatcatgctggccgccaagaagggcctggacccctacaacgtgctggcccccaagggcgccagcggcaccagagaggaccccaacctggtgcccagcatcagcaacaagagaatcgtgggctgcatctgcgaggaggacaacaccagcgtggtgtggttctggctgcacaagggcgaggcccagagatgccccagatgcggcgcccactacaagctggtgccccagcagctggcccactag

SEQ ID NO: 121697 - protein, 86 aa, Artificial Sequence
  derived and/or modified sequence
MAEDMETKIKNYKTAPFDSRFPNQNQTRNCWQNYLDFHRCQKAMTAKGGDISVCEWYQRVYQSLCPTSWVTDWDEQRAEGTFPGKI

SEQ ID NO: 121698 - protein, 103 aa, Artificial Sequence
  derived and/or modified sequence
MHPHPQIPGRDLAGFSTMAEDMETKIKNYKTAPFDSRFPNQNQTRNCWQNYLDFHRCQKAMTAKGGDISVCEWYQRVYQSLCPTSWVTDWDEQRAEGTFPGKI

SEQ ID NO: 121699 - DNA, 261 bp, Artificial Sequence
  derived and/or modified sequence
atggctgaagacatggagaccaagattaaaaattataagacggccccctttgacagcaggtttccgaatcaaaatcagaccagaaattgttggcagaattatcttgactttcaccgatgtcagaaagctatgaccgctaaggggggcgatatctcagtctgcgagtggtaccagagggtgtatcaatcactctgccccacctcctgggtgacagactgggatgagcagcgagccgaaggaacatttcccggaaaaatttag

SEQ ID NO: 121700 - DNA, 312 bp, Artificial Sequence
  derived and/or modified sequence
atgcatcctcacccccaaattcctggcagagacctggccggattctcaaccatggcagaggacatggagaccaagatcaagaattataaaacagcaccattcgattcacgcttccccaaccaaaatcagacacgcaattgctggcagaactacctcgactttcatcgctgtcagaaggctatgacagccaaaggtggggatatctctgtctgcgagtggtatcagagagtctaccagtccttgtgtccaaccagttgggtcactgactgggacgagcagagggctgaagggacgtttcccggcaaaatctag

SEQ ID NO: 121701 - DNA, 261 bp, Artificial Sequence
  derived and/or modified sequence
atggccgaggacatggagaccaagatcaagaactacaagacagccccctttgacagccgcttccccaaccagaaccagaccaggaactgctggcagaactacctggacttccaccgctgccagaaggccatgacagccaagggcggggacatctctgtgtgtgagtggtaccagagggtgtaccagagcctgtgccccacctcctgggtgacagactgggatgagcagagagctgagggcaccttccctgggaagatctag

SEQ ID NO: 121702 - DNA, 312 bp, Artificial Sequence
  derived and/or modified sequence
atgcacccccacccccagatccctggccgggacctggccggcttcagcaccatggccgaggacatggagaccaagatcaagaactacaagacagccccctttgacagccgcttccccaaccagaaccagaccaggaactgctggcagaactacctggacttccaccgctgccagaaggccatgacagccaagggcggggacatctctgtgtgtgagtggtaccagagggtgtaccagagcctgtgccccacctcctgggtgacagactgggatgagcagagagctgagggcaccttccctgggaagatctag

SEQ ID NO: 121703 - DNA, 261 bp, Artificial Sequence
  derived and/or modified sequence
atggccgaggacatggagaccaagatcaagaactacaagaccgcccctttcgactcccggtttcccaaccagaatcaaacacgcaactgttggcagaattatttggatttccatagatgtcagaaggccatgaccgccaaggggggagatatttccgtgtgcgagtggtaccaaagagtctatcagtctctttgtcccacatcttgggtgacagactgggacgagcagcgtgccgaaggtactttccccggtaaaatctag

SEQ ID NO: 121704 - DNA, 312 bp, Artificial Sequence
  derived and/or modified sequence
atgcacccccacccccagatccccggccgggacctggccggcttcagtactatggcagaagatatggaaaccaagatcaagaactataagactgcgcccttcgactcacgcttccccaaccagaaccagactaggaactgctggcagaactatctggattttcacagatgtcagaaggctatgacggctaaaggaggtgatatctccgtatgcgagtggtatcagcgggtgtaccagtcgctctgtccaaccagctgggtgaccgattgggacgaacagcgggcagaaggcacctttccagggaaaatttag

SEQ ID NO: 121705 - DNA, 261 bp, Artificial Sequence
  derived and/or modified sequence
atggctgaggacatggagacaaaaatcaagaactataagacagcaccttttgacagtcggttcccgaaccaaaaccagactcgtaattgctggcaaaactacctggattttcataggtgtcagaaagccatgactgcgaaaggtggagatatctcagtgtgcgagtggtatcagagagtgtaccaatcgctgtgtcccacttcatgggttacagactgggacgagcagagggcagaaggaactttcccaggaaagatctag

SEQ ID NO: 121706 - DNA, 312 bp, Artificial Sequence
  derived and/or modified sequence
atgcatcctcatcctcaaatccccggtcgagacttagcaggctttagcactatggccgaagatatggaaaccaaaatcaagaactataaaaccgccccattcgacagcaggtttcccaaccagaaccagaccagaaactgctggcaaaactacctggacttccaccgatgccaaaaggccatgaccgctaagggtggagacatcagcgtttgcgaatggtatcagcgggtttatcagagcctgtgtcctacatcttgggttactgactgggatgagcaaagggctgaaggcactttccccggtaaaatctag

SEQ ID NO: 121707 - DNA, 590 bp, Artificial Sequence
  derived and/or modified sequence
tgggcgtggcttgaatgacttcagtggcctcctcctgggagggagctgaagccgctcgcaagactcccgtagtccccacctctctcagcttccggctggtagtagttccgcttcctgtccgactgtggtgtctttgctgagggtcacattgagctgcaggttgaatccggggtgcctttaggattcagcaccatggcggaagacatggagaccaaaatcaagaactacaagaccgccccttttgacagccgcttccccaaccagaaccagactagaaactgctggcagaactacctggacttccaccgctgtcagaaggcaatgaccgctaaaggaggcgatatctctgtgtgcgaatggtaccagcgtgtgtaccagtccctctgccccacatcctgggtcacagactgggatgagcaacgggctgaaggcacgtttcccgggaagatctgaactggctgcatctccctttcctctgtcctccatccttctcccaggatggtgaagggggacctggtacccagtgatccccaccccaggatcctaaatcatgacttacctgctaataaaaactcattggaaaagtgaga

SEQ ID NO: 121708 - DNA, 435 bp, Artificial Sequence
  derived and/or modified sequence
catcctcccttttggacgttggaggggccgcagcgtcatctccgatgcaccctcatcctcagataccgggtagagatctcgccggattcagcaccatggcggaagacatggagaccaaaatcaagaactacaagaccgccccttttgacagccgcttccccaaccagaaccagactagaaactgctggcagaactacctggacttccaccgctgtcagaaggcaatgaccgctaaaggaggcgatatctctgtgtgcgaatggtaccagcgtgtgtaccagtccctctgccccacatcctgggtcacagactgggatgagcaacgggctgaaggcacgtttcccgggaagatctgaactggctgcatctccctttcctctgtcctccatccttctcccaggatggtgaagggggacctggtacccagtgatcccc

SEQ ID NO: 121709 - DNA, 261 bp, Artificial Sequence
  derived and/or modified sequence
atggccgaggacatggagaccaagatcaagaactacaagaccgcccccttcgacagcagattccccaaccagaaccagaccagaaactgctggcagaactacctggacttccacagatgccagaaggccatgaccgccaagggcggcgacatcagcgtgtgcgagtggtaccagagagtgtaccagagcctgtgccccaccagctgggtgaccgactgggacgagcagagagccgagggcaccttccccggcaagatctag

SEQ ID NO: 121710 - DNA, 312 bp, Artificial Sequence
  derived and/or modified sequence
atgcacccccacccccagatccccggcagagacctggccggcttcagcaccatggccgaggacatggagaccaagatcaagaactacaagaccgcccccttcgacagcagattccccaaccagaaccagaccagaaactgctggcagaactacctggacttccacagatgccagaaggccatgaccgccaagggcggcgacatcagcgtgtgcgagtggtaccagagagtgtaccagagcctgtgccccaccagctgggtgaccgactgggacgagcagagagccgagggcaccttccccggcaagatctag

SEQ ID NO: 121711 - protein, 79 aa, Artificial Sequence
  derived and/or modified sequence
MQALRVSQALIRSFSSTARNRFQNRVREKQKLFQEDNDIPLYLKGGIVDNILYRVTMTLCLGGTVYSLYSLGWASFPRN

SEQ ID NO: 121712 - protein, 109 aa, Artificial Sequence
  derived and/or modified sequence
  misc_feature (1)..(1): Xaa can be any naturally occurring amino acid
XSFWVLSLPGPSRQPGHPQARLQGESPPNPAGSSRVSQALIRSFSSTARNRFQNRVREKQKLFQEDNDIPLYLKGGIVDNILYRVTMTLCLGGTVYSLYSLGWASFPRN

SEQ ID NO: 121713 - DNA, 240 bp, Artificial Sequence
  derived and/or modified sequence
atgcaggcactgcgtgtgtcacaggccctgattaggtcattctcgtccacagctaggaataggttccagaacagagtaagggagaagcagaaacttttccaggaggataatgatatcccactgtacctcaagggaggtatcgtggataacattctctacagggtcactatgaccctgtgtctgggaggcacagtgtactcgctctactccctcggctgggccagcttcccgaggaactag

SEQ ID NO: 121714 - DNA, 330 bp, Artificial Sequence
  derived and/or modified sequence
tagtccttttgggtgcttagcctgcctgggccttctaggcagccaggccatcctcaggctaggctgcagggcgagtctcctccgaatccggccggtagttctagagtgagccaggctctgattagatcattctcatcaacagctcgaaatcggttccagaatcgagtgagagagaaacagaaactctttcaagaagacaacgacatccctttgtatttaaagggcggcatcgtggataatatcttgtatcgggtcacaatgaccttgtgtcttggcggaacagtttacagcctctacagcctgggatgggcttctttcccgcgaaattag

SEQ ID NO: 121715 - DNA, 240 bp, Artificial Sequence
  derived and/or modified sequence
atgcaggccctgcgggtgtcccaggccctgatccgctccttcagcagcacagccaggaaccgcttccagaacagagtgcgggagaagcagaagctgttccaggaggacaatgacatccccctgtacctgaagggcggcatcgtggacaacatcctgtacagagtgaccatgaccctgtgcctgggcggcaccgtgtacagcctgtacagcctgggctgggccagcttccccaggaactag

SEQ ID NO: 121716 - DNA, 330 bp, Artificial Sequence
  derived and/or modified sequence
tgaagcttctgggtgctgagcctgcccggccccagccggcagcccggccacccccaggcccggctgcagggcgagagcccccccaacccagctggcagcagccgggtgtcccaggccctgatccgctccttcagcagcacagccaggaaccgcttccagaacagagtgcgggagaagcagaagctgttccaggaggacaatgacatccccctgtacctgaagggcggcatcgtggacaacatcctgtacagagtgaccatgaccctgtgcctgggcggcaccgtgtacagcctgtacagcctgggctgggccagcttccccaggaactag

SEQ ID NO: 121717 - DNA, 240 bp, Artificial Sequence
  derived and/or modified sequence
atgcaggccctgcgggtgagccaggccctgatccggagcttcagcagcactgcccggaatagattccagaatcgagttagagagaagcagaagctctttcaggaggataatgacatccccttatacctgaaagggggcattgtggacaatattctgtaccgagttacaatgacgttatgtttaggcggcacagtttattctttgtatagcctcgggtgggcctcttttcctagaaattag

SEQ ID NO: 121718 - DNA, 330 bp, Artificial Sequence
  derived and/or modified sequence
tgaagcttctgggtgctgagcctgcccggccccagccggcagcccggacacccacaagctcgtcttcagggcgaaagtcctcccaaccctgcgggttcatcgagagtgtcccaggccctcatacgcagcttcagctctaccgctcgcaatcgcttccagaacagggtccgcgagaagcagaaactgtttcaggaagacaatgacattccactctatctgaagggagggatagtagacaacatcttatatcgtgttacaatgacactttgcctcggagggacagtgtacagcctatactcccttgggtgggctagttttcctcggaactag

SEQ ID NO: 121719 - DNA, 240 bp, Artificial Sequence
  derived and/or modified sequence
atgcaagcgctgagggtgtcgcaggccctaatccggagtttctcgtccaccgcgcgaaaccgatttcagaatcgagtccgagaaaagcagaagctctttcaggaggataacgatatcccattgtacttgaaaggcggaatagttgataatattctgtacagagtgactatgacactctgcctgggtggaactgtctactccctgtacagtttagggtgggcttccttccccaggaattag

SEQ ID NO: 121720 - DNA, 330 bp, Artificial Sequence
  derived and/or modified sequence
tgatccttttgggttctgtctttgcccggtccaagcagacagcctggccacccgcaggcaaggttacagggcgagtcaccgcctaacccagcgggaagctcccgcgtgtcgcaggctctaatcaggtctttcagctcaacggccaggaatagattccagaatagggtgagagagaaacaaaagctcttccaggaagacaacgacatccctctttacctcaaaggtgggatagtggacaatattctgtaccgagtaaccatgacactgtgtttaggcggaactgtgtactcactctactccctcggctgggcttcttttcctcggaactag

SEQ ID NO: 121721 - DNA, 762 bp, Artificial Sequence
  derived and/or modified sequence
gttacagatacggaaacaggctcggaggtgcaatctctggctgtgtagacagaacagggagttggaacacggccttatgcgtttcctcactctcacataccagcgggcagggagagatccggggaggagttgcacttgcccccggcggaaatctccaaaaatctgcaaaaatgtattccctggtaccgctttgggctccggtgggaccaagcgaaattccgagaccgaaacggatgcgcgctgcggcccagggtgcgggtctggaccgcctcctccgtggtggacgaatccgaggagcaggactccccgcaacccagccccagccccagccccagccccgccgcgtccccagctgtcacgctgcgcgcagcgggtggggcctggggttcctggacagaggaggactacgcgtgtccttgggcggagaagggaggtgactccggcggaagaggacaaggcagaatgcaggcccttcgggtgtcccaggcgctgatccgctccttcagctccaccgcccggaaccgctttcagaaccgagtgcgcgagaaacagaagctcttccaggaggacaatgacatcccgttgtacctgaagggcggcatcgttgacaacatcctgtaccgagtgacaatgacgctgtgtctgggcggcactgtctacagcttgtactcccttggctgggcctccttccccaggaattaagaccaagaagcctggggggcctgagagacttgaacaagtgtcaataaacgctggcctctg

SEQ ID NO: 121722 - DNA, 389 bp, Artificial Sequence
  derived and/or modified sequence
agtccttctgggtcctctcccttccaggaccctctaggcagcccggtcacccccaggccagactccagggcgagtcccctcccaacccagctggcagttcgcgggtgtcccaggcgctgatccgctccttcagctccaccgcccggaaccgctttcagaaccgagtgcgcgagaaacagaagctcttccaggaggacaatgacatcccgttgtacctgaagggcggcatcgttgacaacatcctgtaccgagtgacaatgacgctgtgtctgggcggcactgtctacagcttgtactcccttggctgggcctccttccccaggaattaagaccaagaagcctggggggcctgagagacttgaacaagtgtcaataaacgctggcctctg

SEQ ID NO: 121723 - DNA, 240 bp, Artificial Sequence
  derived and/or modified sequence
atgcaggccctgagagtgagccaggccctgatcagaagcttcagcagcaccgccagaaacagattccagaacagagtgagagagaagcagaagctgttccaggaggacaacgacatccccctgtacctgaagggcggcatcgtggacaacatcctgtacagagtgaccatgaccctgtgcctgggcggcaccgtgtacagcctgtacagcctgggctgggccagcttccccagaaactag

SEQ ID NO: 121724 - DNA, 330 bp, Artificial Sequence
  derived and/or modified sequence
tgaagcttctgggtgctgagcctgcccggccccagcagacagcccggccacccccaggccagactgcagggcgagagcccccccaaccccgccggcagcagcagagtgagccaggccctgatcagaagcttcagcagcaccgccagaaacagattccagaacagagtgagagagaagcagaagctgttccaggaggacaacgacatccccctgtacctgaagggcggcatcgtggacaacatcctgtacagagtgaccatgaccctgtgcctgggcggcaccgtgtacagcctgtacagcctgggctgggccagcttccccagaaactag

SEQ ID NO: 121725 - protein, 80 aa, Artificial Sequence
  derived and/or modified sequence
MFPLVKSALNRLQVRSIQQTMARQSHQKRTPDFHDKYGNAVLASGATFCIVTWTYVATQVGIEWNLSPVGRVTPKEWRNQ

SEQ ID NO: 121726 - DNA, 243 bp, Artificial Sequence
  derived and/or modified sequence
atgttccccctggtgaagagcgccctgaacagactgcaggtgagaagcatccagcagaccatggccagacagagccaccagaagagaacccccgacttccacgacaagtacggcaacgccgtgctggccagcggcgccaccttctgcatcgtgacctggacctacgtggccacccaggtgggcatcgagtggaacctgagccccgtgggcagagtgacccccaaggagtggagaaaccagtag

SEQ ID NO: 121727 - DNA, 2471 bp, Artificial Sequence
  derived and/or modified sequence
tcattacggatcccggctgaaagccattttgtttttcagctcacttcaagggtacctgaagcgaattggcaccaaagcagcagctgtattgccgcagttctagcttcaccttcacgatgtttcccttggtcaaaagcgcactaaatcgtctccaagttcgaagcattcagcaaacaatggcaaggcagagccaccagaaacgtacacctgattttcatgacaaatacggtaatgctgtattagctagtggagccactttctgtattgttacatggacatatgtagcaacacaagtcggaatagaatggaacctgtcccctgttggcagagttaccccaaaggaatggaggaatcagtaatcatcccagctggtgtaataatgaattgtttaaaaaacagctcataattgatgccaaattaaagcactgtgtacccattaagatatggcattattgaagaaataaagtacatttgaaaccttcattgtaggttttgtttctttgtaaatgaaactaagcttgatcactttagcctttatgttaatattaaagtcaaatgctgtgcagcttcttaaataggtttttttttttttttttttttttttttgggacgaagtctcactttgtcccccaggctggagtgcagtggcaccatctcagctcactgcgacctctgcctcctgagttcaagtgattctcctgtctcagcctcccgagtagccagaactacaggcacatgccatgacgcccagctaattttttttttttttgagacggagtctcactctgttgcccaggctggaatgcaatggcgtgatctcggctcctgcaacctccgcctcccgggttcaagcgattctcctgtctcagccttccaagtagctgggattacaggtgcacgccaccaggcccggctaatttttgtatttttagtagagacggggtttcaccatgttggtcaggctggtctcgagctcctgatctcgtgatccacccaccttggtctcccaaagtgctgggattacaggtgtgagccaccgtgcccggcaatttttgtatttttagtagagacagggtttcaccatattggtcaggctggtttcaaactcacgacctcaggtgatccgcctgccttggcctcccaaagtggtaggattacaggcgtgagccacggcacccagcccttaaatggcttttatgaggtaatgtgaaaggaaaatttgcctttgacctggaagtcaactttatagtaagctgaaattataaataactgatcatggaactattgcagatcacctttgagccaaaaatttggcctggattttggttatgcctactactatgtgcctctcatttgtatttatacctggaattggcattattaactccttttcactcctgcctagaaaacttaaagtgtcaccagacccaagggcggagtggtcctataaaacaaactcgtagcctgtctgaagactagctactagctccttggctgttttggcatattcatcttgattatagctcttggtctttcatcatattagggatgtttatgatgttattaaagaaaatcttgtcaaatgcagtctgttcctagttatctactatcagtcacctgttgtataattataacaatgtttggatttgtggattattattttagtatataacattggattttatgtatgttacctgaagaagagcaatatctgtaccacatatttctttgtttttcttttttgagatgaagtctcactctgttgcccaggctggagtgcagtggtgtgatcttgacacactgcaacctttgcctcccggattcaagtgattctcctgtctcagcctccctagtaactggaattacaggcgcctgccaccatgcctggctaatttttgtatttttagtagagatggggtttcaccatgttggccaacctggtcttgaactcctgacctcaggcgatccacccacctcagcctcccaaagtgctaggcttacaggcatgagacaccgcgcccggcttatatatcattactttcttggctgagagctgtagtctgtggtagttgttttgttttgttttttgttttttttttgtagttttcttgatcgtgatcaattaagcagaaagtagaatttcagtcaggtaacctgtctatattagctaaattatcttttgcttattacatagagtgctagaagtatgctgtcatggcatatgtcctagtttctcatcaaatggaccaaagtcagtgattttatttgaagaggaaaaattgaacgtcattgtaaattaagttgcaagtttagtaaccatattgtaccactgtttgataaatttgaacgctttatggtatttcatatttagaatgttcaaaatagtactgaagtattcaaatacatacaaccctgagcgatattgaagtaaaataaacatgtatttaaggaagtgtcaaccttcaattata

SEQ ID NO: 121728 - DNA, 243 bp, Artificial Sequence
  derived and/or modified sequence
atgtttccccttgtcaaatctgcccttaatcgcctgcaggtaagaagcatccagcagacgatggccaggcaatctcaccagaagagaacccctgatttccatgataagtacgggaatgctgtgctcgcctcaggcgccaccttctgcattgtcacatggacctacgtggcgactcaggtggggattgaatggaaccttagccccgtgggaagggttacgcccaaagaatggcgcaatcaatag

SEQ ID NO: 121729 - DNA, 243 bp, Artificial Sequence
  derived and/or modified sequence
atgttccccctggtgaagagcgccctgaaccggctgcaggtgcgcagcatccagcagaccatggcccggcagagccaccagaagaggaccccagacttccatgacaagtatggaaatgctgtgctggccagcggggccaccttctgcatcgtgacctggacctacgtggccacccaggtgggcatcgagtggaacctgagccctgtgggccgggtgacccccaaggagtggaggaaccagtag

SEQ ID NO: 121730 - DNA, 243 bp, Artificial Sequence
  derived and/or modified sequence
atgttccccctggtgaagagcgccctgaaccggctgcaggtgcggagcattcagcagaccatggccagacagagtcaccaaaagcgtactcccgacttccacgataagtacggtaacgctgttctggctagtggggcaactttttgtattgtaacatggacttatgtggccactcaggtgggcatcgagtggaacttatcccccgtgggtcgggtgacccccaaagagtggcgcaatcaatag

SEQ ID NO: 121731 - DNA, 243 bp, Artificial Sequence
  derived and/or modified sequence
atgttcccactggtaaaatcagccctgaaccgtttgcaagtgaggtctatccagcagacgatggctcggcagtctcaccaaaagcggacgccagattttcacgacaaatatggaaacgctgtgctcgcatccggagcgactttctgcattgtgacatggacttacgttgctacacaggtgggaatcgaatggaacttgtcgcccgtcggaagggtgacgccgaaagaatggcgcaatcagtag

SEQ ID NO: 121732 - protein, 63 aa, Artificial Sequence
  derived and/or modified sequence
MLGQSIRRFTTSVVRRSHYEEGPGKNLPFSVENKWSLLAKMCLYFGSAFATPFLVVRHQLLKT

SEQ ID NO: 121733 - DNA, 192 bp, Artificial Sequence
  derived and/or modified sequence
atgctcggacagtccatcaggcgcttcaccacctccgtcgtgaggcggagccactacgaggaaggccctggcaagaatctgccgttctctgtcgaaaacaaatggtccctgctcgctaagatgtgtctctattttggatccgctttcgctaccccgtttttggtggtgcggcaccagctgctcaagacgtag

SEQ ID NO: 121734 - DNA, 192 bp, Artificial Sequence
  derived and/or modified sequence
atgctgggccagagcatccggcggttcaccacctccgtggtccgccgcagccactatgaggaaggacccggcaagaacctccccttttccgtagagaataagtggtcgctccttgccaagatgtgtctgtacttcggttccgccttcgcgacacctttcctggtcgtccgacaccagctgctcaaaacctag

SEQ ID NO: 121735 - DNA, 192 bp, Artificial Sequence
  derived and/or modified sequence
atgctgggccagagcatccgccgcttcaccacctctgtggtgagaagaagccactatgaggagggccctgggaagaacctgcccttctctgtggagaacaagtggagcctgctggccaagatgtgcctgtactttggaagtgcctttgccacccccttcctggtggtgcgccaccagctgctgaagacctag

SEQ ID NO: 121736 - DNA, 192 bp, Artificial Sequence
  derived and/or modified sequence
atgctgggccagagcatccggcggttcaccaccagcgtggtgcggcggtcacactatgaggagggaccggggaaaaatctgccctttagtgtagagaacaagtggagcctgttagccaaaatgtgtctttatttcggctcagcttttgctaccccgtttctcgtagtgaggcaccaactgctgaagacgtag

SEQ ID NO: 121737 - DNA, 192 bp, Artificial Sequence
  derived and/or modified sequence
atgctgggccagagcatccggcggttcaccaccagcgtggtgcggcgctctcattacgaggagggtcccggcaaaaacttgcctttctctgttgagaacaaatggagtctgctcgcgaaaatgtgcttgtatttcggaagtgcgttcgccacaccttttctggtcgtacgccaccagctgttaaaaacgtag

SEQ ID NO: 121738 - DNA, 192 bp, Artificial Sequence
  derived and/or modified sequence
atgttggggcagagcattcggaggttcaccacaagcgtcgtaaggaggtcccattatgaggaaggccctggaaagaatctaccattctccgttgagaacaagtggtccctcctcgctaagatgtgcttgtattttggctcagctttcgctacccccttcctggtggtgcgtcatcagctattgaagacctag

SEQ ID NO: 121739 - DNA, 192 bp, Artificial Sequence
  derived and/or modified sequence
atgttggggcagagcatccgaaggtttacgacaagtgtagtgcggaggagccattatgaggaaggaccaggcaaaaatctgcctttcagcgtggagaacaagtggtccctgctggctaagatgtgcctctatttcggatctgcattcgccacccccttcctggttgttaggcaccagcttctcaaaacctag

SEQ ID NO: 121740 - DNA, 666 bp, Artificial Sequence
  derived and/or modified sequence
cgcgtttcctcaaggctccgccccatttcccatctttcttttcagtccttgcgcaccggggaacaaggtcgtgaaaaaaaaggtcttggtgaggtgccgccatttcatctgtcctcattctctgcgcctttcgcagagcttccagcagcggtatgttgggccagagcatccggaggttcacaacctctgtggtccgtaggagccactatgaggagggccctgggaagaatttgccattttcagtggaaaacaagtggtcgttactagctaagatgtgtttgtactttggatctgcatttgctacacccttccttgtagtaagacaccaactgcttaaaacataaggatgtttcagttcctccatttaacagatatgaagagcattttaagaggtgcagcctctggaagtggatcaaactagaactcatatgccatactagatatgtttgtcaataaacttatgacgtgaatgcttaatgcctcttttttgaaatagggaatgtaataattggccatttgcctactttattatttgggtaacattccagtattactctctgtgatttagcttatttaatggtgttaaactgaggttatattaaatttttgattcccaggtcaggattttgttggtaatttatataataaaagggaaatacaaatcga

SEQ ID NO: 121741 - DNA, 1584 bp, Artificial Sequence
  derived and/or modified sequence
gcaccggggaacaaggtcgtgaaaaaaaaggtcttggtgaggtgccgccatttcatctgtcctcattctctgcgcctttcgcagagcttccagcagcggtatgttgggccagagcatccggaggttcacaacctctgtggtccgtaggagccactatgaggagggccctgggaagaatttgccattttcagtggaaaacaagtggtcgttactagctaagatgtgtttgtactttggatctgcatttgctacacccttccttgtagtaagacaccaactgcttaaaacataaggatgtttcagttcctccatttaacaggtagttagtggatttctaatcatgttaaagcaggcctttttattaagtagcctcttccccatcacccagaacacacacacaaatacattgttgtgtagggctgattcctgaggttatgtgtagatgtggcattggtggagactagttgtaaacctatataaaaatatttcaataatggccagtgtttattgaatactactgcttatcaggtacactttacatcgatatctcatgttctctagcaagcttgtgaggcggatgatagtaaccccatctgagacacagagatgttaagttgttcaacatctcataactagtataatggtggaccaggactcttgcccaggcagtttcttgttgcagaactcacacttttaaccaggtaaaactgataaactgattaatgttactctatcttgaacactgttactagaacagtagctgagaatgtgtcttttaaaacactataaacatttccatttcttttagaaagtggtcactgtgctcctagtttttaaattggcttacaatacttgtttaagttgtgaaaaatccctgaagataaaacccttctagtgctccttgatacataagtcccagataattatgcaattgtaaatctgtgcctcaccaactcagccatgttgggaaactcaaacttttaaatatactttcctcattaaggcagtggttcttaaatgaggatgattttacaacacaatggggcatttggcaatgtgagacatttttgatcgttccaacttgggggcaaaattaccagtggtgctgaggttgagaagccttgtgtcaaggggatatgttaatatatgctcaaaggagtcgttcatattggaaggttagcagatttgctgtgtgtggataaaatatttagcttaattgtcatcagagtttctcagagtaatactatagaacactaggatgattggaaagagtgtcatagtttagagggggaataacttatccaagctactaatgcggaaaggttgcggtgcatgtgatgaagcaaatcagtatgaatgaattcatgatactgtaaacgctttctgatgtactactcaaactgatagaaaatattttcatgaaactacatgatttctgttaaatgaatgggatttttaaaatgccattaatttctgtttttattttgcagatatgaagagcattttaagaggtgcagcctctggaagtggatcaaactagaactcatatgccatactagatatgtttgtcaataaacttatgac

SEQ ID NO: 121742 - DNA, 192 bp, Artificial Sequence
  derived and/or modified sequence
atgctgggccagagcatcagaagattcaccaccagcgtggtgagaagaagccactacgaggagggccccggcaagaacctgcccttcagcgtggagaacaagtggagcctgctggccaagatgtgcctgtacttcggcagcgccttcgccacccccttcctggtggtgagacaccagctgctgaagacctag

SEQ ID NO: 121743 - protein, 419 aa, Artificial Sequence
  derived and/or modified sequence
MRGLLVLSVLLGAVFGKEDFVGHQVLRISVADEAQVQKVKELEDLEHLQLDFWRGPAHPGSPIDVRVPFPSIQAVKIFLESHGISYETMIEDVQSLLDEEQEQMFAFRSRARSTDTFNYATYHTLEEIYDFLDLLVAENPHLVSKIQIGNTYEGRPIYVLKFSTGGSKRPAIWIDTGIHSREWVTQASGVWFAKKITQDYGQDAAFTAILDTLDIFLEIVTNPDGFAFTHSTNRMWRKTRSHTAGSLCIGVDPNRNWDAGFGLSGASSNPCSETYHGKFANSEVEVKSIVDFVKDHGNIKAFISIHSYSQLLMYPYGYKTEPVPDQDELDQLSKAAVTALASLYGTKFNYGSIIKAIYQASGSTIDWTYSQGIKYSFTFELRDTGRYGFLLPASQIIPTAKETWLALLTIMEHTLNHPY

SEQ ID NO: 121744 - DNA, 1260 bp, Artificial Sequence
  derived and/or modified sequence
atgagggggctgctcgtactctctgtcctgctgggcgcggttttcgggaaggaggactttgtgggtcaccaggtcctcaggatctctgttgcggatgaagctcaggtccaaaaagtgaaagaactagaggacctggaacacttacagctggacttctggcggggacctgcccaccccggatcccctatcgacgtcagagttcccttccctagcattcaagcggtgaagatttttttagaaagccacggcatttcttacgagaccatgattgaggatgtccaatcactgcttgatgaagagcaggagcagatgttcgctttccgaagtcgggcccggtccacagataccttcaattatgcaacctatcacacactcgaagagatatacgactttctggacctgctcgttgctgaaaatcctcacctggtgtctaagatccagatcgggaacacctatgagggtcggccaatctacgtgttgaagttctcaaccggtggcagcaaacgaccagcaatttggatcgacacaggaatccactcccgcgagtgggtgacccaggcaagcggcgtatggtttgccaagaaaattacgcaggactacgggcaagatgctgccttcaccgccattctggataccttggacatctttcttgagatcgtgaccaatccagacggttttgctttcacccattctactaaccgaatgtggcggaagacccgaagccatacagcggggtcactgtgcatcggggttgacccaaataggaattgggacgccggattcggactcagcggagcttcaagcaatccgtgttccgaaacttaccatggcaagttcgcgaacagcgaggttgaagtaaagagcatcgtggattttgtgaaagatcacggcaatataaaggcttttatctctattcattcttacagccagctcctcatgtatccttatggttataagactgagccagtccctgaccaagacgaactagatcagctgtcgaaggctgcagtgaccgcactcgcttctctgtacggcacaaaattcaactatggctcaattatcaaggccatctaccaggctagtggtagtactattgactggacgtatagtcaggggatcaagtactcattcacctttgaactcagggatacggggcggtatggctttctgttacctgcatcgcagatcatccccaccgccaaggagacctggttggccctcttgaccatcatggagcacaccctcaatcacccatattag

SEQ ID NO: 121745 - DNA, 1260 bp, Artificial Sequence
  derived and/or modified sequence
atgaggggcctgctggtgctgtctgtgctgctgggcgctgtgtttgggaaggaggactttgtgggccaccaggtgctgcgcatctctgtggctgatgaggcccaggtgcagaaggtgaaggagctggaggacctggagcacctgcagctggacttctggaggggccctgcccaccctggcagccccattgatgtgcgggtgcccttccccagcatccaggccgtgaagatcttcctggagagccacggcatctcctatgagaccatgattgaagatgtgcagagcctgctggatgaggagcaggagcagatgtttgccttccgcagccgggcccggagcacagacaccttcaactatgccacctaccacaccctggaggagatctatgacttcctggacctgctggtggccgagaacccccacctggtgtccaagatccagatcggcaacacctatgagggccggcccatctacgtgctgaagttcagcactggaggcagcaagaggcctgccatctggattgacaccggcatccacagccgggagtgggtgacccaggccagcggcgtgtggtttgccaagaagatcacccaggactatggccaggatgctgccttcaccgccatcctggacaccctggacatcttcctggagatcgtgaccaacccagatggctttgccttcacccacagcaccaacaggatgtggaggaagaccaggagccacacagctggcagcctgtgcattggagtggaccccaacagaaactgggatgctggcttcggcctgagcggggccagcagcaacccctgcagcgagacctaccacggcaagtttgccaacagcgaggtggaggtgaagagcatcgtggactttgtgaaggaccacggcaacatcaaggccttcatcagcatccacagctacagccagctgctgatgtacccctacggctacaagacagagcctgtgcctgaccaggatgagctggaccagctgagcaaggctgctgtgacagccctggccagcctgtatggcaccaagttcaactacggcagcatcatcaaggccatctaccaggccagcggcagcaccatcgactggacctacagccagggcatcaagtacagcttcacctttgagctgcgggacaccggccgctatggcttcctgctgcctgccagccagatcatccccacagccaaggagacctggctggccctgctgaccatcatggagcacaccctgaaccacccctactag

SEQ ID NO: 121746 - DNA, 1260 bp, Artificial Sequence
  derived and/or modified sequence
atgcggggcctgctggtgctgagcgtgctgctgggcgccgtgttcggcaaggaagacttcgtgggccatcaggttctgagaatttcggtggccgatgaggctcaggtccaaaaggtaaaagagcttgaggatctcgaacacttgcaactcgatttttggagaggccccgcacaccccgggtcacctatcgacgtgagagtcccatttcccagcattcaggcggtgaaaatcttcctcgaatctcatggaataagctacgaaaccatgattgaagatgtccaaagtttactggatgaggagcaggaacagatgttcgcctttcgctctcgagcccggagcaccgatacattcaactacgccacatatcacactctggaagagatttatgatttcctcgacttgctggtggcggaaaatcctcaccttgtctccaaaatacagataggcaacacctacgaaggacgccccatatacgtgctgaagttctcaaccggaggcagcaagagaccggctatttggatcgataccggaatccattcgagggagtgggtcactcaggcctctggcgtctggtttgccaaaaaaattacacaggactacgggcaggacgccgctttcacagccattctggataccctcgatatcttcctggaaattgtgacaaatccggatggctttgcattcacccacagcaccaataggatgtggcgaaaaacgaggagtcacaccgctggcagcctctgtattggcgtggaccctaatagaaattgggacgctgggttcgggctgtcgggtgcttcctctaacccctgctcagagacctaccatggaaaattcgccaacagcgaagtggaggtcaagtcaatcgtggattttgtcaaagatcacggcaacattaaagcgtttatatcaattcactcgtactcccagctcctcatgtacccatatggctataaaacagagcctgtgccagatcaagacgagctggaccagcttagtaaagccgccgttaccgcccttgccagcctgtacggcacaaagtttaactacgggtcaattataaaggccatctatcaagcatccggctcaaccatcgattggacttattctcaaggtatcaagtattcattcactttcgaattgcgtgacacaggacggtacggcttcctattgcccgccagccaaatcatacctaccgccaaggagacatggttagcactgcttactattatggagcataccctgaaccacccgtattag

SEQ ID NO: 121747 - DNA, 1260 bp, Artificial Sequence
  derived and/or modified sequence
atgagaggactgcttgtcctgtcagtgttgctaggcgcagtgtttggaaaagaagattttgtaggccatcaggtccttcgcatctccgtggcagacgaagcccaggtgcagaaagttaaggagctcgaggatcttgagcacttgcaattagatttctggcggggacccgctcatccgggaagccccatcgacgttcgggtcccatttccaagtattcaggcggtgaaaatctttctggaaagccacggaatctcctacgaaacgatgattgaggatgtccagtcgctgttggatgaagagcaagaacaaatgttcgccttcaggagccgagcacgctcaacagacacttttaactacgctacttatcataccctcgaagagatatacgatttcctagacctattagttgcggaaaatccccacttggtgtcaaaaattcagattggaaacacttacgaaggcagacccatttacgtccttaaattttcgactggaggctcgaaacggcctgcaatttggattgatacaggtatccactcgagggaatgggtgactcaggcttctggcgtgtggttcgccaagaaaatcacccaggactacgggcaggatgcagctttcacagccatactcgacactctggatatctttctggagatagttactaatcccgacgggtttgcattcactcattccaccaacaggatgtggagaaaaacaagatctcataccgcgggtagcttgtgtatcggcgtcgacccaaatcgaaactgggatgctggatttgggctgtcaggtgccagctctaatccttgctccgaaacttatcatggcaagtttgccaactcagaggttgaggtaaagagtatagtggacttcgtgaaggatcatggtaatattaaagcctttatctcgatccattcttactcccagctgcttatgtacccctacggctacaagaccgaacccgtgccggaccaagacgaactggatcagctttccaaggctgcagtgacagccctagcaagcttgtacggcaccaagtttaattatgggtccattattaaggctatttaccaggccagtggatccacaatcgactggacctatagtcagggcattaaatacagctttacattcgagctcagggatactgggaggtatgggttcctcctccccgcttcccagattatcccgacagcgaaagagacttggcttgctttacttaccattatggagcacacccttaatcacccatactag

SEQ ID NO: 121748 - DNA, 1260 bp, Artificial Sequence
  derived and/or modified sequence
atgcggggcctgcttgtcctgagcgtgctgctgggcgccgtttttggtaaagaggacttcgttgggcatcaggtgctgagaatctccgtggccgacgaagctcaggtgcaaaaggttaaagaactggaagatctggaacacttgcaactcgatttctggagaggaccggcccatccaggtagccctatcgacgtccgcgtgccttttccatctattcaggctgttaagattttccttgagtcacacggtatctcctacgagacgatgattgaggatgtgcaaagtctgctggacgaagaacaagagcagatgttcgcatttcgaagccgagccaggtcgacagatacgtttaactacgccacttatcacacactcgaagagatatacgattttctggacttattggtcgcggaaaatccgcacctggtgtccaagattcagataggtaatacctatgagggccgcccaatttatgtgctcaaattttcaacaggcgggtccaagcgcccagccatatggattgataccggaatccactctagagaatgggtgactcaagcttctggggtatggtttgcaaagaagattacccaggactatggccaggacgcggctttcacagctatcctcgacactctggatatattcttagaaatcgtgactaatcctgacggcttcgctttcacacacagcactaatcgaatgtggagaaaaacacgatcacacactgcaggctctctctgcattggcgtggaccctaaccgtaactgggacgctgggtttgggctctccggcgcatcgtcgaatccctgcagtgaaacttatcatgggaaattcgcaaattctgaagtggaagtgaagagtatcgttgacttcgtgaaagaccatgggaatatcaaagcctttatctccatccacagttatagccaactgctgatgtatccttacggctacaaaaccgaacctgtccccgaccaagatgaattggaccaactctctaaggccgcagtcaccgcacttgcatccctatacggcactaagttcaactacggctccattattaaggccatttatcaggcatcaggatcaactatcgattggacatactcccaaggtataaagtactccttcacctttgagttaagagacacaggaaggtacggctttctgctccccgcttcccaaataattcctacagcgaaggagacttggcttgcactgctgaccatcatggaacacacccttaatcacccctattag

SEQ ID NO: 121749 - DNA, 1260 bp, Artificial Sequence
  derived and/or modified sequence
atgagggggctgcttgtactgagtgtcttgctgggcgccgtgtttgggaaggaagactttgtcgggcaccaggtactgcgaatttccgtcgccgacgaagcacaggtgcaaaaagtcaaagaattagaagacttggaacatctgcaattagacttttggagaggccccgcccacccaggctctcccatagacgtccgggttccctttccatccattcaggctgttaaaatcttcctagagtcccacggcatttcatatgaaaccatgatcgaagatgtccagagtctgttggacgaggagcaggagcagatgtttgcctttaggagccgggcccgctctacagatacattcaattacgcaacttaccacacgttggaggagatctacgactttctggacctgctagttgccgaaaacccacacctggtcagcaaaattcagatcggcaacacctacgaaggccggccaatttacgtgctgaaattttccacaggcggttctaaacgaccagctatttggatcgataccggaattcattctcgcgagtgggtgactcaggcctcaggagtttggttcgctaagaaaatcacacaggactatggccaggacgcggctttcacagctatcctcgacactctggatatattcttagaaatcgtgactaatcctgacggcttcgctttcacacacagcactaatcgaatgtggagaaaaacacgatcacacactgcaggctctctctgcattggcgtggaccctaaccgtaactgggacgctgggtttgggctctccggcgcatcgtcgaatccctgcagtgaaacttatcatgggaaattcgcaaattctgaagtggaagtgaagagtatcgttgacttcgtgaaagaccatgggaatatcaaagcctttatctccatccacagttatagccaactgctgatgtatccttacggctacaaaaccgaacctgtccccgaccaagatgaattggaccaactctctaaggccgcagtcaccgcacttgcatccctatacggcactaagttcaactacggctccattattaaggccatttatcaggcatcaggatcaactatcgattggacatactcccaaggtataaagtactccttcacctttgagttaagagacacaggaaggtacggctttctgctccccgcttcccaaataattcctacagcgaaagaaacctggctagccctgctgacaattatggaacacaccctaaaccatccctattag

SEQ ID NO: 121750 - DNA, 1487 bp, Artificial Sequence
  derived and/or modified sequence
agaactcccaccccagcctccccgtgggacaggacccaggtgctgggggagaacagacctcgggagcagccaggagtcctcggtcctgggagggtttaaaagccagggggccgtctcgacctcagtctgaccttccctcccggcagcagcatgcgggggttgctggtgttgagtgtcctgttgggggctgtctttggcaaggaggactttgtggggcatcaggtgctccgaatctctgtagccgatgaggcccaggtacagaaggtgaaggagctggaggacctggagcacctgcagctggacttctggcgggggcctgcccaccctggctcccccatcgacgtccgagtgcccttccccagcatccaggcggtcaagatctttctggagtcccacggcatcagctatgagaccatgatcgaggacgtgcagtcgctgctggacgaggagcaggagcagatgttcgccttccggtcccgggcgcgctccaccgacacttttaactacgccacctaccacaccctggaggagatctatgacttcctggacctgctggtggcggagaacccgcaccttgtcagcaagatccagattggcaacacctatgaagggcgtcccatttacgtgctgaagttcagcacggggggcagtaagcgtccagccatctggatcgacacgggcatccattcccgggagtgggtcacccaggccagtggggtctggtttgcaaagaagatcactcaagactacgggcaggatgcagctttcaccgccattctcgacaccttggacatcttcctggagatcgtcaccaaccctgatggctttgccttcacgcacagcacgaatcgcatgtggcgcaagactcggtcccacacagcaggctccctctgtattggcgtggaccccaacaggaactgggacgctggctttgggttgtccggagccagcagtaacccctgctcggagacttaccacggcaagtttgccaattccgaagtggaggtcaagtccattgtagactttgtgaaggaccatgggaacatcaaggccttcatctccatccacagctactcccagctcctcatgtatccctatggctacaaaacagaaccagtccctgaccaggatgagctggatcagctttccaaggctgctgtgacagccctggcctctctctacgggaccaagttcaactatggcagcatcatcaaggcaatttatcaagccagtggaagcactattgactggacctacagccagggcatcaagtactccttcaccttcgagctccgggacactgggcgctatggcttcctgctgccagcctcccagatcatccccacagccaaggagacgtggctggcgcttctgaccatcatggagcacaccctgaatcacccctactgagctgaccctttgacacccttcttgtcctcctctctggccccatccaggcaaccaaataaagtttgagtgtaccagga

SEQ ID NO: 121751 - DNA, 1260 bp, Artificial Sequence
  derived and/or modified sequence
atgagaggcctgctggtgctgagcgtgctgctgggcgccgtgttcggcaaggaggacttcgtgggccaccaggtgctgagaatcagcgtggccgacgaggcccaggtgcagaaggtgaaggagctggaggacctggagcacctgcagctggacttctggagaggccccgcccaccccggcagccccatcgacgtgagagtgcccttccccagcatccaggccgtgaagatcttcctggagagccacggcatcagctacgagaccatgatcgaggacgtgcagagcctgctggacgaggagcaggagcagatgttcgccttcagaagcagagccagaagcaccgacaccttcaactacgccacctaccacaccctggaggagatctacgacttcctggacctgctggtggccgagaacccccacctggtgagcaagatccagatcggcaacacctacgagggcagacccatctacgtgctgaagttcagcaccggcggcagcaagagacccgccatctggatcgacaccggcatccacagcagagagtgggtgacccaggccagcggcgtgtggttcgccaagaagatcacccaggactacggccaggacgccgccttcaccgccatcctggacaccctggacatcttcctggagatcgtgaccaaccccgacggcttcgccttcacccacagcaccaacagaatgtggagaaagaccagaagccacaccgccggcagcctgtgcatcggcgtggaccccaacagaaactgggacgccggcttcggcctgagcggcgccagcagcaacccctgcagcgagacctaccacggcaagttcgccaacagcgaggtggaggtgaagagcatcgtggacttcgtgaaggaccacggcaacatcaaggccttcatcagcatccacagctacagccagctgctgatgtacccctacggctacaagaccgagcccgtgcccgaccaggacgagctggaccagctgagcaaggccgccgtgaccgccctggccagcctgtacggcaccaagttcaactacggcagcatcatcaaggccatctaccaggccagcggcagcaccatcgactggacctacagccagggcatcaagtacagcttcaccttcgagctgagagacaccggcagatacggcttcctgctgcccgccagccagatcatccccaccgccaaggagacctggctggccctgctgaccatcatggagcacaccctgaaccacccctactag

SEQ ID NO: 121752 - protein, 419 aa, Artificial Sequence
  derived and/or modified sequence
MAMRLILFFGALFGHIYCLETFVGDQVLEIVPSNEEQIKNLLQLEAQEHLQLDFWKSPTTPGETAHVRVPFVNVQAVKVFLESQGIAYSIMIEDVQVLLDKENEEMLFNRRRERSGNFNFGAYHTLEEISQEMDNLVAEHPGLVSKVNIGSSFENRPMNVLKFSTGGDKPAIWLDAGIHAREWVTQATALWTANKIVSDYGKDPSITSILDALDIFLLPVTNPDGYVFSQTKNRMWRKTRSKVSGSLCVGVDPNRNWDAGFGGPGASSNPCSDSYHGPSANSEVEVKSIVDFIKSHGKVKAFITLHSYSQLLMFPYGYKCTKLDDFDELSEVAQKAAQSLRSLHGTKYKVGPICSVIYQASGGSIDWSYDYGIKYSFAFELRDTGRYGFLLPARQILPTAEETWLGLKAIMEHVRDHPY

SEQ ID NO: 121753 - DNA, 1260 bp, Artificial Sequence
  derived and/or modified sequence
atggctatgaggctgattctattctttggcgcactgttcggccatatttattgtttggaaaccttcgtgggcgaccaagtgctggagatcgtaccctctaacgaagagcagattaagaacttactccagctcgaagcccaggaacaccttcagcttgacttctggaagagccctaccacaccaggagaaactgcacatgtacgcgtgccatttgtcaacgtacaggccgtgaaagtgtttctggagtcacaggggattgcctacagcatcatgattgaagatgtccaggttctcttggacaaggagaatgaagagatgctgtttaatcgccgtagggagcggagcggtaatttcaattttggtgcataccacacattggaggagatctctcaggagatggacaatctcgtggcggagcaccctgggctcgtgagcaaggtgaacatcgggagctcattcgaaaaccggcccatgaacgttctaaagtttagcacgggcggggataaaccggccatctggttagacgccggaatacatgcacgggaatgggtgacccaggctaccgccttgtggacagccaataaaattgtatcagattacggcaaggacccaagcataaccagcatcttggatgcacttgatatatttctcctgcctgtgaccaatccagacggctatgtttttagtcagacaaaaaatcgaatgtggcggaagacgcgcagcaaggtatctggctctctgtgcgtaggtgttgaccccaacagaaactgggatgcagggtttggcggccccggagcatcctctaatccatgtagcgacagctaccatgggccttcagccaactctgaagtggaagtcaaatctatagtcgacttcatcaaatctcatggtaaggtgaaggcttttatcactttacacagttattcccagctcctcatgttcccatatggttataaatgtaccaaactggatgattttgacgagctgtccgaagtggcccagaaggcagcacagagcctgcgttcgcttcacggcactaagtataaagtgggacctatctgtagcgtcatttatcaggcctccgggggctctatagattggagttacgactatggcattaagtatagcttcgccttcgagctgcgagacacaggacgatacggtttccttctccctgctcgccagattctgcccaccgctgaggagacctggctggggctgaaggctattatggaacatgtcagagaccacccttactag

SEQ ID NO: 121754 - DNA, 1260 bp, Artificial Sequence
  derived and/or modified sequence
atggccatgaggctcatcctcttctttggagccctgtttggccacatctactgcctggagacctttgtgggggaccaggtgctggagatcgtgcccagcaatgaggagcagatcaagaacctgctgcagctggaggcccaggagcacctgcagctggacttctggaagagccccaccaccccaggagaaacagcccacgtgcgggtgccctttgtgaatgtgcaggccgtgaaggtgttcctggagagccagggcatcgcctacagcatcatgattgaagatgtgcaggtgctgctggacaaggaaaatgaggagatgctgttcaacagaagaagagagaggagcggcaacttcaactttggagcctaccacaccctggaggagatcagccaggagatggacaacctggtggccgagcaccctggcctggtgtccaaggtgaacatcggcagcagctttgagaaccggcccatgaatgtgctgaagttcagcactggaggagacaagccagccatctggctggatgctggcatccacgcccgggagtgggtgacccaggccacagccctgtggacagccaacaagatcgtgtctgactatggcaaggaccccagcatcaccagcatcctggatgccctggacatcttcctgctgcctgtgaccaacccagatggctacgtgttcagccagaccaagaacaggatgtggaggaagaccaggagcaaggtgtctggcagcctgtgtgtgggcgtggaccccaacagaaactgggatgctggctttggaggccctggggccagcagcaacccctgcagcgacagctaccacggccccagcgccaacagcgaggtggaggtgaagagcatcgtggacttcatcaagagccacggcaaggtgaaggccttcatcaccctgcacagctacagccagctgctgatgttcccctacggctacaagtgcaccaagctggatgactttgatgagctgtctgaggtggcccagaaggccgcccagagcctgcggagcctgcacggcaccaagtacaaggtgggccccatctgcagcgtcatctaccaggccagcggcggcagcattgactggagctatgactatggcatcaagtacagctttgcctttgagctgcgggacaccggccgctatggcttcctgctgcctgcccggcagatcctgcccacagctgaggagacctggctgggcctgaaggccatcatggagcacgtgcgggaccacccctactag

SEQ ID NO: 121755 - DNA, 1260 bp, Artificial Sequence
  derived and/or modified sequence
atggccatgcggctgatcctgttcttcggcgccctgttcggccacatatactgtctcgagacgttcgtgggcgatcaggtactcgaaatagtcccttctaatgaggaacagatcaagaatctgctgcaattagaagctcaggaacatctgcagctggatttttggaagtcccccacaactcccggggagacagcgcacgtgcgtgttccattcgtcaacgtgcaggccgtgaaggtgtttctggagagtcaaggaatagcctacagcatcatgatcgaggacgtgcaggtcctgctggacaaggagaacgaagagatgctgttcaacaggcgccgcgaaagatcaggaaacttcaattttggcgcctaccatactcttgaagagatcagtcaagaaatggataatctagttgcagaacaccctggtctcgtgtctaaggtgaacattggctcttcctttgagaatcgtcctatgaacgtcctcaaattctccaccggaggggacaagcccgccatctggctggatgccggtatccatgcacgagagtgggtgacacaagctaccgcgttgtggactgcaaataagatcgtgagcgattatggcaaggacccctctattaccagcattctggacgctctggacattttcctgctgccagtcactaatcccgatgggtacgtgttttcacagaccaaaaaccggatgtggagaaaaacccgctctaaagtttcaggctcattatgcgttggtgttgatcccaacagaaactgggatgctgggtttggcggccccggcgctagcagcaacccatgcagcgactcttaccacggcccttccgccaacagtgaggtggaggtcaagtcaattgttgactttattaagtcgcacggcaaggtaaaggcctttataacattgcactcttactcgcaactgctgatgttcccctatggctacaagtgcactaagcttgacgatttcgacgagctgtctgaggttgcccagaaggccgctcagagtctgaggagcctgcacggaacaaagtacaaggtcggacccatttgctctgtcatatatcaggcttcagggggtagcatagactggtcatacgattatggcatcaagtacagttttgccttcgaattgcgcgatacggggaggtacggtttcctgctccctgccaggcagattttacctaccgcagaggagacctggctgggcctgaaggcgatcatggaacacgtaagggaccatccttattag

SEQ ID NO: 121756 - DNA, 1260 bp, Artificial Sequence
  derived and/or modified sequence
atggctatgcgactgatccttttcttcggggctctgttcggtcacatctactgcctggaaaccttcgtcggcgatcaggttctggagattgtgccgagcaatgaggaacaaatcaaaaacctgctgcagctcgaggcgcaggaacatctccagctcgatttctggaaaagccccacaaccccaggagaaacggcccatgtgagggtaccgtttgtcaacgtgcaagccgtgaaggttttcctggagtcccagggaattgcgtacagtatcatgatcgaagatgtgcaggttctgctggataaggaaaacgaggagatgctcttcaataggagacgcgagaggtcaggtaatttcaacttcggagcctatcatacgctggaggaaatatctcaggagatggataacctggtggcggagcaccctggcctggtgtctaaggtgaatataggtagtagcttcgaaaaccgcccaatgaacgttctgaaattcagtactgggggagataagccagccatatggctggacgcgggtatacacgccagagaatgggttacacaagcaactgcactgtggaccgctaacaagatagtgtcagactatggtaaggaccccagtataaccagcatcctcgacgctttggatatttttctgctccccgtgaccaatcccgacgggtatgtcttctcgcagaccaaaaacaggatgtggaggaaaacgagatctaaggtttcaggctccctttgcgtgggagtagacccaaaccgtaattgggatgcagggtttggtggacccggtgccagctcaaatccttgctctgactcttaccacgggccatctgccaacagtgaagttgaagtgaaaagcatagtcgatttcattaagtcacacgggaaggtgaaagcctttattacccttcactcctactctcagcttctcatgtttccctacggttacaagtgcaccaagctggacgatttcgatgaactctctgaggtcgcccagaaggccgcacagtcgcttagatcgctacacggaacaaaatataaggtcggcccaatatgctccgtgatctatcaggccagcggtggtagcattgactggtcctatgattatggaattaagtactcttttgcttttgagttgagggacacaggtagatacggcttcctacttccagcacgccagattctgccgacagctgaagagacttggctaggactgaaggctattatggaacacgtgagggaccacccttattag

SEQ ID NO: 121757 - DNA, 1366 bp, Artificial Sequence
  derived and/or modified sequence
atccctacaaataaagttcaggaaggactctgaattctggactccaggaaaacccatggccatgaggttgatcctgttttttggtgccctttttgggcatatctactgtctagaaacatttgtgggagaccaagttcttgagattgtaccaagcaatgaagaacaaattaaaaatctgctacaattggaggctcaagaacatctccagcttgatttttggaaatcacccaccaccccaggggagacagcccacgtccgagttcccttcgtcaacgtccaggcagtcaaagtgttcttggagtcccagggaattgcctattccatcatgattgaagacgtgcaggtcctgttggacaaagagaatgaagaaatgctttttaataggagaagagaacggagtggtaacttcaattttggggcctaccataccctggaagagatttcccaagaaatggataacctcgtggctgagcaccctggtctagtgagcaaagtgaatattggctcttcttttgagaaccggcctatgaacgtgctcaagttcagcaccggaggagacaagccagctatctggctggatgctgggatccatgctcgagagtgggttacacaagctacggcactttggacagcaaataagattgtttctgattatggaaaggacccatccatcacttccattctggatgccctggatatcttcctcctgccagtcacaaaccctgatggatacgtgttctctcaaaccaaaaatcgtatgtggcggaagacccggtccaaggtatctggaagcctctgtgttggtgtggatcctaaccggaactgggatgcaggttttggaggacctggagccagcagcaacccttgctctgattcataccacggacccagtgccaactctgaagttgaagtgaaatccatagtggacttcatcaagagtcatggaaaagtcaaggccttcattaccctccacagctattcccagctgctgatgttcccctatgggtacaaatgtaccaagttagatgactttgatgagctgagtgaagtggcccaaaaggctgcccaatctctgagaagcctgcatggcaccaagtacaaagtgggaccaatctgctctgtcatctaccaagccagtggaggaagcattgactggtcctatgattatggcatcaagtactcatttgcctttgaactgagagacacagggcgctacggcttcctcttgccagcccgtcagatcctgcccacagccgaggagacctggcttggcttgaaggcaatcatggagcatgtgcgagaccacccctattagggccctggggaagaaacaagagccattaaaatctctttggtttgaagcaaa

SEQ ID NO: 121758 - DNA, 1260 bp, Artificial Sequence
  derived and/or modified sequence
atggccatgagactgatcctgttcttcggcgccctgttcggccacatctactgcctggagaccttcgtgggcgaccaggtgctggagatcgtgcccagcaacgaggagcagatcaagaacctgctgcagctggaggcccaggagcacctgcagctggacttctggaagagccccaccacccccggcgagaccgcccacgtgagagtgcccttcgtgaacgtgcaggccgtgaaggtgttcctggagagccagggcatcgcctacagcatcatgatcgaggacgtgcaggtgctgctggacaaggagaacgaggagatgctgttcaacagaagaagagagagaagcggcaacttcaacttcggcgcctaccacaccctggaggagatcagccaggagatggacaacctggtggccgagcaccccggcctggtgagcaaggtgaacatcggcagcagcttcgagaacagacccatgaacgtgctgaagttcagcaccggcggcgacaagcccgccatctggctggacgccggcatccacgccagagagtgggtgacccaggccaccgccctgtggaccgccaacaagatcgtgagcgactacggcaaggaccccagcatcaccagcatcctggacgccctggacatcttcctgctgcccgtgaccaaccccgacggctacgtgttcagccagaccaagaacagaatgtggagaaagaccagaagcaaggtgagcggcagcctgtgcgtgggcgtggaccccaacagaaactgggacgccggcttcggcggccccggcgccagcagcaacccctgcagcgacagctaccacggccccagcgccaacagcgaggtggaggtgaagagcatcgtggacttcatcaagagccacggcaaggtgaaggccttcatcaccctgcacagctacagccagctgctgatgttcccctacggctacaagtgcaccaagctggacgacttcgacgagctgagcgaggtggcccagaaggccgcccagagcctgagaagcctgcacggcaccaagtacaaggtgggccccatctgcagcgtgatctaccaggccagcggcggcagcatcgactggagctacgactacggcatcaagtacagcttcgccttcgagctgagagacaccggcagatacggcttcctgctgcccgccagacagatcctgcccaccgccgaggagacctggctgggcctgaaggccatcatggagcacgtgagagaccacccctactag

SEQ ID NO: 121759 - protein, 417 aa, Artificial Sequence
  derived and/or modified sequence
MRLILPVGLIATTLAIAPVRFDREKVFRVKPQDEKQADIIKDLAKTNELDFWYPGATHHVAANMMVDFRVSEKESQAIQSALDQNKMHYEILIHDLQEEIEKQFDVKEDIPGRHSYAKYNNWEKIVAWTEKMMDKYPEMVSRIKIGSTVEDNPLYVLKIGEKNERRKAIFTDCGIHAREWVSPAFCQWFVYQATKTYGRNKIMTKLLDRMNFYILPVFNVDGYIWSWTKNRMWRKNRSKNQNSKCIGTDLNRNFNASWNSIPNTNDPCADNYRGSAPESEKETKAVTNFIRSHLNEIKVYITFHSYSQMLLFPYGYTSKLPPNHEDLAKVAKIGTDVLSTRYETRYIYGPIESTIYPISGSSLDWAYDLGIKHTFAFELRDKGKFGFLLPESRIKPTCRETMLAVKFIAKYILKHTS

SEQ ID NO: 121760 - DNA, 1254 bp, Artificial Sequence
  derived and/or modified sequence
atgcgccttatcctgcccgtaggccttatagccacaactctggcaattgcccccgtgcggtttgatagagaaaaggtgtttagggtgaagccacaagacgaaaagcaggcagacatcattaaggacctcgccaaaacgaacgagctggacttctggtaccctggtgccacacatcacgtggccgctaatatgatggttgacttccgagtgagcgaaaaagagtcacaggccatccagtctgccctggatcagaacaaaatgcattatgagatactcattcacgatctgcaggaagagattgagaagcagtttgacgtcaaggaagatattcctggtcgccactcatacgcaaagtataataattgggagaaaatcgtcgcgtggactgagaagatgatggataaataccccgagatggtgtctcggatcaagatcgggtctacagtcgaagataacccactctacgtgttaaaaatcggcgaaaaaaatgagcgccgcaaggcaatcttcaccgattgtgggattcatgctcgtgaatgggtaagccccgccttttgccagtggttcgtgtatcaagctacaaaaacatatggccggaacaagatcatgaccaagttgctggataggatgaacttttacatccttcctgtatttaacgtggatggttatatttggtcctggactaaaaatcgcatgtggaggaaaaaccgatccaaaaatcagaattccaaatgcatagggacagacctcaatcgcaactttaatgcctcttggaatagcattcccaacactaatgatccgtgtgctgacaactacagaggctctgcgccggagagtgaaaaggaaaccaaggccgtgactaacttcatcaggtctcacctgaatgagatcaaagtgtatattacattccacagctactcgcaaatgctgctcttcccgtacggatatactagcaagctgccacccaatcacgaagatcttgcaaaagtggctaaaatcgggacggatgtactgtcgacccggtacgagacaagatacatatatggtcctatcgagtcaacaatctatcccattagcgggagcagtctcgactgggcttacgatctcgggatcaagcatactttcgcttttgaactgagagacaagggcaaattcggcttcctgcttcccgagagcagaatcaagcctacatgtcgcgaaacgatgcttgctgtgaagttcattgccaagtacatactgaagcacacctcatag

SEQ ID NO: 121761 - DNA, 1254 bp, Artificial Sequence
  derived and/or modified sequence
atgaggctcatcctgcctgtgggcctcatcgccaccaccctggccatcgcccctgtgcgctttgaccgggagaaggtgttccgggtgaagccccaggatgagaagcaggccgacatcatcaaggacctggccaagaccaatgagctggacttctggtacccaggggccacccaccacgtggccgccaacatgatggtggacttccgggtgtctgagaaggagagccaggccatccagagcgccctggaccagaacaagatgcactatgagatcctgattcatgacctgcaggaggagattgagaagcagtttgatgtgaaggaggacatccctggccgccacagctatgccaagtacaacaactgggagaagatcgtggcctggacagagaagatgatggacaagtacccagagatggtgagccgcatcaagattggcagcacagtggaggacaaccccctgtatgtgctgaagattggagagaagaatgaaagaaggaaggccatcttcacagactgtggcatccacgcccgggagtgggtgtccccagccttctgccagtggtttgtgtaccaggccaccaagacctatggaagaaacaagatcatgaccaagctgctggacaggatgaacttctacatcctgcccgtcttcaacgtggatggctacatctggagctggaccaagaacaggatgtggaggaagaacagaagcaagaaccagaacagcaagtgcatcggcacagacctgaacagaaacttcaatgcctcctggaacagcatccccaacaccaatgacccctgtgccgacaactaccggggcagcgcccctgagagcgagaaggagaccaaggctgtgaccaacttcatccgcagccacctgaatgagatcaaggtgtacatcaccttccacagctacagccagatgctgctcttcccctacggctacaccagcaagctgccccccaaccacgaggacctggccaaggtggccaagattggaacagatgtgctgagcaccaggtatgagacccgctacatctacggccccatcgagagcaccatctaccccatcagcggcagcagcctggactgggcctatgacctgggcatcaagcacacctttgcctttgagctgcgggacaagggcaagtttggcttcctgctgcctgagagccgcatcaagcccacctgccgggagaccatgctggccgtgaagttcatcgccaagtacatcctgaagcacaccagctag

SEQ ID NO: 121762 - DNA, 1254 bp, Artificial Sequence
  derived and/or modified sequence
atgcggctgatcctgcccgtgggcctgatcgccaccaccctggccattgcccccgtgcgctttgacagagaaaaggtctttagggtgaagccgcaggatgagaagcaggcagacataataaaagatctggcaaagactaacgagcttgacttttggtaccctggcgcaacccatcacgtggcggcaaatatgatggtggattttcgcgtgtctgaaaaggagagccaagccatccagagtgctttggatcaaaacaagatgcactacgagatcttgatccatgatctgcaggaagagatagagaagcagtttgacgtaaaagaggacatcccaggacgccattcttacgctaagtataacaattgggagaagatagtggcatggactgaaaaaatgatggacaaatacccagaaatggtcagccgaatcaagatcggctctacagttgaagataacccgctctatgttctgaagattggcgagaagaacgagaggcgaaaggctatcttcaccgactgcggaatccatgcccgggaatgggtgtcccctgccttttgtcagtggttcgtataccaagccaccaaaacttacggccggaataagatcatgaccaagttgttggacagaatgaacttctacatcctcccagtgtttaacgtggatggatatatctggagttggacgaagaaccgcatgtggcggaaaaataggtccaagaaccagaattcgaaatgcatcggcaccgaccttaatagaaacttcaatgcttcatggaactcgatccctaacactaacgatccctgtgctgacaattatcgagggtctgctccagagtccgagaaggagacaaaggcagtgacaaacttcatccgatctcacttaaatgagatcaaagtgtatattacatttcactcatattcacagatgcttttgtttccatatggctacacaagcaagcttccacccaaccatgaagaccttgctaaagttgcgaagatcggcacagacgtcttatcaacacgctacgagactcgctacatttacggtccaattgagtctacaatctatcctatttcaggatcctcgttagactgggcctatgacttaggaatcaagcacacgttcgcttttgaactgagagacaaagggaaattcggatttctactaccagaatcccgaatcaaaccaacttgcagggaaaccatgctcgcggtcaagtttatcgctaagtacatactgaagcacacatcctag

SEQ ID NO: 121763 - DNA, 1254 bp, Artificial Sequence
  derived and/or modified sequence
atgaggcttattctgccagtaggccttatcgctaccacactagccatcgcgcctgttcggtttgacagggagaaagtgttcagggttaagcctcaggatgaaaagcaggcagatatcattaaggacctggcgaaaactaacgaacttgatttttggtaccctggggctacccatcacgttgccgcaaacatgatggtggactttcgagtgtctgaaaaagaatctcaagccattcagtcagctttggatcagaacaagatgcattacgagattctgatccatgatctgcaggaagaaatagaaaaacagttcgacgtcaaggaggacattcccggacggcacagttacgccaagtataacaattgggaaaagatcgtggcctggactgagaagatgatggataaatatcctgagatggtctccagaattaagataggctctacagtggaggacaaccccctgtatgtacttaagataggagagaagaatgagcgtcggaaagcgatcttcacagattgcggcatccacgcgagagagtgggtgtcccccgcattctgtcagtggttcgtgtatcaggctacaaaaacctacgggaggaacaagatcatgaccaaattactggaccgaatgaatttctatattctcccagtgttcaacgtggacggatacatctggagctggacgaagaacaggatgtggaggaagaatagaagcaagaatcaaaattccaagtgtatcggaactgacctgaataggaactttaacgcatcctggaatagcatccctaacactaatgacccatgcgccgacaactatcgaggatccgcgccagagtctgagaaagaaaccaaggcggtgacaaactttatcaggagccatctcaacgagatcaaggtctacatcacattccactcctatagccagatgttgttgttcccttacggctacacttcaaaactgcccccaaaccacgaggacctggccaaagtcgccaagatcggaactgacgtcctgagcacccgatacgaaactaggtacatctatgggccaattgaatcaacaatttaccctatttccgggagttctctggattgggcttacgacttgggcatcaaacacacgtttgctttcgaattgagggacaagggcaagttcggttttctgttgcctgaaagtaggataaaacctacatgtcgggaaacgatgctggctgttaaattcattgccaagtatatactcaagcacacgtcatag

SEQ ID NO: 121764 - DNA, 1795 bp, Artificial Sequence
  derived and/or modified sequence
agggctgaggcataaaactgccagagggtctcaaggcaggcaaagaagaaccatgaggctcatcctgcctgtgggtttgattgctaccactcttgcaattgctcctgtccgctttgacagggagaaggtgttccgcgtgaagccccaggatgaaaaacaagcagacatcataaaggacttggccaaaaccaatgagcttgacttctggtatccaggtgccacccaccacgtagctgctaatatgatggtggatttccgagttagtgagaaggaatcccaagccatccagtctgccttggatcaaaataaaatgcactatgaaatcttgattcatgatctacaagaagagattgagaaacagtttgatgttaaagaagatatcccaggcaggcacagctacgcaaaatacaataattgggaaaagattgtggcttggactgaaaagatgatggataagtatcctgaaatggtctctcgtattaaaattggatctactgttgaagataatccactatatgttctgaagattggggaaaagaatgaaagaagaaaggctatttttacggattgtggcattcacgcacgagaatgggtctccccagcattctgccagtggtttgtctatcaggcaaccaaaacttatgggagaaacaaaattatgaccaaactcttggaccgaatgaatttttacattcttcctgtgttcaatgttgatggatatatttggtcatggacaaagaaccgcatgtggagaaaaaatcgttccaagaaccaaaactccaaatgcatcggcactgacctcaacaggaattttaatgcttcatggaactccattcctaacaccaatgacccatgtgcagataactatcggggctctgcaccagagtccgagaaagagacgaaagctgtcactaatttcattagaagccacctgaatgaaatcaaggtttacatcaccttccattcctactcccagatgctattgtttccctatggatatacatcaaaactgccacctaaccatgaggacttggccaaagttgcaaagattggcactgatgttctatcaactcgatatgaaacccgctacatctatggcccaatagaatcaacaatttacccgatatcaggttcttctttagactgggcttatgacctgggcatcaaacacacatttgcctttgagctccgagataaaggcaaatttggttttctccttccagaatcccggataaagccaacgtgcagagagaccatgctagctgtcaaatttattgccaagtatatcctcaagcatacttcctaaagaactgccctctgtttggaataagccaattaatccttttttgtgcctttcatcagaaagtcaatcttcagttatccccaaatgcagcttctatttcacctgaatccttctcttgctcatttaagtcccatgttactgctgtttgcttttacttactttcagtagcaccataacgaagtagctttaagtgaaaccttttaactacctttctttgctccaagtgaagtttggacccagcagaaagcattattttgaaaggtgatatacagtggggcacagaaaacaaatgaaaaccttcagtttctcacagattttcaccatgtggcttcatcaatttatgtgctaatacaataaaataaaatgcacttaatgctttaaaattcatctttttatgataaactatattctctgtatttctctatagcattaataatcaatattaatgccattcattcagtctgttaataagaaataatatcttcaattttc

SEQ ID NO: 121765 - DNA, 1254 bp, Artificial Sequence
  derived and/or modified sequence
atgagactgatcctgcccgtgggcctgatcgccaccaccctggccatcgcccccgtgagattcgacagagagaaggtgttcagagtgaagccccaggacgagaagcaggccgacatcatcaaggacctggccaagaccaacgagctggacttctggtaccccggcgccacccaccacgtggccgccaacatgatggtggacttcagagtgagcgagaaggagagccaggccatccagagcgccctggaccagaacaagatgcactacgagatcctgatccacgacctgcaggaggagatcgagaagcagttcgacgtgaaggaggacatccccggcagacacagctacgccaagtacaacaactgggagaagatcgtggcctggaccgagaagatgatggacaagtaccccgagatggtgagcagaatcaagatcggcagcaccgtggaggacaaccccctgtacgtgctgaagatcggcgagaagaacgagagaagaaaggccatcttcaccgactgcggcatccacgccagagagtgggtgagccccgccttctgccagtggttcgtgtaccaggccaccaagacctacggcagaaacaagatcatgaccaagctgctggacagaatgaacttctacatcctgcccgtgttcaacgtggacggctacatctggagctggaccaagaacagaatgtggagaaagaacagaagcaagaaccagaacagcaagtgcatcggcaccgacctgaacagaaacttcaacgccagctggaacagcatccccaacaccaacgacccctgcgccgacaactacagaggcagcgcccccgagagcgagaaggagaccaaggccgtgaccaacttcatcagaagccacctgaacgagatcaaggtgtacatcaccttccacagctacagccagatgctgctgttcccctacggctacaccagcaagctgccccccaaccacgaggacctggccaaggtggccaagatcggcaccgacgtgctgagcaccagatacgagaccagatacatctacggccccatcgagagcaccatctaccccatcagcggcagcagcctggactgggcctacgacctgggcatcaagcacaccttcgccttcgagctgagagacaagggcaagttcggcttcctgctgcccgagagcagaatcaagcccacctgcagagagaccatgctggccgtgaagttcatcgccaagtacatcctgaagcacaccagctag

SEQ ID NO: 121766 - protein, 417 aa, Artificial Sequence
  derived and/or modified sequence
MLALLVLVTVALASAHHGGEHFEGEKVFRVNVEDENHINIIRELASTTQIDFWKPDSVTQIKPHSTVDFRVKAEDTVTVENVLKQNELQYKVLISNLRNVVEAQFDSRVRATGHSYEKYNKWETIEAWTQQVATENPALISRSVIGTTFEGRAIYLLKVGKAGQNKPAIFMDCGFHAREWISPAFCQWFVREAVRTYGREIQVTELLDKLDFYVLPVLNIDGYIYTWTKSRFWRKTRSTHTGSSCIGTDPNRNFDAGWCEIGASRNPCDETYCGPAAESEKETKALADFIRNKLSSIKAYLTIHSYSQMMIYPYSYAYKLGENNAELNALAKATVKELASLHGTKYTYGPGATTIYPAAGGSDDWAYDQGIRYSFTFELRDTGRYGFLLPESQIRATCEETFLAIKYVASYVLEHLY

SEQ ID NO: 121767 - protein, 99 aa, Artificial Sequence
  derived and/or modified sequence
MLALLVLVTVALASAHHGGEHFEGEKVFRVNVEDENHINIIRELASTTQIDFWKPDSVTQIKPHSTVDFRVKAEDTVTVENVLKQNELQYKVLISNLRN

SEQ ID NO: 121768 - protein, 59 aa, Artificial Sequence
  derived and/or modified sequence
MLALLVLVTVALASAHHGGEHFEGEKVFRVNVEDENHINIIRELASTTQIDFWKPDSVT

SEQ ID NO: 121769 - DNA, 1254 bp, Artificial Sequence
  derived and/or modified sequence
atgcttgccctgttagtgctcgtcacagttgcgctggcctcagcacaccatgggggagagcactttgaaggcgagaaagtgttcagagttaacgtggaagacgaaaatcacattaatattattagagaactcgcctccaccacacagatcgatttttggaaacctgactcagtgacacagataaagcctcattccacggtggatttcagggtgaaagctgaagacacagtcacagtggagaatgtcttaaagcaaaacgaactgcagtataaggtgctaatcagtaacctgaggaatgtggtcgaggctcaattcgatagtagagtgagggcaacaggccattcctacgagaaatataacaagtgggagaccatcgaggcgtggacccagcaggttgctacggaaaatcccgctcttatcagcaggagcgtgattggaacaacattcgaggggcgagctatttatctgctgaaggttggcaaagccggtcagaataagccagctatctttatggactgtggctttcacgctagggagtggattagccctgctttctgccagtggtttgtccgcgaagccgtgcgaacctacggtagggaaatccaggtgaccgagctcctggacaagctcgatttttacgtactgcctgtcctcaacatagatggatacatatatacatggaccaaatccagattttggcgtaagacccggagcacccataccgggagtagctgtattgggacggacccgaacagaaacttcgacgctggatggtgtgagattggcgcttcgcggaacccatgtgatgagacttactgcgggcctgccgcagaatccgaaaaagagaccaaggcgcttgcggactttatccggaacaagttgagctctatcaaggcttatctgacaatacactcctacagtcagatgatgatatatccttattcatatgcctataagctcggagaaaacaatgcagaattaaatgcattggcaaaggcgacagtcaaggaactggcaagccttcacggaaccaaatatacatatggtcctggagctactactatataccccgcagcaggagggagtgacgactgggcttacgaccaggggattcggtattcttttacatttgagctgcgggacacaggtaggtacggatttctgctcccagagtcccagatccgagctacatgtgaggaaacctttttggccattaagtatgtcgcttcctacgtgctggagcacctctactag

SEQ ID NO: 121770 - DNA, 300 bp, Artificial Sequence
  derived and/or modified sequence
atgctagcactgcttgtcctagtgaccgtggcgctggctagcgcccaccacggtggagaacactttgagggggagaaggtgttccgggtaaatgttgaggatgaaaaccatatcaacattatccgagaactggcttcaactacccagattgatttctggaagccagattctgtaacccagatcaagcctcattctaccgtcgatttccgtgtgaaggcggaagacaccgtaaccgtggagaacgtgctgaagcagaacgaactccaatataaagttcttatcagtaacctccgaaattag

SEQ ID NO: 121771 - DNA, 1254 bp, Artificial Sequence
  derived and/or modified sequence
atgttggccctattagtgctcgtaactgtggcattggcctcagctcatcacggtggggagcatttcgagggcgaaaaagtgtttagagtgaacgtggaagacgagaaccatattaatatcattcgggagctcgcttccactacgcaaatcgacttctggaaaccagacagtgtaacccaaatcaagccacacagtactgtggacttcagagtcaaagcggaagataccgtgacagtggagaatgtgttgaagcagaacgagctgcaatacaaggtgctaatttctaacttgcgcaatgtcgtggaggcacagttcgactctcgcgtccgggctactggacattcgtatgaaaaatacaacaagtgggagaccatcgaggcctggacacagcaggtggcgactgaaaatcccgctctcattagccggagcgttatagggactaccttcgaaggaagagccatctatttactcaaagttgggaaagccggtcagaataagcctgccatttttatggactgtggcttccacgctagggaatggatcagcccagctttttgccaatggttcgtgcgagaagccgtgcggacgtacgggagggagatccaggttactgagctgctagataagttagatttctacgtcctccctgtgttgaacatagacgggtacatctatacttggaccaagagtaggttttggcgcaaaacaagaagcacccatacaggatcctcatgtataggcaccgaccccaaccggaatttcgatgctggttggtgcgaaatcggggcttctaggaacccatgtgatgagacctactgcgggccagcagctgagagcgaaaaagagacaaaagcacttgccgattttatccggaataaactgagcagtatcaaagcttacctaactattcacagctattctcagatgatgatctacccatacagttatgcatataagctgggggagaacaacgctgaactgaacgcccttgcaaaagccacagtgaaggaactcgcgagtctgcatgggaccaagtacacatacggacccggagctacaactatctatcccgctgcgggtgggagtgatgactgggcctacgaccagggcatacggtactcctttacttttgagctgagggacacaggcagatatggcttcctgcttcctgagtctcagattcgcgctacctgtgaggaaacgttcttggctatcaagtacgtcgcatcatacgtactcgagcacctgtactag

SEQ ID NO: 121772 - DNA, 180 bp, Artificial Sequence
  derived and/or modified sequence
atgctcgccctattggtcctggtgacagtggctctcgcttcagcacatcatgggggagaacactttgagggggagaaggtctttagagtgaacgtggaggacgaaaatcacataaacattatcagagagctggctagcacaacccaaatcgatttttggaaacccgactccgttacatag

SEQ ID NO: 121773 - DNA, 1254 bp, Artificial Sequence
  derived and/or modified sequence
atgttagccttgcttgttttggtaacagttgcactcgcctccgcgcatcatggcggggagcattttgagggcgagaaagtgtttcgagtcaatgtggaagacgagaatcacatcaatataatacgcgagttggcatcgacgacccaaatcgatttctggaaaccagatagcgtcacccaaattaaacctcatagcacagtggatttccgagtgaaggcagaagacactgtgacagtggaaaacgtcctgaaacaaaacgagttacagtacaaggtgttgatatcgaacttacggaacgttgtggaggcccagttcgactcccgggtcagagctactggtcattcatacgaaaagtacaacaaatgggagaccatcgaagcttggacgcagcaggtggccactgagaaccccgcattaatctccagaagcgtgatcggcacgaccttcgaaggcagagcaatttaccttttgaaagttgggaaagccgggcaaaacaaacccgcaatttttatggactgtggttttcatgccagagaatggatatcgcccgcattttgccagtggtttgtgcgcgaagcagttagaacatacgggcgggagatccaagttaccgagctgctcgataagctggatttctatgtgcttcccgtccttaacattgacggctacatatacacctggaccaaaagcaggttttggcggaagacacgttccactcacaccgggtcttcctgtatcggcaccgaccccaatcgtaacttcgatgcaggctggtgcgagattggcgcttcaaggaatccgtgcgatgagacatattgtggcccagcagccgagtctgaaaaggagactaaggccctagctgacttcataaggaataaactgtcctctattaaagcctacctgactattcactcctattcgcagatgatgatctatccgtattcttatgcatataaactgggagagaacaacgccgagctcaatgccctggcaaaagccactgtaaaagagctcgcatcgctacacggtactaagtacacctacggacccggggccaccactatctaccccgccgcgggcggatccgacgactgggcctacgatcaagggatacgctattcttttacttttgagctgcgagataccggtagatacggattcctgctaccagagtcacagattagagcgacctgcgaggaaacttttctggccattaagtacgtagccagctatgttcttgagcacctgtattag

SEQ ID NO: 121774 - DNA, 300 bp, Artificial Sequence
  derived and/or modified sequence
atgctcgcactgctagtgttggttacggtagcgctggcctctgcacaccacggcggagaacactttgagggggaaaaagtctttagagtgaacgtagaggatgaaaatcacattaatataattagagaactcgcttcaactacacagattgacttttggaagcccgattccgtcacgcagattaagccacacagcaccgttgattttagagtaaaggccgaagacacagtgaccgtagaaaatgtcctaaaacagaatgagctgcagtataaggtgttgatttccaatctgagaaactag

SEQ ID NO: 121775 - DNA, 1254 bp, Artificial Sequence
  derived and/or modified sequence
atgctagcccttcttgtacttgtgactgtggcactcgctagcgctcatcacggaggagagcactttgagggtgagaaagtctttagggtgaacgtcgaggacgagaaccacatcaacatcatacgggaactcgcctctacgactcaaatcgatttctggaaaccagattctgtgacacagattaaacctcactctacagtggattttagggtgaaagctgaggacactgtgactgtggagaacgtgctgaagcaaaacgagttgcagtacaaagtgcttataagcaatctccgaaacgtcgttgaggcacagttcgactctcgcgtgcgggctaccggccattcatatgagaagtacaacaaatgggagacaattgaagcgtggactcagcaggtcgctacagagaacccagccctcatctctagaagcgtgatagggacaacattcgagggaagagccatttatctcctaaaagtgggcaaagctggtcagaataagccagctatctttatggattgcggatttcacgctagggagtggatctccccggccttctgccaatggtttgttagagaagcagtcagaacatatggaagagagatccaggtaacggaactccttgataagctggatttctatgtcctcccagtgttgaacatcgacggctacatatatacctggaccaagagtcgattttggcggaagacacggtcaacgcatacgggctcttcctgtattggaacagatcctaaccgcaattttgacgccggatggtgtgagattggagcctccaggaatccatgcgacgaaacctactgtggacctgcggctgagtccgagaaagaaacaaaagccttagccgactttataaggaacaaactgagcagcatcaaggcctacttaacgatccactcctacagtcaaatgatgatctacccatattcctatgcctacaaactcggggagaacaacgccgaattaaatgctctagcaaaggctacagtgaaagaactggcctcactgcacgggaccaagtacacttatggccctggtgctactacaatttatcccgccgccggcggtagcgatgattgggcttacgatcagggtatcagatactctttcactttcgaactgcgcgacaccggcagatacggcttccttctacccgaatcacaaataagagctacttgtgaagagacattcctggcaataaagtatgtcgcttcttacgttcttgagcacttatactag

SEQ ID NO: 121776 - DNA, 180 bp, Artificial Sequence
  derived and/or modified sequence
atgctggccctcctcgtactggtcaccgtagcattagcttcagcccaccatggaggggaacacttcgagggcgagaaagtgtttagggtcaacgtcgaagatgagaatcacattaatatcattcgagaacttgcctctaccactcagattgatttttggaaaccagacagcgtgacctag

SEQ ID NO: 121777 - DNA, 1254 bp, Artificial Sequence
  derived and/or modified sequence
atgctggccctcttggtgcttgtgaccgtcgctctggcctcagcccaccacggcggggaacatttcgaaggggaaaaggttttcagggtgaatgttgaagacgagaaccacattaacattatacgtgaacttgcctctaccactcaaattgacttttggaagcccgacagcgtcactcaaatcaagcctcattccacagtagatttcagagtgaaagcggaagataccgtcacagtcgagaacgtcttaaaacagaatgaactccagtacaaagttctgatcagtaatttaaggaacgtggtggaggcccagttcgactcccgggtcagagctactggtcattcatacgaaaagtacaacaaatgggagaccatcgaagcttggacgcagcaggtggccactgagaaccccgcattaatctccagaagcgtgatcggcacgaccttcgaaggcagagcaatttaccttttgaaagttgggaaagccgggcaaaacaaacccgcaatttttatggactgtggttttcatgccagagaatggatatcgcccgcattttgccagtggtttgtgcgcgaagcagttagaacatacgggcgggagattcaagtgaccgagctgcttgacaaactggatttctacgttctcccagttcttaacattgatggttatatctatacttggaccaaaagcagattctggcgcaaaacacggtccacacacactggatcatcctgtatcggaactgatccaaaccggaattttgacgcaggctggtgcgaaattggcgcttctagaaacccgtgtgatgaaacatactgtgggccagctgctgagagtgagaaggaaaccaaagctctcgctgactttatacgaaataaactatcatcaattaaagcctacctgacgatacacagttactctcagatgatgatctacccatactcctacgcgtacaaactaggagaaaataatgccgaattgaatgccctggccaaggcgaccgttaaggaactagcgtccctgcatggcacgaagtacacatatggacccggcgcaactaccatatacccagcagcaggcggtagcgatgattgggcatatgaccaggggattaggtacagctttaccttcgaattgcgtgataccggcagatacggcttcttattgcccgaatcccaaatcagggcaacctgcgaagagacctttttagctatcaaatatgtcgccagttacgtgctagagcatctttactag

SEQ ID NO: 121778 - DNA, 584 bp, Artificial Sequence
  derived and/or modified sequence
gatatcacaatgatatggtttggctgtgtcccctctgagaagagggctaccatcttccagttaaattggactttaactagaagtccaattaaacctctttttgttcctagtttcaggtgttgagagagataccctctcagactttacacagctaccaaggcaacaatgccaggaaaactattaatcaagatatgatagttcctgtttgcaatcaggagaagaaagcaaagaacactcaggattataaaagcagatgagacctacccactagacctggtcagacacaatgttggcactcttggttctggtgactgtggccctggcatctgctcatcatggtggtgagcactttgaaggcgagaaggtgttccgtgttaacgttgaagatgaaaatcacattaacataatccgcgagttggccagcacgacccagattgacttctggaagccagattctgtcacacaaatcaaacctcacagtacagttgacttccgtgttaaagcagaagatactgtcactgtggagaatgttctaaagcagaatgaactacaatacaaggtactgataagcaacctgagaaatg

SEQ ID NO: 121779 - DNA, 1254 bp, Artificial Sequence
  derived and/or modified sequence
atgttagccctcttggtgctggttacagtagcgttagcctcagctcatcatggtggcgagcactttgaaggggagaaggtgttcagggtcaatgtagaagacgagaaccacattaatatcattagagaactggcgagcacaacccagatcgacttctggaagcctgactctgttacccaaattaagcctcatagcacagtcgacttccgagttaaagccgaagataccgtaacagtggaaaacgtactcaagcagaatgagctccagtataaggtgttaatatcaaatttaaggaacgtggttgaggcccagtttgactcaagagtgagagcaacagggcatagctatgagaaatacaacaagtgggaaacgatcgaggcatggacccaacaggtggctacagagaacccagcgctgataagtagaagcgtaatcggaacaaccttcgagggcagagcaatatacctgcttaaagtgggcaaggccggtcagaataaacccgcaatctttatggactgtggcttccatgcaagggaatggattagtccagccttctgtcaatggttcgtcagagaggctgtcaggacttacgggagagagatacaggttacagagttgctcgacaaactggacttttacgtgcttcctgtcctgaacatcgacggttacatatatacttggacgaagagccgcttctggaggaagactcgatcaacacacaccggaagtagttgtatcggcactgaccccaaccgtaactttgacgcaggttggtgtgaaattggagccagccggaatccatgtgacgagacatactgtggtcctgcggcagaaagtgagaaggagactaaggccttagcagatttcattcgcaacaaactgtcttcaatcaaagcatacctgacaattcatagctactcacagatgatgatctacccttattcttacgcctataaacttggagaaaataacgcagaattaaacgccctcgccaaggcaaccgtgaaggagcttgccagcctgcacggcactaaatatacctatgggccaggtgccacgactatctaccccgcagccggaggaagcgatgactgggcctatgaccaggggatacgctacagtttcactttcgaactgagagacacgggcaggtacgggttcctgttaccagaatcccagataagagccacctgcgaagaaaccttcctggctataaaatacgtcgcatcctatgtactagaacacctctactag

SEQ ID NO: 121780 - DNA, 1773 bp, Artificial Sequence
  derived and/or modified sequence
aaagtctccagaatgaggaaatgttggaagcaaataatatattcagctgagcattcttcctggcagtgggagcaggagcctgatttggaccttaaaagcttagtggcaacaacaaataagcattggcctggaaaatccacatcccaacaggctaaacaaggcaggtgttgagagagataccctctcagactttacacagctaccaaggcaacaatgccaggaaaactattaatcaagatatgatagttcctgtttgcaatcaggagaagaaagcaaagaacactcaggattataaaagcagatgagacctacccactagacctggtcagacacaatgttggcactcttggttctggtgactgtggccctggcatctgctcatcatggtggtgagcactttgaaggcgagaaggtgttccgtgttaacgttgaagatgaaaatcacattaacataatccgcgagttggccagcacgacccagattgacttctggaagccagattctgtcacacaaatcaaacctcacagtacagttgacttccgtgttaaagcagaagatactgtcactgtggagaatgttctaaagcagaatgaactacaatacaaggtactgataagcaacctgagaaatgtggtggaggctcagtttgatagccgggttcgtgcaacaggacacagttatgagaagtacaacaagtgggaaacgatagaggcttggactcaacaagtcgccactgagaatccagccctcatctctcgcagtgttatcggaaccacatttgagggacgcgctatttacctcctgaaggttggcaaagctggacaaaataagcctgccattttcatggactgtggtttccatgccagagagtggatttctcctgcattctgccagtggtttgtaagagaggctgttcgtacctatggacgtgagatccaagtgacagagcttctcgacaagttagacttttatgtcctgcctgtgctcaatattgatggctacatctacacctggaccaagagccgattttggagaaagactcgctccacccatactggatctagctgcattggcacagaccccaacagaaattttgatgctggttggtgtgaaattggagcctctcgaaacccctgtgatgaaacttactgtggacctgccgcagagtctgaaaaggagaccaaggccctggctgatttcatccgcaacaaactctcttccatcaaggcatatctgacaatccactcgtactcccaaatgatgatctacccttactcatatgcttacaaactcggtgagaacaatgctgagttgaatgccctggctaaagctactgtgaaagaacttgcctcactgcacggcaccaagtacacatatggcccgggagctacaacaatctatcctgctgctgggggctctgacgactgggcttatgaccaaggaatcagatattccttcacctttgaacttcgagatacaggcagatatggctttctccttccagaatcccagatccgggctacctgcgaggagaccttcctggcaatcaagtatgttgccagctacgtcctggaacacctgtactagttgagaaagctgatggccttgtttcaaaattctcatttttcatttcttttctttcttgaattcttattttggtttgcctggatgttttgcagatcccaatctttcttttaagcttctgggtctattaaactaggtagatcttttcgtattgatcataataaaagtgaatcattactattggaaaa

SEQ ID NO: 121781 - DNA, 585 bp, Artificial Sequence
  derived and/or modified sequence
gcactccagcctgggcgacagagcgagactcctactcaaaaaaaaaaagacttcaaagcaaatacagaaagttacatagttgcaggaaacaacaacaacaacaacaactttgctcttttaatacaaaggactcagttgtcttaagtaatcaaagacctaataatagaaaacataaagcacagaaaattattttgataagacacaaaatctttgttttctagtcagagccctctaaaggtgttgagagagataccctctcagactttacacagctaccaaggcaacaatgccaggaaaactattaatcaagatatgatagttcctgtttgcaatcaggagaagaaagcaaagaacactcaggattataaaagcagatgagacctacccactagacctggtcagacacaatgttggcactcttggttctggtgactgtggccctggcatctgctcatcatggtggtgagcactttgaaggcgagaaggtgttccgtgttaacgttgaagatgaaaatcacattaacataatccgcgagttggccagcacgacccagattgacttctggaagccagattctgtcacac

SEQ ID NO: 121782 - DNA, 1458 bp, Artificial Sequence
  derived and/or modified sequence
cccactagacctggtcagacacaatgttggcactcttggttctggtgactgtggccctggcatctgctcatcatggtggtgagcactttgaaggcgagaaggtgttccgtgttaacgttgaagatgaaaatcacattaacataatccgcgagttggccagcacgacccagattgacttctggaagccagattctgtcacacaaatcaaacctcacagtacagttgacttccgtgttaaagcagaagatactgtcactgtggagaatgttctaaagcagaatgaactacaatacaaggtactgataagcaacctgagaaatgtggtggaggctcagtttgatagccgggttcgtgcaacaggacacagttatgagaagtacaacaagtgggaaacgatagaggcttggactcaacaagtcgccactgagaatccagccctcatctctcgcagtgttatcggaaccacatttgagggacgcgctatttacctcctgaaggttggcaaagctggacaaaataagcctgccattttcatggactgtggtttccatgccagagagtggatttctcctgcattctgccagtggtttgtaagagaggctgttcgtacctatggacgtgagatccaagtgacagagcttctcgacaagttagacttttatgtcctgcctgtgctcaatattgatggctacatctacacctggaccaagagccgattttggagaaagactcgctccacccatactggatctagctgcattggcacagaccccaacagaaattttgatgctggttggtgtgaaattggagcctctcgaaacccctgtgatgaaacttactgtggacctgccgcagagtctgaaaaggagaccaaggccctggctgatttcatccgcaacaaactctcttccatcaaggcatatctgacaatccactcgtactcccaaatgatgatctacccttactcatatgcttacaaactcggtgagaacaatgctgagttgaatgccctggctaaagctactgtgaaagaacttgcctcactgcacggcaccaagtacacatatggcccgggagctacaacaatctatcctgctgctgggggctctgacgactgggcttatgaccaaggaatcagatattccttcacctttgaacttcgagatacaggcagatatggctttctccttccagaatcccagatccgggctacctgcgaggagaccttcctggcaatcaagtatgttgccagctacgtcctggaacacctgtactagttgagaaagctgatggccttgtttcaaaattctcatttttcatttcttttctttcttgaattcttattttggtttgcctggatgttttgcagatcccaatctttcttttaagcttctgggtctattaaactaggtagatcttttcgtattgatcataataaaagtgaatcattactattgg

SEQ ID NO: 121783 - DNA, 1254 bp, Artificial Sequence
  derived and/or modified sequence
atgctggccctgctggtgctggtgaccgtggccctggccagcgcccaccacggcggcgagcacttcgagggcgagaaggtgttcagagtgaacgtggaggacgagaaccacatcaacatcatcagagagctggccagcaccacccagatcgacttctggaagcccgacagcgtgacccagatcaagccccacagcaccgtggacttcagagtgaaggccgaggacaccgtgaccgtggagaacgtgctgaagcagaacgagctgcagtacaaggtgctgatcagcaacctgagaaacgtggtggaggcccagttcgacagcagagtgagagccaccggccacagctacgagaagtacaacaagtgggagaccatcgaggcctggacccagcaggtggccaccgagaaccccgccctgatcagcagaagcgtgatcggcaccaccttcgagggcagagccatctacctgctgaaggtgggcaaggccggccagaacaagcccgccatcttcatggactgcggcttccacgccagagagtggatcagccccgccttctgccagtggttcgtgagagaggccgtgagaacctacggcagagagatccaggtgaccgagctgctggacaagctggacttctacgtgctgcccgtgctgaacatcgacggctacatctacacctggaccaagagcagattctggagaaagaccagaagcacccacaccggcagcagctgcatcggcaccgaccccaacagaaacttcgacgccggctggtgcgagatcggcgccagcagaaacccctgcgacgagacctactgcggccccgccgccgagagcgagaaggagaccaaggccctggccgacttcatcagaaacaagctgagcagcatcaaggcctacctgaccatccacagctacagccagatgatgatctacccctacagctacgcctacaagctgggcgagaacaacgccgagctgaacgccctggccaaggccaccgtgaaggagctggccagcctgcacggcaccaagtacacctacggccccggcgccaccaccatctaccccgccgccggcggcagcgacgactgggcctacgaccagggcatcagatacagcttcaccttcgagctgagagacaccggcagatacggcttcctgctgcccgagagccagatcagagccacctgcgaggagaccttcctggccatcaagtacgtggccagctacgtgctggagcacctgtactag

SEQ ID NO: 121784 - DNA, 300 bp, Artificial Sequence
  derived and/or modified sequence
atgctggccctgctggtgctggtgaccgtggccctggccagcgcccaccacggcggcgagcacttcgagggcgagaaggtgttcagagtgaacgtggaggacgagaaccacatcaacatcatcagagagctggccagcaccacccagatcgacttctggaagcccgacagcgtgacccagatcaagccccacagcaccgtggacttcagagtgaaggccgaggacaccgtgaccgtggagaacgtgctgaagcagaacgagctgcagtacaaggtgctgatcagcaacctgagaaactag

SEQ ID NO: 121785 - DNA, 180 bp, Artificial Sequence
  derived and/or modified sequence
atgctggccctgctggtgctggtgaccgtggccctggccagcgcccaccacggcggcgagcacttcgagggcgagaaggtgttcagagtgaacgtggaggacgagaaccacatcaacatcatcagagagctggccagcaccacccagatcgacttctggaagcccgacagcgtgacctag

SEQ ID NO: 121786 - DNA, 1254 bp, Artificial Sequence
  derived and/or modified sequence
atgctggctttgctcgtcctggttacggttgcccttgccagtgcgcaccatgggggtgaacacttcgagggcgagaaagtgttccgggtgaatgtggaagacgaaaaccatataaacatcatccgcgagctggctagcacaacccaaattgatttttggaagcctgacagcgtaacccaaatcaagccacactcaactgttgatttccgtgtgaaggccgaggataccgtcactgtcgagaacgtgctcaaacagaacgagctccagtataaagtccttatctccaatctcagaaacgtggtcgaggcccagtttgacagtcgggtgagggctactggccatagctacgagaagtacaataagtgggagaccattgaggcttggacccagcaggtggccaccgagaaccctgctcttatcagtcggagcgtcatagggacaacgttcgagggacgggccatttacctcttgaaagtggggaaagcagggcagaacaaacctgccattttcatggactgtgggttccacgcacgggaatggatcagccctgccttctgtcagtggtttgttagggaagccgtccgcacctatgggcgggagattcaggtcacagagcttctggacaagctggacttttacgtcctgccagttctcaatatagacggatatatctatacatggactaagtcaagattttggcgaaagacccggagtacccacacaggatcctcatgtatcggcactgacccaaacagaaattttgacgcaggctggtgtgagatcggagcctcacggaacccgtgtgacgagacatactgtggcccggcagcggagtcagaaaaggaaaccaaggctctggccgactttatccggaacaaattgagtagcatcaaggcttacttgacgatccatagttattcccagatgatgatctacccttactcttatgcttacaagctgggggaaaataacgctgagctcaacgctcttgctaaggcgacggtgaaagagctggctagccttcatgggaccaagtacacctacggaccaggcgctacgacaatctacccggcagctggaggttccgatgattgggcttatgatcaaggcataagatatagcttcacatttgagcttcgcgacactggcagatatggcttccttctccctgaatctcagatcagagctacatgtgaggagaccttcctcgccatcaagtacgttgctagttatgttcttgagcacctctactag

SEQ ID NO: 121787 - DNA, 300 bp, Artificial Sequence
  derived and/or modified sequence
atgctggcccttctggtcctggtgacagttgctcttgcttccgcccaccacggcggcgaacacttcgaaggagagaaagtcttccgggtgaatgtagaggatgagaatcatattaacatcatcagggaactggccagcaccactcagattgacttttggaaaccagattcagtaacacaaattaagccccatagtaccgtggattttagggttaaggcagaggacacagtgacagttgagaacgtgcttaaacaaaatgaactccagtacaaagtgctcatttccaacctgagaaactag

SEQ ID NO: 121788 - DNA, 1254 bp, Artificial Sequence
  derived and/or modified sequence
atgcttgcgcttctcgttctcgtcaccgtcgcattagccagcgctcaccatgggggggaacatttcgagggggaaaaagtattccgtgtcaatgtggaggatgagaaccatattaacatcattcgtgaactcgcatccactactcagatagacttctggaagcccgactccgtgacacaaatcaaaccgcactccaccgtcgacttcagggtgaaagccgaggatacagtgaccgtcgagaacgtgctgaagcagaacgaactccagtataaggtactgatctccaacttacgtaacgttgtcgaggcccagttcgatagcagggttcgtgcaactgggcatagctatgaaaagtataataagtgggagacaatcgaggcatggacccagcaggtagctactgagaacccagcactgatttcccggtcagtgatcggcacgacattcgagggaagggctatatatctattaaaagtgggcaaggctggtcagaataaacccgcaatttttatggattgcgggtttcatgccagggagtggatctcccctgccttttgccaatggttcgtgcgagaggccgtgcgaacatatgggagggagatacaagtcaccgaacttcttgataaactggacttttacgttttacctgtgctgaacatcgacggctacatctacacttggacaaagagtaggttttggagaaaaacgcgctccacccatacagggagttcctgcattggcaccgatccgaataggaacttcgacgccggatggtgcgagataggagctagcaggaatccctgcgacgagacgtactgcggtccggccgcagagagtgaaaaggagaccaaagcactcgcagacttcatcaggaataaactatcaagtataaaagcatatcttacgatacatagttatagtcaaatgatgatatacccatattcttacgcctataaacttggcgaaaacaatgcagagctgaacgccctggccaaggccactgtgaaggagctggctagcctccacggcacaaaatacacttacggtccaggagcaacaacaatttacccagcagctggaggtagcgatgactgggcttatgaccagggtatccgctattcatttacctttgagctgcgagacaccggtcgatatggcttcctactgcctgaatctcagatcagagccacctgtgaggaaacttttttggcaatcaagtacgtagccagctacgtgctcgagcatctctattag

SEQ ID NO: 121789 - DNA, 180 bp, Artificial Sequence
  derived and/or modified sequence
atgctggccctcctcgtgctggtgaccgttgccctcgccagcgctcaccacggtggcgagcacttcgagggagagaaagtattccgggtgaacgtagaggacgagaatcacatcaatataatccgtgagctggcttcaaccacccagattgatttctggaagcctgacagtgtcacgtag

SEQ ID NO: 121790 - DNA, 1254 bp, Artificial Sequence
  derived and/or modified sequence
atgctggccctgctggtgctggtgacagtggccctggccagcgcccaccacggcggggagcactttgaaggagagaaggtgttccgggtgaatgtggaggatgagaaccacatcaacatcatccgggagctggccagcaccacccagattgacttctggaagccagattctgtgacccagatcaagccccacagcacagtggacttccgggtgaaggccgaggacacagtgacagtggagaatgtgctgaagcagaatgagctgcagtacaaggtgctgatcagcaacctgagaaatgtggtggaggcccagtttgacagccgggtgcgggccaccggccacagctatgagaagtacaacaagtgggagaccatcgaggcctggacccagcaggtggccacagaaaatcctgccctgatcagccgctctgtgattggcaccacctttgagggccgggccatctacctgctgaaggtgggcaaggccggccagaacaagccagccatcttcatggactgtggcttccacgcccgggagtggatcagccctgccttctgccagtggtttgtgcgggaggccgtgaggacctacggccgggagatccaggtgacagagctgctggacaagctggacttctacgtgctgcctgtgctgaacattgatggctacatctacacctggaccaagagccgcttctggaggaagaccaggagcacccacacaggcagcagctgcatcggcacagaccccaacagaaactttgatgctggctggtgtgaaattggagccagcaggaacccctgtgatgagacctactgcggccctgctgctgagagcgagaaggagaccaaggccctggccgacttcatccggaacaagctgagcagcatcaaggcctacctgaccatccacagctacagccagatgatgatctacccctacagctatgcctacaagctgggggagaacaatgctgagctgaatgccctggccaaggccaccgtgaaggagctggccagcctgcacggcaccaagtacacctacggccctggggccaccaccatctacccagctgctgggggcagtgatgactgggcctatgaccagggcatccgctacagcttcacctttgagctgcgggacaccggccgctatggcttcctgctgcctgagagccagatccgggccacctgtgaggagaccttcctggccatcaagtatgtggccagctatgtgctggagcacctgtactag

SEQ ID NO: 121791 - DNA, 300 bp, Artificial Sequence
  derived and/or modified sequence
atgctggccctgctggtgctggtgacagtggccctggccagcgcccaccacggcggggagcactttgaaggagagaaggtgttccgggtgaatgtggaggatgagaaccacatcaacatcatccgggagctggccagcaccacccagattgacttctggaagccagattctgtgacccagatcaagccccacagcacagtggacttccgggtgaaggccgaggacacagtgacagtggagaatgtgctgaagcagaatgagctgcagtacaaggtgctgatcagcaacctgaggaactag

SEQ ID NO: 121792 - DNA, 180 bp, Artificial Sequence
  derived and/or modified sequence
atgctggccctgctggtgctggtgacagtggccctggccagcgcccaccacggcggggagcactttgaaggagagaaggtgttccgggtgaatgtggaggatgagaaccacatcaacatcatccgggagctggccagcaccacccagattgacttctggaagccagattctgtgacctag

SEQ ID NO: 121793 - DNA, 1254 bp, Artificial Sequence
  derived and/or modified sequence
atgctggccctgctggtgctggtgaccgtggccctggccagcgcccatcacggcggagaacatttcgagggagagaaggtgttccgtgtcaacgtagaagatgagaaccacataaatattatccgagagcttgcttctacaacccagattgacttctggaaacccgactccgttacccagattaaaccacacagcaccgtggactttcgggtgaaggcggaagatacggtaaccgtagaaaatgtgctcaaacaaaacgaactgcaatacaaggtgctaatcagtaacctgcgtaacgtcgtggaggcccagttcgacagtagagtccgcgcgacaggccatagctacgaaaaatataataagtgggagaccattgaagcctggacacaacaggtcgcaactgaaaacccagctcttatttctcgtagtgtgatcggcactacatttgaaggaagggcgatttaccttcttaaggtggggaaggccggccagaacaagcccgctatttttatggattgtggttttcatgcacgtgagtggataagccccgcgttttgccagtggttcgtgcgagaagcagtccggacatatggccgagagatccaggtgactgaactcctcgacaaactggatttctatgtgctccccgttctgaacattgatggatacatttacacctggaccaagtcaaggttctggcgcaaaactagaagcacgcacaccggctcctcctgcattggcacagatccaaaccgcaatttcgacgccggatggtgcgaaattggagcctcaagaaacccgtgcgacgagacatattgtgggccagctgccgagtctgaaaaagaaactaaggcactggccgattttataagaaacaaactatccagtataaaagcgtacttgaccatacacagctacagccaaatgatgatatatccttattcctatgcctacaaactgggagaaaataacgctgaattaaacgcgctcgcgaaggcaacagtgaaagagctcgcctccttgcatggcacaaagtatacttacggacccggtgccaccacaatctaccccgcagccggaggaagtgatgattgggcctacgatcaagggattcggtactcgttcactttcgagttgagggatactggacggtacggcttcctgctgcccgaaagccagattcgtgcaacctgcgaagagacattccttgcgatcaagtacgtcgctagctacgtcttagaacatctctactag

SEQ ID NO: 121794 - DNA, 300 bp, Artificial Sequence
  derived and/or modified sequence
atgctggccctgctggtgctggtgaccgtggccctggccagcgcccatcacggcggagagcactttgagggagagaaggtattcagggtcaatgtggaagacgagaaccacattaatatcattcgagaactggcctcaactacccagatcgacttctggaagccggactcagtgacccagatcaagccccacagcaccgtagacttccgcgtgaaggccgaagacactgttactgtagagaatgtcttgaagcaaaacgagctgcagtacaaggttctcatcagcaacctgcggaactag

SEQ ID NO: 121795 - DNA, 1254 bp, Artificial Sequence
  derived and/or modified sequence
atgctggccctgctggtgctggtgaccgtggccctggccagcgcccatcacggcggcgaacattttgaaggcgaaaaagtttttagggtgaatgtcgaggacgagaatcatatcaatatcattcgcgagctggcgtctaccacccagattgacttctggaagcccgacagcgttacccagatcaagccccatagtaccgttgatttccgtgtgaaggccgaggatacagtgaccgttgagaacgtgcttaagcagaacgagctgcagtacaaagttcttatatctaatctgaggaacgtggttgaggcccagtttgactcccgcgtgcgcgcaactggacactcttatgagaagtacaataagtgggagactatcgaggcctggacccagcaagttgccacagagaaccctgcactaatttcacgatccgtgatcggcacaactttcgaggggcgagctatctaccttctgaaagtgggtaaggctggacagaataagcccgccatcttcatggattgtggttttcacgcacgggaatggattagtccagccttctgccagtggtttgtgcgtgaggctgtcagaacgtatggcagggaaattcaagtgactgagttgctggacaagctggacttttacgtgttacctgtcctcaacatcgatggttacatctatacctggacaaagtccagattttggagaaagactagatcaacgcacacagggtcttcctgcattggaaccgatccgaataggaattttgatgccggctggtgtgagattggggcgagtagaaacccctgcgacgagacatactgcggacctgccgcagaatcagagaaagaaacaaaggccctggccgactttatcagaaacaagctgtcaagcattaaggcatacttgacaatccactcctattcacagatgatgatctacccatacagctacgcgtataaactgggtgagaacaatgctgaactgaatgctctcgctaaggccacagtcaaggagttagcttctctccatggaacaaaatacacctacggcccaggcgccaccacaatctaccccgccgctggtggttcggacgattgggcttatgaccaggggatccgctacagtttcaccttcgagcttcgcgatacagggaggtatggattcctccttcctgaatctcaaatccgggctacatgtgaagaaacctttttggcaatcaaatatgtcgccagctacgtgctagagcatctatattag

SEQ ID NO: 121796 - DNA, 180 bp, Artificial Sequence
  derived and/or modified sequence
atgctggccctgctggtgctggtgaccgtggccctggccagcgcccaccacgggggcgagcactttgagggagagaaggtgttcagggtaaacgtggaagacgagaatcacatcaatattatccgcgaattggcctcgacaacccagatagacttttggaaacctgactccgtgacttag

SEQ ID NO: 121797 - RNA, 1254 nt, Artificial Sequence
  derived and/or modified sequence
auguuagccuugcuuguuuugguaacaguugcacucgccuccgcgcaucauggcggggagcauuuugagggcgagaaaguguuucgagucaauguggaagacgagaaucacaucaauauaauacgcgaguuggcaucgacgacccaaaucgauuucuggaaaccagauagcgucacccaaauuaaaccucauagcacaguggauuuccgagugaaggcagaagacacugugacaguggaaaacguccugaaacaaaacgaguuacaguacaagguguugauaucgaacuuacggaacguuguggaggcccaguucgacucccgggucagagcuacuggucauucauacgaaaaguacaacaaaugggagaccaucgaagcuuggacgcagcagguggccacugagaaccccgcauuaaucuccagaagcgugaucggcacgaccuucgaaggcagagcaauuuaccuuuugaaaguugggaaagccgggcaaaacaaacccgcaauuuuuauggacugugguuuucaugccagagaauggauaucgcccgcauuuugccagugguuugugcgcgaagcaguuagaacauacgggcgggagauccaaguuaccgagcugcucgauaagcuggauuucuaugugcuucccguccuuaacauugacggcuacauauacaccuggaccaaaagcagguuuuggcggaagacacguuccacucacaccgggucuuccuguaucggcaccgaccccaaucguaacuucgaugcaggcuggugcgagauuggcgcuucaaggaauccgugcgaugagacauauuguggcccagcagccgagucugaaaaggagacuaaggcccuagcugacuucauaaggaauaaacuguccucuauuaaagccuaccugacuauucacuccuauucgcagaugaugaucuauccguauucuuaugcauauaaacugggagagaacaacgccgagcucaaugcccuggcaaaagccacuguaaaagagcucgcaucgcuacacgguacuaaguacaccuacggacccggggccaccacuaucuaccccgccgcgggcggauccgacgacugggccuacgaucaagggauacgcuauucuuuuacuuuugagcugcgagauaccgguagauacggauuccugcuaccagagucacagauuagagcgaccugcgaggaaacuuuucuggccauuaaguacguagccagcuauguucuugagcaccuguauuag

SEQ ID NO: 121798 - RNA, 300 nt, Artificial Sequence
  derived and/or modified sequence
augcucgcacugcuaguguugguuacgguagcgcuggccucugcacaccacggcggagaacacuuugagggggaaaaagucuuuagagugaacguagaggaugaaaaucacauuaauauaauuagagaacucgcuucaacuacacagauugacuuuuggaagcccgauuccgucacgcagauuaagccacacagcaccguugauuuuagaguaaaggccgaagacacagugaccguagaaaauguccuaaaacagaaugagcugcaguauaagguguugauuuccaaucugagaaacuag

SEQ ID NO: 121799 - RNA, 1254 nt, Artificial Sequence
  derived and/or modified sequence
augcuagcccuucuuguacuugugacuguggcacucgcuagcgcucaucacggaggagagcacuuugagggugagaaagucuuuagggugaacgucgaggacgagaaccacaucaacaucauacgggaacucgccucuacgacucaaaucgauuucuggaaaccagauucugugacacagauuaaaccucacucuacaguggauuuuagggugaaagcugaggacacugugacuguggagaacgugcugaagcaaaacgaguugcaguacaaagugcuuauaagcaaucuccgaaacgucguugaggcacaguucgacucucgcgugcgggcuaccggccauucauaugagaaguacaacaaaugggagacaauugaagcguggacucagcaggucgcuacagagaacccagcccucaucucuagaagcgugauagggacaacauucgagggaagagccauuuaucuccuaaaagugggcaaagcuggucagaauaagccagcuaucuuuauggauugcggauuucacgcuagggaguggaucuccccggccuucugccaaugguuuguuagagaagcagucagaacauauggaagagagauccagguaacggaacuccuugauaagcuggauuucuauguccucccaguguugaacaucgacggcuacauauauaccuggaccaagagucgauuuuggcggaagacacggucaacgcauacgggcucuuccuguauuggaacagauccuaaccgcaauuuugacgccggauggugugagauuggagccuccaggaauccaugcgacgaaaccuacuguggaccugcggcugaguccgagaaagaaacaaaagccuuagccgacuuuauaaggaacaaacugagcagcaucaaggccuacuuaacgauccacuccuacagucaaaugaugaucuacccauauuccuaugccuacaaacucggggagaacaacgccgaauuaaaugcucuagcaaaggcuacagugaaagaacuggccucacugcacgggaccaaguacacuuauggcccuggugcuacuacaauuuaucccgccgccggcgguagcgaugauugggcuuacgaucaggguaucagauacucuuucacuuucgaacugcgcgacaccggcagauacggcuuccuucuacccgaaucacaaauaagagcuacuugugaagagacauuccuggcaauaaaguaugucgcuucuuacguucuugagcacuuauacuag

SEQ ID NO: 121800 - RNA, 180 nt, Artificial Sequence
  derived and/or modified sequence
augcuggcccuccucguacuggucaccguagcauuagcuucagcccaccauggaggggaacacuucgagggcgagaaaguguuuagggucaacgucgaagaugagaaucacauuaauaucauucgagaacuugccucuaccacucagauugauuuuuggaaaccagacagcgugaccuag

SEQ ID NO: 121801 - RNA, 1254 nt, Artificial Sequence
  derived and/or modified sequence
augcuggcccucuuggugcuugugaccgucgcucuggccucagcccaccacggcggggaacauuucgaaggggaaaagguuuucagggugaauguugaagacgagaaccacauuaacauuauacgugaacuugccucuaccacucaaauugacuuuuggaagcccgacagcgucacucaaaucaagccucauuccacaguagauuucagagugaaagcggaagauaccgucacagucgagaacgucuuaaaacagaaugaacuccaguacaaaguucugaucaguaauuuaaggaacgugguggaggcccaguucgacucccgggucagagcuacuggucauucauacgaaaaguacaacaaaugggagaccaucgaagcuuggacgcagcagguggccacugagaaccccgcauuaaucuccagaagcgugaucggcacgaccuucgaaggcagagcaauuuaccuuuugaaaguugggaaagccgggcaaaacaaacccgcaauuuuuauggacugugguuuucaugccagagaauggauaucgcccgcauuuugccagugguuugugcgcgaagcaguuagaacauacgggcgggagauucaagugaccgagcugcuugacaaacuggauuucuacguucucccaguucuuaacauugaugguuauaucuauacuuggaccaaaagcagauucuggcgcaaaacacgguccacacacacuggaucauccuguaucggaacugauccaaaccggaauuuugacgcaggcuggugcgaaauuggcgcuucuagaaacccgugugaugaaacauacugugggccagcugcugagagugagaaggaaaccaaagcucucgcugacuuuauacgaaauaaacuaucaucaauuaaagccuaccugacgauacacaguuacucucagaugaugaucuacccauacuccuacgcguacaaacuaggagaaaauaaugccgaauugaaugcccuggccaaggcgaccguuaaggaacuagcgucccugcauggcacgaaguacacauauggacccggcgcaacuaccauauacccagcagcaggcgguagcgaugauugggcauaugaccaggggauuagguacagcuuuaccuucgaauugcgugauaccggcagauacggcuucuuauugcccgaaucccaaaucagggcaaccugcgaagagaccuuuuuagcuaucaaauaugucgccaguuacgugcuagagcaucuuuacuag

SEQ ID NO: 121802 - RNA, 1254 nt, Artificial Sequence
  derived and/or modified sequence
auguuagcccucuuggugcugguuacaguagcguuagccucagcucaucaugguggcgagcacuuugaaggggagaagguguucagggucaauguagaagacgagaaccacauuaauaucauuagagaacuggcgagcacaacccagaucgacuucuggaagccugacucuguuacccaaauuaagccucauagcacagucgacuuccgaguuaaagccgaagauaccguaacaguggaaaacguacucaagcagaaugagcuccaguauaagguguuaauaucaaauuuaaggaacgugguugaggcccaguuugacucaagagugagagcaacagggcauagcuaugagaaauacaacaagugggaaacgaucgaggcauggacccaacagguggcuacagagaacccagcgcugauaaguagaagcguaaucggaacaaccuucgagggcagagcaauauaccugcuuaaagugggcaaggccggucagaauaaacccgcaaucuuuauggacuguggcuuccaugcaagggaauggauuaguccagccuucugucaaugguucgucagagaggcugucaggacuuacgggagagagauacagguuacagaguugcucgacaaacuggacuuuuacgugcuuccuguccugaacaucgacgguuacauauauacuuggacgaagagccgcuucuggaggaagacucgaucaacacacaccggaaguaguuguaucggcacugaccccaaccguaacuuugacgcagguuggugugaaauuggagccagccggaauccaugugacgagacauacugugguccugcggcagaaagugagaaggagacuaaggccuuagcagauuucauucgcaacaaacugucuucaaucaaagcauaccugacaauucauagcuacucacagaugaugaucuacccuuauucuuacgccuauaaacuuggagaaaauaacgcagaauuaaacgcccucgccaaggcaaccgugaaggagcuugccagccugcacggcacuaaauauaccuaugggccaggugccacgacuaucuaccccgcagccggaggaagcgaugacugggccuaugaccaggggauacgcuacaguuucacuuucgaacugagagacacgggcagguacggguuccuguuaccagaaucccagauaagagccaccugcgaagaaaccuuccuggcuauaaaauacgucgcauccuauguacuagaacaccucuacuag

SEQ ID NO: 121803 - protein, 423 aa, Artificial Sequence
  derived and/or modified sequence
MKLCSLAVLVPIVLFCEQHVFAFQSGQVLAALPRTSRQVQVLQNLTTTYEIVLWQPVTADLIVKKKQVHFFVNASDVDNVKAHLNVSGIPCSVLLADVEDLIQQQISNDTVSPRASASYYEQYHSLNEIYSWIEFITERHPDMLTKIHIGSSFEKYPLYVLKVSGKEQAAKNAIWIDCGIHAREWISPAFCLWFIGHITQFYGIIGQYTNLLRLVDFYVMPVVNVDGYDYSWKKNRMWRKNRSFYANNHCIGTDLNRNFASKHWCEEGASSSSCSETYCGLYPESEPEVKAVASFLRRNINQIKAYISMHSYSQHIVFPYSYTRSKSKDHEELSLVASEAVRAIEKISKNTRYTHGHGSETLYLAPGGGDDWIYDLGIKYSFTIELRDTGTYGFLLPERYIKPTCREAFAAVSKIAWHVIRNV

SEQ ID NO: 121804 - DNA, 1272 bp, Artificial Sequence
  derived and/or modified sequence
atgaagctttgttccctcgctgtgctggtaccaattgtactgttttgcgagcaacatgtattcgccttccagtcaggccaggtgctcgctgctctgccacgaacatctcgacaggtgcaagttctccaaaatctcactacgacttacgagatcgtactttggcaacctgtgacggccgatttaatcgtcaagaagaagcaagtgcactttttcgtaaatgcctcggacgtggacaacgtgaaagcccacctgaatgtgtctggaatcccttgttccgtactgcttgcagatgtagaagatcttatccagcagcaaattagcaatgatacagtcagccctcgagcctccgcaagctactatgagcagtaccatagcttgaacgaaatatatagctggattgaattcattacagagaggcatcccgatatgcttacaaaaatacatattgggtcatcattcgagaaatatcccttgtacgtcttgaaggtgagcggcaaggagcaggctgcaaagaatgctatttggatcgattgtggaattcacgcacgcgaatggatcagtccagccttctgtctttggttcatcggccacattacccagttctatggaattattgggcaatacaccaacctgctcagactggtggacttttacgtgatgccagtggtgaacgtagatggatatgactatagctggaaaaagaatcgcatgtggagaaaaaatcggtctttctacgccaataatcattgcattggaacagacttgaacagaaattttgcatcaaaacactggtgtgaagagggagcaagttcttcctcttgcagcgaaacatactgtggcctgtaccccgaatcggagcctgaagttaaggctgtagcgagtttcctgcggcggaatatcaatcagatcaaggcgtacatctcaatgcactcttacagccagcatatcgtcttcccctattcctacacccggtctaaaagtaaagatcatgaagagctgagtctggtggcgtcggaggctgtgcgagcaattgaaaaaatttctaaaaacacccgctacacccacggtcatggctctgagactctgtacttggcaccaggcggcggagatgattggatctatgacctgggcatcaagtactcattcactatcgaactacgggacaccgggacctatgggtttttgctacctgaacggtatatcaaaccgacttgccgtgaggccttcgccgcggtttccaaaattgcgtggcatgtgattaggaacgtatag

SEQ ID NO: 121805 - DNA, 1272 bp, Artificial Sequence
  derived and/or modified sequence
atgaagctgtgcagcctggccgtgctggtgcccatcgtgctcttctgtgagcagcacgtgtttgccttccagagcggccaggtgctggccgccctgcccaggaccagccggcaggtgcaggtgctgcagaacctgaccaccacctatgaaattgtgctgtggcagcctgtgacagctgacctgattgtgaagaagaagcaggtgcacttctttgtgaatgccagtgatgtggacaacgtgaaggcccacctgaatgtgtctggcatcccctgcagcgtgctgctggctgatgtggaggacctgatccagcagcagatcagcaatgacacagtgagcccccgggccagcgccagctactatgagcagtaccacagcctgaatgagatctacagctggattgagttcatcacagagcggcacccagacatgctgaccaagatccacatcggcagcagctttgagaagtaccccctgtatgtgctgaaggtgtctgggaaggagcaggccgccaagaatgccatctggattgactgtggcatccacgcccgggagtggatcagccctgccttctgcctgtggttcatcggccacatcacccagttctacggcatcatcggccagtacaccaacctgctgcggctggtggacttctacgtgatgcctgtggtgaatgtggatggctatgactacagctggaagaagaacaggatgtggaggaagaacagaagcttctacgccaacaaccactgcattggaacagacctgaacagaaactttgccagcaagcactggtgtgaggagggcgccagcagcagcagctgcagcgagacctactgcggcctgtacccagagagcgagcctgaggtgaaggctgtggccagcttcctgcggaggaacatcaaccagatcaaggcctacatctccatgcacagctacagccagcacatcgtgttcccctacagctacaccaggagcaagagcaaggaccacgaggagctgagcctggtggccagcgaggccgtgcgggccatcgagaagatcagcaagaacacccgctacacccacggccacggcagcgagaccctgtacctggcccctggaggaggagatgactggatctatgacctgggcatcaagtacagcttcaccatcgagctgcgggacaccggcacctacggcttcctgctgcctgagcgctacatcaagcccacctgccgggaggcctttgctgctgtgtccaagatcgcctggcacgtgatcagaaatgtgtag

SEQ ID NO: 121806 - DNA, 1272 bp, Artificial Sequence
  derived and/or modified sequence
atgaagctgtgcagcctggccgtgctggtgcccatcgtgctgttctgtgagcagcacgtcttcgccttccaaagcgggcaggtccttgcagcgctgccccgcacctcgcggcaggtgcaagtgctgcagaacctaacaaccacctacgagatcgtcctttggcagcctgtaacagcagatctgatcgtaaagaaaaagcaagttcatttcttcgttaacgcatctgacgtcgataacgttaaggcccatctgaatgtgtcaggaatcccctgctccgtccttttggcagatgtggaagacctcatccagcaacagatatcaaatgacacggtgagcccccgcgcaagcgcttcctactacgagcagtatcatagcctaaatgagatttatagttggatagagttcatcaccgagcgtcatccagacatgctgaccaaaatacatatcggctcttcattcgagaagtaccctctgtatgttttaaaggtttcaggaaaggaacaggctgcaaagaacgcgatatggatcgattgcggtattcatgctagggagtggatttcaccagccttttgtctgtggtttattggacacattactcagttctatggaatcataggtcagtacaccaatcttctgaggctcgtggacttctatgtgatgcccgtggtgaacgtcgatgggtacgactattcttggaagaagaaccgcatgtggcggaagaataggagtttctacgcaaacaaccattgtatcggaaccgatttaaataggaattttgcctctaaacactggtgcgaggagggggcttctagctccagctgttcagaaacctactgcggactctatcctgagtcggagccagaggtgaaagcagtagcaagtttcctgcggcggaacatcaaccaaatcaaagcctacatttctatgcattcctactctcagcatatcgtattcccctattcttacacgaggtctaaatcaaaggatcacgaggaattgagccttgttgccagcgaagcagtgcgggctattgaaaagatttctaaaaacacgcgctatactcatggacacgggtcagagaccctctatctggccccaggtgggggggatgattggatctatgacctgggaatcaagtattcctttacaattgaactacgggatacaggcacgtatggcttcttgctccctgaacgctatattaaaccaacgtgtagggaagcattcgcagcagtcagcaaaatcgcgtggcacgtcattcgcaatgtatag

SEQ ID NO: 121807 - DNA, 1272 bp, Artificial Sequence
  derived and/or modified sequence
atgaagctctgctccctggccgtccttgtccccatcgtcttgttctgtgagcaacatgtgtttgcatttcagtctggccaggttttagccgcactgccaagaacctccaggcaggtccaagtgcttcaaaatctgacaacgacttacgagattgtcctgtggcaaccagtgacagccgacctcattgtgaaaaaaaagcaggtacatttctttgtgaatgccagcgacgttgataacgtcaaagcgcatctaaacgtgagcggaatcccatgcagtgtcctcctggctgacgtagaggatctcatccagcaacagattagcaacgatacggtgagcccaagggccagcgcctcatattacgaacaataccacagcctgaatgagatttacagttggatcgagtttatcacagagagacacccagacatgctgacaaagatccacatcggatcaagtttcgaaaaataccccctctatgtgctgaaagtctccggcaaggaacaggctgcaaagaacgcgatctggattgactgcggaattcatgctagggagtggatctcaccggctttctgtctgtggtttattgggcatattacgcaattctacgggatcatcgggcagtacaccaacttactgaggcttgtcgacttttacgtcatgccagtggtgaatgtggatggctacgactatagctggaaaaagaaccggatgtggagaaagaaccggtccttttacgccaataatcattgtatcggaactgacctaaatagaaactttgctagcaaacactggtgcgaagagggcgcttcttctagcagttgctctgaaacgtactgtggactttatcccgagagcgaaccggaggtgaaggctgtggcaagttttcttcggagaaatattaaccagattaaggcttacatctcaatgcattcatacagtcagcacatcgttttcccctatagctatactcgtagcaaaagtaaggatcatgaagagttgtcactggtggcttctgaggccgttagagccattgagaaaatatcaaaaaacaccaggtacactcacggccacggctccgagactctgtacctggctcccggaggcggagatgattggatctatgatctcggcataaagtattccttcacaatcgaattgcgggatacagggacatatgggtttctcctgccagaacggtacatcaaacccacctgtcgggaggcgttcgccgcagtgtccaaaattgcctggcacgttatccggaacgtgtag

SEQ ID NO: 121808 - DNA, 1717 bp, Artificial Sequence
  derived and/or modified sequence
agaaaattgctgttgggatgaagctttgcagccttgcagtccttgtacccattgttctcttctgtgagcagcatgtcttcgcgtttcagagtggccaagttctagctgctcttcctagaacctctaggcaagttcaagttctacagaatcttactacaacatatgagattgttctctggcagccggtaacagctgaccttattgtgaagaaaaaacaagtccatttttttgtaaatgcatctgatgtcgacaatgtgaaagcccatttaaatgtgagcggaattccatgcagtgtcttgctggcagatgtggaagatcttattcaacagcagatttccaacgacacagtcagcccccgagcctccgcatcgtactatgaacagtatcactcactaaatgaaatctattcttggatagaatttataactgagaggcatcctgatatgcttacaaaaatccacattggatcctcatttgagaagtacccactctatgttttaaaggtttctggaaaagaacaagcagccaaaaatgccatatggattgactgtggaatccatgccagagaatggatctctcctgctttctgcttgtggttcataggccatataactcaattctatgggataatagggcaatataccaatctcctgaggcttgtggatttctatgttatgccagtggttaatgtggatggttatgactactcatggaaaaagaatcgaatgtggagaaagaaccgttctttctatgcgaacaatcattgcatcggaacagacctgaataggaactttgcttccaaacactggtgtgaggaaggtgcatccagttcctcatgctcggaaacctactgtggactttatcctgagtcagaaccagaagtgaaggcagtggctagtttcttgagaagaaatatcaaccagattaaagcatacatcagcatgcattcatactcccagcatatagtgtttccatattcctatacacgaagtaaaagcaaagaccatgaggaactgtctctagtagccagtgaagcagttcgtgctattgagaaaattagtaaaaataccaggtatacacatggccatggctcagaaaccttatacctagctcctggaggtggggacgattggatctatgatttgggcatcaaatattcgtttacaattgaacttcgagatacgggcacatacggattcttgctgccggagcgttacatcaaacccacctgtagagaagcttttgccgctgtctctaaaatagcttggcatgtcattaggaatgtttaatgcccctgattttatcattctgcttccgtattttaatttactgattccagcaagaccaaatcattgtatcaaattatttttaagttttatccgtagttttgataaaagattttcctattccttggttctgtcagagaacctaataagtgctactttgccattaaggcagactagggttcatgtctttttaccctttaaaaaaaattgtaaaagtctagttacctactttttctttgattttcgacgtttgactagccatctcaagcaagtttcgacgtttgactagccatctcaagcaagtttaatcaatgatcatctcacgctgatcattggatcctactcaacaaaaggaagggtggtcagaagtacattaaagatttctgctccaaattttcaataaatttctgcttgtgcctttagaaatacaa

SEQ ID NO: 121809 - DNA, 1272 bp, Artificial Sequence
  derived and/or modified sequence
atgaagctgtgcagcctggccgtgctggtgcccatcgtgctgttctgcgagcagcacgtgttcgccttccagagcggccaggtgctggccgccctgcccagaaccagcagacaggtgcaggtgctgcagaacctgaccaccacctacgagatcgtgctgtggcagcccgtgaccgccgacctgatcgtgaagaagaagcaggtgcacttcttcgtgaacgccagcgacgtggacaacgtgaaggcccacctgaacgtgagcggcatcccctgcagcgtgctgctggccgacgtggaggacctgatccagcagcagatcagcaacgacaccgtgagccccagagccagcgccagctactacgagcagtaccacagcctgaacgagatctacagctggatcgagttcatcaccgagagacaccccgacatgctgaccaagatccacatcggcagcagcttcgagaagtaccccctgtacgtgctgaaggtgagcggcaaggagcaggccgccaagaacgccatctggatcgactgcggcatccacgccagagagtggatcagccccgccttctgcctgtggttcatcggccacatcacccagttctacggcatcatcggccagtacaccaacctgctgagactggtggacttctacgtgatgcccgtggtgaacgtggacggctacgactacagctggaagaagaacagaatgtggagaaagaacagaagcttctacgccaacaaccactgcatcggcaccgacctgaacagaaacttcgccagcaagcactggtgcgaggagggcgccagcagcagcagctgcagcgagacctactgcggcctgtaccccgagagcgagcccgaggtgaaggccgtggccagcttcctgagaagaaacatcaaccagatcaaggcctacatcagcatgcacagctacagccagcacatcgtgttcccctacagctacaccagaagcaagagcaaggaccacgaggagctgagcctggtggccagcgaggccgtgagagccatcgagaagatcagcaagaacaccagatacacccacggccacggcagcgagaccctgtacctggcccccggcggcggcgacgactggatctacgacctgggcatcaagtacagcttcaccatcgagctgagagacaccggcacctacggcttcctgctgcccgagagatacatcaagcccacctgcagagaggccttcgccgccgtgagcaagatcgcctggcacgtgatcagaaacgtgtag

SEQ ID NO: 121810 - protein, 382 aa, Artificial Sequence
  derived and/or modified sequence
MRRRRRLQQEDGISFEYHRYPELREALVSVWLQCTAISRIYTVGRSFEGRELLVIELSDNPGVHEPGEPEFKYIGNMHGNEAVGRELLIFLAQYLCNEYQKGNETIVNLIHSTRIHIMPSLNPDGFEKAASQPGELKDWFVGRSNAQGIDLNRNFPDLDRIVYVNEKEGGPNNHLLKNMKKIVDQNTKLAPETKAVIHWIMDIPFVLSANLHGGDLVANYPYDETRSGSAHEYSSSPDDAIFQSLARAYSSFNPAMSDPNRPPCRKNDDDSSFVDGTTNGGAWYSVPGGMQDFNYLSSNCFEITVELSCEKFPPEETLKTYWEDNKNSLISYLEQIHRGVKGFVRDLQGNPIANATISVEGIDHDVTSAKDGDYWRLLTWKL

SEQ ID NO: 121811 - protein, 476 aa, Artificial Sequence
  derived and/or modified sequence
MAGRGGSALLALCGALAACGWLLGAEAQEPGAPAAGMRRRRRLQQEDGISFEYHRYPELREALVSVWLQCTAISRIYTVGRSFEGRELLVIELSDNPGVHEPGEPEFKYIGNMHGNEAVGRELLIFLAQYLCNEYQKGNETIVNLIHSTRIHIMPSLNPDGFEKAASQPGELKDWFVGRSNAQGIDLNRNFPDLDRIVYVNEKEGGPNNHLLKNMKKIVDQNTKLAPETKAVIHWIMDIPFVLSANLHGGDLVANYPYDETRSGSAHEYSSSPDDAIFQSLARAYSSFNPAMSDPNRPPCRKNDDDSSFVDGTTNGGAWYSVPGGMQDFNYLSSNCFEITVELSCEKFPPEETLKTYWEDNKNSLISYLEQIHRGVKGFVRDLQGNPIANATISVEGIDHDVTSAKDGDYWRLLIPGNYKLTASAPGYLAITKKVAVPYSPAAGVDFELESFSERKEEEKEELMEWWKMMSETLNF

SEQ ID NO: 121812 - DNA, 1149 bp, Artificial Sequence
  derived and/or modified sequence
atgcgacgtagaaggcgcctgcagcaggaggacggaatttcctttgagtatcacagatatcctgaattgcgagaggcgctggtgtccgtgtggctacagtgtactgcaatctctcgcatctatacagtggggcggagctttgaaggtcgtgaacttctagtgatagagttgtctgacaatccgggcgtgcatgagccaggggaacctgagttcaaatacataggaaacatgcatggaaatgaggcagtaggccgcgaactgctgattttccttgcgcagtatctttgcaatgagtaccaaaagggcaacgaaaccatcgtcaacttgatccactctacccgaatccacataatgcccagccttaacccggacggatttgaaaaggcagccagccagcctggagagcttaaggattggttcgtagggagatccaacgcccagggcatcgatctgaatcgcaatttcccagacctggatagaatcgtttacgtgaacgagaaggaggggggtccgaacaaccacctgcttaaaaatatgaagaagattgtggatcaaaacacgaagttggcacctgagactaaggctgtgatccattggattatggacattccctttgtattgtctgcgaatctgcacggtggcgatctggtggctaattatccttatgacgaaaccagaagtggaagcgcccacgaatattcaagttccccagacgatgccatctttcaaagtttagccagagcatattccagcttcaatcccgccatgtccgatcccaaccgtccaccttgccgcaaaaacgacgatgactcttccttcgtcgatggcacaaccaatggcggtgcctggtatagcgttcccggcggtatgcaagacttcaactacctgtccagcaattgctttgagatcactgttgaactctcatgtgagaagtttccaccagaggagaccttgaagacttattgggaagataacaagaactcgctgatcagctatctggagcaaatccataggggtgtcaaaggctttgttcgggatcttcagggtaaccccatcgccaacgctaccatcagcgtggagggaattgaccacgatgtaacctcagccaaagatggtgactattggcggcttttgacatggaagctttag

SEQ ID NO: 121813 - DNA, 1431 bp, Artificial Sequence
  derived and/or modified sequence
atggccggcagggggggatccgctctcctcgccctgtgtggagctcttgcagcatgcggctggctgctaggggccgaagcacaggaacccggggctccagctgcgggcatgcgccggagacggcgactacagcaggaggatggcattagcttcgagtaccatcgctatccagaattacgtgaggccctggtgtctgtgtggctgcagtgcaccgcaatatcacgtatttacaccgtgggtagaagtttcgaggggcgggagttactggttatcgaattgagcgataatcctggagtgcacgagccaggcgagcctgaattcaaatacattggaaacatgcacgggaatgaggccgtgggtagagagctccttatctttttagcacagtatctatgcaatgaataccaaaaggggaatgagactatcgtcaacttgattcactccactagaattcatattatgccaagtctcaacccggacggcttcgaaaaggcggcatcacagccaggagagctgaaggactggtttgtgggccggtcgaacgcgcaaggtattgacctgaatagaaacttccctgacctagaccgcatagtgtacgtgaacgagaaagaaggggggcctaacaaccacctgttgaagaatatgaaaaaaattgtcgatcagaatacaaagcttgccccggaaaccaaggccgtcatacactggataatggacattccttttgtgctgtcggccaacttacacggcggtgacctagtcgctaattacccttacgacgaaacgagaagcggaagcgctcacgagtatagctcaagtcctgacgatgccatattccaaagtctagcacgggcctatagctcttttaaccccgccatgtctgaccctaaccggcctccctgtcggaagaacgacgacgattcaagtttcgttgacggcaccactaacggtggcgcctggtactctgtaccaggtggcatgcaggacttcaattacctatcaagcaattgcttcgaaattacagtcgaactgtcctgcgaaaagttcccgcctgaggaaacactgaaaacctactgggaagataacaaaaactctttaatttcttatttggagcagatacaccgtggtgtaaaaggattcgttcgggatctgcagggaaatcccatcgctaacgcaaccatttccgtcgagggtatagaccacgatgtgacatccgcgaaagacggtgactattggcgactcctgatacccggaaattacaaactcactgcctccgcccctggatatctggctatcactaaaaaagtggctgttccctactctccagctgcgggtgtagactttgaactcgagtccttttcagagagaaaggaggaagagaaagaagagctcatggagtggtggaaaatgatgtcagagacccttaacttttag

SEQ ID NO: 121814 - DNA, 1149 bp, Artificial Sequence
  derived and/or modified sequence
atgagaagaagaagaaggctgcagcaggaggatggcatcagctttgagtaccaccgctacccagagctgcgggaggccctggtgtctgtgtggctgcagtgcacagccatcagccgcatctacacagtgggccgcagctttgagggccgggagctgctggtgattgagctgagtgacaaccctggggtgcatgagcccggggagcctgagttcaagtacatcggcaacatgcacggcaatgaggccgtgggccgggagctgctgatcttcctggcccagtacctgtgcaatgagtaccagaagggaaatgagaccatcgtgaacctgatccacagcacccgcatccacatcatgcccagcctgaacccagatggctttgagaaggccgccagccagcctggagagctgaaggactggtttgtgggccgcagcaatgcccagggcatcgacctgaacagaaacttcccagacctggacagaattgtgtatgtgaatgagaaggagggcggccccaacaaccacctgctgaagaacatgaagaagatcgtggaccagaacaccaagctggcccctgagaccaaggctgtgatccactggatcatggacatcccctttgtgctgagcgccaacctgcacggcggggacctggtggccaactacccctatgatgagaccaggagcggcagcgcccacgagtacagcagcagcccagatgatgccatcttccagagcctggcccgggcctacagcagcttcaacccagccatgtctgaccccaaccggcccccctgcaggaagaatgatgatgacagcagctttgtggatggcaccaccaatggaggagcctggtacagcgtgcctgggggcatgcaggacttcaactacctgagcagcaactgctttgagatcaccgtggagctgagctgtgagaagtttcctcctgaggagaccctgaagacctactgggaggacaacaagaacagcctcatctcctacctggagcagatccacagaggagtgaagggctttgtgcgggacctgcagggcaaccccatcgccaatgccaccatctctgtggagggcatcgaccatgatgtgaccagcgccaaggatggagactactggaggctgctgacctggaagctgtag

SEQ ID NO: 121815 - DNA, 1431 bp, Artificial Sequence
  derived and/or modified sequence
atggccggccggggcggcagcgccctgctggccctgtgtggggccctggccgcctgtggctggctgctgggcgctgaggcccaggagcccggggccccagctgctggcatgagaagaagaagaaggctgcagcaggaggatggcatcagctttgagtaccaccgctacccagagctgcgggaggccctggtgtctgtgtggctgcagtgcacagccatcagccgcatctacacagtgggccgcagctttgagggccgggagctgctggtgattgagctgagtgacaaccctggggtgcatgagcccggggagcctgagttcaagtacatcggcaacatgcacggcaatgaggccgtgggccgggagctgctgatcttcctggcccagtacctgtgcaatgagtaccagaagggaaatgagaccatcgtgaacctgatccacagcacccgcatccacatcatgcccagcctgaacccagatggctttgagaaggccgccagccagcctggagagctgaaggactggtttgtgggccgcagcaatgcccagggcatcgacctgaacagaaacttcccagacctggacagaattgtgtatgtgaatgagaaggagggcggccccaacaaccacctgctgaagaacatgaagaagatcgtggaccagaacaccaagctggcccctgagaccaaggctgtgatccactggatcatggacatcccctttgtgctgagcgccaacctgcacggcggggacctggtggccaactacccctatgatgagaccaggagcggcagcgcccacgagtacagcagcagcccagatgatgccatcttccagagcctggcccgggcctacagcagcttcaacccagccatgtctgaccccaaccggcccccctgcaggaagaatgatgatgacagcagctttgtggatggcaccaccaatggaggagcctggtacagcgtgcctgggggcatgcaggacttcaactacctgagcagcaactgctttgagatcaccgtggagctgagctgtgagaagtttcctcctgaggagaccctgaagacctactgggaggacaacaagaacagcctcatctcctacctggagcagatccacagaggagtgaagggctttgtgcgggacctgcagggcaaccccatcgccaatgccaccatctctgtggagggcatcgaccatgatgtgaccagcgccaaggatggagactactggaggctgctgatccctggcaactacaagctgacagccagcgcccctggctacctggccatcaccaagaaggtggccgtgccctacagccctgctgctggggtggactttgagctggagagcttcagcgagaggaaggaggaggagaaggaggagctgatggagtggtggaagatgatgtctgagaccctgaacttctag

SEQ ID NO: 121816 - DNA, 1149 bp, Artificial Sequence
  derived and/or modified sequence
atgcggcggcggcggcggctgcagcaggaggacggcatcagcttcgaatatcaccgataccctgagttgcgggaggcattggtttccgtctggttgcagtgcaccgctatctcaagaatctacactgtgggccgcagctttgaggggcgcgagctgcttgtaatcgaactgtccgacaatcccggcgtgcacgagcctggcgaacctgagtttaagtacatcggcaacatgcatggaaatgaagccgtgggtcgtgagttactgatttttcttgcccagtatctctgtaatgagtaccaaaaaggaaacgaaaccatcgtgaacctgatacattccactagaatacacattatgccctccctgaaccccgacggattcgagaaggccgcttctcagcccggcgagttgaaggattggtttgtggggaggtcaaatgcccaggggattgatttgaacagaaatttccccgatctcgaccggatagtatatgtcaatgagaaggaaggggggccgaataatcatctgctgaaaaatatgaagaaaatcgtggaccagaacactaaactggcgcccgaaacaaaggcggttattcattggataatggatatcccttttgtgctgagtgcgaacctgcacgggggagacctcgtggctaactacccatacgacgagactcgtagcggatccgctcacgaatattcctcatctcctgacgacgctatcttccaatcactagctagagcctacagttcgtttaaccctgccatgtcagacccaaataggcccccctgcagaaagaatgacgacgactcaagctttgtagacggcaccaccaacgggggcgcctggtacagcgtccctggaggcatgcaggattttaattatctgtcctctaattgtttcgagattaccgtagaactgagctgtgaaaagttcccccctgaagaaacactgaaaacgtactgggaggacaacaaaaactctctcatatcttacctcgaacagatccatagaggggtgaaagggtttgtaagggaccttcaggggaaccccatcgctaatgcgactatttcagtcgaaggtatcgaccatgatgtaacatctgccaaggacggtgactattggcggctgcttacctggaagctttag

SEQ ID NO: 121817 - DNA, 1431 bp, Artificial Sequence
  derived and/or modified sequence
atggccggccggggcggcagcgccctgctggccctgtgcggcgcccttgccgcatgcggatggttgttgggggccgaagcccaggagccaggagcccctgctgctggtatgagaaggcggcggcgtttacagcaagaggatggaattagttttgaataccaccgatatccagaactacgtgaagctttggtctccgtatggctgcaatgtacggccattagtcgaatatacacagtcggtcggtctttcgaggggcgggagcttttagtgatcgagctgagcgacaatccaggtgtgcacgagcccggggagccagaatttaagtacatcgggaatatgcacggcaatgaggccgtcggtagagagctgctgatttttctggcccagtacctttgcaatgagtatcagaaaggcaatgaaaccattgtcaatctcattcactccacccggatacacatcatgccaagcctgaaccctgacggtttcgaaaaggccgcctctcaaccaggcgaactgaaagattggtttgtggggcggtccaatgcacaagggatcgatctgaatcgcaatttccctgatctggacagaatcgtatatgtgaatgagaaggagggtggaccaaataatcatttactgaaaaatatgaaaaagatcgtcgaccagaacaccaaactggcacccgagactaaagcagtcatacactggatcatggatatccctttcgtgctgagcgccaacctccatggaggcgatctcgtggcaaactacccatacgatgagacgagatctggatccgctcatgagtacagcagctcaccagatgacgccatatttcaaagtctggctcgggcctattcctccttcaaccctgcaatgagcgaccccaataggccgccttgcaggaagaacgacgatgactcaagctttgtcgacgggaccaccaacggcggcgcctggtacagcgtgcctggcggcatgcaggattttaattatttgtcctccaattgctttgagatcacagtggagctctcatgcgagaagtttccccccgaagagaccctgaagacctactgggaggataacaagaatagcctgatcagttatctggaacagatccaccgaggagtcaagggtttcgtacgcgacctccagggcaaccccatagccaacgccaccatcagcgttgaaggcattgaccatgatgtcactagtgccaaggacggtgactattggaggctactgattccaggtaactacaaattgacagctagcgcaccagggtatctggcaataactaaaaaggtagccgtcccttacagcccggccgccggtgtcgactttgaattagagagcttctccgagagaaaggaggaggaaaaagaggagctgatggaatggtggaagatgatgagtgagactttgaatttttag

SEQ ID NO: 121818 - DNA, 1149 bp, Artificial Sequence
  derived and/or modified sequence
atgagaaggcggaggcggctgcagcaagaggacggcatcagcttcgaatatcaccgctatcctgaactcagagaggcccttgtttcagtctggctccagtgcactgcaatatcaaggatttatactgttggacgaagtttcgagggccgagaacttctggtgatagagctttcagacaaccccggagtgcatgagcctggggagccagagtttaagtatattggtaacatgcacgggaatgaagctgtgggccgtgagctccttattttcctggctcaatacctttgtaacgagtatcagaagggcaacgaaactatcgtgaacctgattcactccacgagaatccatataatgccttctctgaaccctgatggtttcgaaaaagctgcgagccagcccggagagcttaaagattggttcgtggggaggtccaacgcacagggaattgacctgaataggaactttccagatttagacagaattgtgtacgttaatgaaaaagaggggggacccaataatcacctgctgaagaatatgaagaagattgtggaccagaacacaaagctggcacctgagactaaagcggtgatccattggataatggacatccctttcgttctttcagccaatctgcacggcggtgatcttgtcgctaattacccttatgacgaaacaagatctggatctgcccacgaatactcctctagcccggatgatgcaatcttccagtcactggcacgggcttattcctccttcaacccggcaatgtcagacccaaaccgaccgccttgccgtaagaacgacgacgattcatctttcgtcgacggcaccacgaatggcggagcatggtacagcgtgcccggaggtatgcaagactttaactaccttagtagcaattgttttgagatcaccgtggagctttcatgcgagaaattccctccagaagaaaccctcaagacctattgggaggacaataagaatagcctgatatcgtacctggaacagattcataggggggtgaaagggttcgtccgcgacttacaaggaaatcctatcgccaatgcaacaatctctgtcgagggaatagatcacgacgtcaccagtgcgaaagatggggattactggcgcctattaacgtggaaactgtag

SEQ ID NO: 121819 - DNA, 1431 bp, Artificial Sequence
  derived and/or modified sequence
atggcaggccgaggaggatccgctctgctggctttgtgtggcgctctcgcagcctgtgggtggctcctcggagctgaagcccaggagccaggagcgcctgccgctggaatgagacgtaggaggcggctacagcaggaggacggtatctccttcgaataccatagataccccgaactgagagaggctttagtgagtgtgtggcttcagtgtacagccattagccgaatctacaccgtgggcaggtctttcgaggggcgtgagctgttggtcatcgaacttagcgacaacccaggcgtgcacgaacctggggagccggaatttaagtacatcgggaatatgcatggcaacgaggccgtcggtagagaactgctgatcttcctcgcgcagtacctgtgcaatgaataccagaaggggaacgaaactatcgtgaacctcattcattccacacgtatccacattatgccgagcctcaatccagacggatttgaaaaagctgcgtcgcagcccggagagttgaaagattggttcgtcggcaggtccaacgctcagggtattgatctgaacaggaatttcccagatctcgatcgaatagtctacgtgaacgagaaggaaggtggaccaaacaatcaccttctgaaaaacatgaagaaaattgtggaccagaacactaaattggccccagagacaaaagccgtgatccattggatcatggacattcccttcgtgcttagcgctaatctgcatggaggagacttagttgccaattacccctacgatgagactcggtccgggtcggcgcatgagtatagttcttcaccagacgacgccatttttcaatctctggccagagcctatagcagtttcaaccctgcgatgagcgacccaaacagacccccatgtcggaagaatgatgacgatagctcttttgtggacggcaccactaatggcggagcatggtattcagtgcctggaggtatgcaggacttcaactatctctcttcgaactgtttcgaaatcactgtggaattgagttgtgaaaagttcccacccgaagagaccctcaagacctattgggaggacaataagaattctttgatttcctatttggagcagattcatcgcggagtcaagggcttcgtgagggatctgcaggggaaccctattgctaatgcgacaatcagtgtggagggtatcgaccacgatgtcacatccgccaaggatggtgattactggcgtctactcattcccggtaattataagcttacggcctctgcccctggatacctcgctattacgaagaaggtggccgtcccatactccccggctgccggagtcgactttgaacttgagtcattctctgaacgcaaggaggaggaaaaagaggagctcatggagtggtggaagatgatgtctgagacattgaacttctag

SEQ ID NO: 121820 - DNA, 2189 bp, Artificial Sequence
  derived and/or modified sequence
agtgcgcgggctgacactcattcagccggggaaggtgaggcgagtagaggctggtgcggaacttgccgcccccagcagcgccggcgggctaagcccagggccgggcagacaaaagaggccgcccgcgtaggaaggcacggccggcggcggcggagcgcagcgatggccgggcatgaggcggcgccggcggctgcagcaagaggacggcatctccttcgagtaccaccgctaccccgagctgcgcgaggcgctcgtgtccgtgtggctgcagtgcaccgccatcagcaggatttacacggtggggcgcagcttcgagggccgggagctcctggtcatcgagctgtccgacaaccctggcgtccatgagcctggtgagcctgaatttaaatacattgggaatatgcatgggaatgaggctgttggacgagaactgctcattttcttggcccagtacctatgcaacgaataccagaaggggaacgagacaattgtcaacctgatccacagtacccgcattcacatcatgccttccctgaacccagatggctttgagaaggcagcgtctcagcctggtgaactcaaggactggtttgtgggtcgaagcaatgcccagggaatagatctgaaccggaactttccagacctggataggatagtgtacgtgaatgagaaagaaggtggtccaaataatcatctgttgaaaaatatgaagaaaattgtggatcaaaacacaaagcttgctcctgagaccaaggctgtcattcattggattatggatattccttttgtgctttctgccaatctccatggaggagaccttgtggccaattatccatatgatgagacgcggagtggtagtgctcacgaatacagctcctccccagatgacgccattttccaaagcttggcccgggcatactcttctttcaacccggccatgtctgaccccaatcggccaccatgtcgcaagaatgatgatgacagcagctttgtagatggaaccaccaacggtggtgcttggtacagcgtacctggagggatgcaagacttcaattaccttagcagcaactgttttgagatcaccgtggagcttagctgtgagaagttcccacctgaagagactctgaagacctactgggaggataacaaaaactccctcattagctaccttgagcagatacaccgaggagttaaaggatttgtccgagaccttcaaggtaacccaattgcgaatgccaccatctccgtggaaggaatagaccacgatgttacatccgcaaaggatggtgattactggagattgcttacctggaaactataaacttacagcctcagctccaggctatctggcaataacaaagaaagtggcagttccttacagccctgctgctggggttgattttgaactggagtcattttctgaaaggaaagaagaggagaaggaagaattgatggaatggtggaaaatgatgtcagaaactttaaatttttaaaaaggcttctagttagctgctttaaatctatctatataatgtagtatgatgtaatgtggtcttttttttagattttgtgcagttaatacttaacattgatttattttttaatcatttaaatattaatcaactttccttaaaataaatagcctcttaggtaaaaatataagaacttgatatatttcattctcttatatagtattcattttcctacctatattacacaaaaaagtatagaaaagatttaagtaattttgccatcctaggcttaaatgcaatattcctggtattatttacaatgcagaattttttgagtaattctagctttcaaaaattagtgaagttcttttactgtaattggtgacaatgtcacataatgaatgctattgaaaaggttaacagatacagctcggagttgtgagcactctactgcaagacttaaatagttcagtataaattgtcgtttttttcttgtgctgactaactataagcatgatcttgttaatgcatttttgatgggaagaaaaggtacatgtttacaaagaggttttatgaaaagaataaaaattgacttcttgcttgtacatataggagcaatactattatattatgtagtccgttaacactacttaaaagtttagggttttctcttggttgtagagtggcccagaattgcattctgaatgaataaaggtt

SEQ ID NO: 121821 - DNA, 2421 bp, Artificial Sequence
  derived and/or modified sequence
gcccgtctctccgccggccccctcctcgcagtggtttctcctgcagctcccctgggctccgcggccagtagtgcagcccgtggagccgcggctttgcccgtctcctctgggtggccccagtgcgcgggctgacactcattcagccggggaaggtgaggcgagtagaggctggtgcggaacttgccgcccccagcagcgccggcgggctaagcccagggccgggcagacaaaagaggccgcccgcgtaggaaggcacggccggcggcggcggagcgcagcgatggccgggcgagggggcagcgcgctgctggctctgtgcggggcactggctgcctgcgggtggctcctgggcgccgaagcccaggagcccggggcgcccgcggcgggcatgaggcggcgccggcggctgcagcaagaggacggcatctccttcgagtaccaccgctaccccgagctgcgcgaggcgctcgtgtccgtgtggctgcagtgcaccgccatcagcaggatttacacggtggggcgcagcttcgagggccgggagctcctggtcatcgagctgtccgacaaccctggcgtccatgagcctggtgagcctgaatttaaatacattgggaatatgcatgggaatgaggctgttggacgagaactgctcattttcttggcccagtacctatgcaacgaataccagaaggggaacgagacaattgtcaacctgatccacagtacccgcattcacatcatgccttccctgaacccagatggctttgagaaggcagcgtctcagcctggtgaactcaaggactggtttgtgggtcgaagcaatgcccagggaatagatctgaaccggaactttccagacctggataggatagtgtacgtgaatgagaaagaaggtggtccaaataatcatctgttgaaaaatatgaagaaaattgtggatcaaaacacaaagcttgctcctgagaccaaggctgtcattcattggattatggatattccttttgtgctttctgccaatctccatggaggagaccttgtggccaattatccatatgatgagacgcggagtggtagtgctcacgaatacagctcctccccagatgacgccattttccaaagcttggcccgggcatactcttctttcaacccggccatgtctgaccccaatcggccaccatgtcgcaagaatgatgatgacagcagctttgtagatggaaccaccaacggtggtgcttggtacagcgtacctggagggatgcaagacttcaattaccttagcagcaactgttttgagatcaccgtggagcttagctgtgagaagttcccacctgaagagactctgaagacctactgggaggataacaaaaactccctcattagctaccttgagcagatacaccgaggagttaaaggatttgtccgagaccttcaaggtaacccaattgcgaatgccaccatctccgtggaaggaatagaccacgatgttacatccgcaaaggatggtgattactggagattgcttatacctggaaactataaacttacagcctcagctccaggctatctggcaataacaaagaaagtggcagttccttacagccctgctgctggggttgattttgaactggagtcattttctgaaaggaaagaagaggagaaggaagaattgatggaatggtggaaaatgatgtcagaaactttaaatttttaaaaaggcttctagttagctgctttaaatctatctatataatgtagtatgatgtaatgtggtcttttttttagattttgtgcagttaatacttaacattgatttattttttaatcatttaaatattaatcaactttccttaaaataaatagcctcttaggtaaaaatataagaacttgatatatttcattctcttatatagtattcattttcctacctatattacacaaaaaagtatagaaaagatttaagtaattttgccatcctaggcttaaatgcaatattcctggtattatttacaatgcagaattttttgagtaattctagctttcaaaaattagtgaagttcttttactgtaattggtgacaatgtcacataatgaatgctattgaaaaggttaacagatacagctcggagttgtgagcactctactgcaagacttaaatagttcagtataaattgtcgtttttttcttgtgctgactaactataagcatgatcttgttaatgcatttttgatgggaagaaaaggtacatgtttacaaagaggttttatgaaaagaataaaaattgacttcttgcttgtacatataggagcaatactattatattatgtagtccgttaacactacttaaaagtttagggttttctcttggttgtagagtggcccagaattgcattctgaatgaataaaggttaaaaaaaaatcccc

SEQ ID NO: 121822 - DNA, 1149 bp, Artificial Sequence
  derived and/or modified sequence
atgagaagaagaagaagactgcagcaggaggacggcatcagcttcgagtaccacagataccccgagctgagagaggccctggtgagcgtgtggctgcagtgcaccgccatcagcagaatctacaccgtgggcagaagcttcgagggcagagagctgctggtgatcgagctgagcgacaaccccggcgtgcacgagcccggcgagcccgagttcaagtacatcggcaacatgcacggcaacgaggccgtgggcagagagctgctgatcttcctggcccagtacctgtgcaacgagtaccagaagggcaacgagaccatcgtgaacctgatccacagcaccagaatccacatcatgcccagcctgaaccccgacggcttcgagaaggccgccagccagcccggcgagctgaaggactggttcgtgggcagaagcaacgcccagggcatcgacctgaacagaaacttccccgacctggacagaatcgtgtacgtgaacgagaaggagggcggccccaacaaccacctgctgaagaacatgaagaagatcgtggaccagaacaccaagctggcccccgagaccaaggccgtgatccactggatcatggacatccccttcgtgctgagcgccaacctgcacggcggcgacctggtggccaactacccctacgacgagaccagaagcggcagcgcccacgagtacagcagcagccccgacgacgccatcttccagagcctggccagagcctacagcagcttcaaccccgccatgagcgaccccaacagacccccctgcagaaagaacgacgacgacagcagcttcgtggacggcaccaccaacggcggcgcctggtacagcgtgcccggcggcatgcaggacttcaactacctgagcagcaactgcttcgagatcaccgtggagctgagctgcgagaagttcccccccgaggagaccctgaagacctactgggaggacaacaagaacagcctgatcagctacctggagcagatccacagaggcgtgaagggcttcgtgagagacctgcagggcaaccccatcgccaacgccaccatcagcgtggagggcatcgaccacgacgtgaccagcgccaaggacggcgactactggagactgctgacctggaagctgtag

SEQ ID NO: 121823 - DNA, 1431 bp, Artificial Sequence
  derived and/or modified sequence
atggccggcagaggcggcagcgccctgctggccctgtgcggcgccctggccgcctgcggctggctgctgggcgccgaggcccaggagcccggcgcccccgccgccggcatgagaagaagaagaagactgcagcaggaggacggcatcagcttcgagtaccacagataccccgagctgagagaggccctggtgagcgtgtggctgcagtgcaccgccatcagcagaatctacaccgtgggcagaagcttcgagggcagagagctgctggtgatcgagctgagcgacaaccccggcgtgcacgagcccggcgagcccgagttcaagtacatcggcaacatgcacggcaacgaggccgtgggcagagagctgctgatcttcctggcccagtacctgtgcaacgagtaccagaagggcaacgagaccatcgtgaacctgatccacagcaccagaatccacatcatgcccagcctgaaccccgacggcttcgagaaggccgccagccagcccggcgagctgaaggactggttcgtgggcagaagcaacgcccagggcatcgacctgaacagaaacttccccgacctggacagaatcgtgtacgtgaacgagaaggagggcggccccaacaaccacctgctgaagaacatgaagaagatcgtggaccagaacaccaagctggcccccgagaccaaggccgtgatccactggatcatggacatccccttcgtgctgagcgccaacctgcacggcggcgacctggtggccaactacccctacgacgagaccagaagcggcagcgcccacgagtacagcagcagccccgacgacgccatcttccagagcctggccagagcctacagcagcttcaaccccgccatgagcgaccccaacagacccccctgcagaaagaacgacgacgacagcagcttcgtggacggcaccaccaacggcggcgcctggtacagcgtgcccggcggcatgcaggacttcaactacctgagcagcaactgcttcgagatcaccgtggagctgagctgcgagaagttcccccccgaggagaccctgaagacctactgggaggacaacaagaacagcctgatcagctacctggagcagatccacagaggcgtgaagggcttcgtgagagacctgcagggcaaccccatcgccaacgccaccatcagcgtggagggcatcgaccacgacgtgaccagcgccaaggacggcgactactggagactgctgatccccggcaactacaagctgaccgccagcgcccccggctacctggccatcaccaagaaggtggccgtgccctacagccccgccgccggcgtggacttcgagctggagagcttcagcgagagaaaggaggaggagaaggaggagctgatggagtggtggaagatgatgagcgagaccctgaacttctag

SEQ ID NO: 121824 - DNA, 213 bp, Artificial Sequence
  derived and/or modified sequence
atgaccagaatcctgaccgccttcaaggtggtgagaaccctgaagaccggcttcggcttcaccaacgtgaccgcccaccagaagtggaagttcagcagacccggcatcagactgctgagcgtgaaggcccagaccgcccacatcgtgctggaggacagagacgccgacacccccgcccccctgctgaaccagcccgagccccacgtgatctag

SEQ ID NO: 121825 - DNA, 213 bp, Artificial Sequence
  derived and/or modified sequence
atgacgcggattcttaccgcctttaaagtggtgagaaccctgaagaccggctttggatttacaaatgttaccgcccaccagaagtggaagttttcacggcctggtattagactgctctcagtgaaggcgcaaaccgcacacatcgtgctagaagacagggatgcagacactcctgcgccgctgctgaatcagcccgaaccccatgtgatctag

SEQ ID NO: 121826 - DNA, 213 bp, Artificial Sequence
  derived and/or modified sequence
atgacccgcatcctgacagccttcaaggtggtgaggaccctgaagacaggcttcggcttcaccaacgtgacagcccaccagaagtggaagttcagccggcccggcatccggctgctgtctgtgaaggcccagacagcccacatcgtgctggaggacagagatgctgacaccccagcccccctgctgaaccagcctgagccccacgtgatctag

SEQ ID NO: 121827 - DNA, 213 bp, Artificial Sequence
  derived and/or modified sequence
atgacccggatcctgaccgccttcaaggtggtgcggaccctgaagactggatttggtttcacaaacgtgacagcccaccagaagtggaagttctcaagaccgggcatccggctgctgagcgtgaaggcgcagaccgcacatattgtgctggaggatcgggatgctgatacccccgcacctctcttaaaccagccagaacctcacgttatttag

SEQ ID NO: 121828 - DNA, 213 bp, Artificial Sequence
  derived and/or modified sequence
atgactcgcatcctaacggcttttaaggtggttcgcacccttaagactgggtttgggttcaccaatgttacagcacaccagaaatggaagtttagtcgtccagggattcgtctgctcagcgtcaaagcacaaaccgcacacatcgtgctcgaagatcgtgacgcagacacacctgcgcctttattgaaccagcccgagcctcatgtgatttag

SEQ ID NO: 121829 - protein, 1033 aa, Artificial Sequence
  derived and/or modified sequence
MGAAGLLGVFLALVAPGVLGISCGSPPPILNGRISYYSTPIAVGTVIRYSCSGTFRLIGEKSLLCITKDKVDGTWDKPAPKCEYFNKYSSCPEPIVPGGYKIRGSTPYRHGDSVTFACKTNFSMNGNKSVWCQANNMWGPTRLPTCVSVFPLECPALPMIHNGHHTSENVGSIAPGLSVTYSCESGYLLVGEKIINCLSSGKWSAVPPTCEEARCKSLGRFPNGKVKEPPILRVGVTANFFCDEGYRLQGPPSSRCVIAGQGVAWTKMPVCEEIFCPSPPPILNGRHIGNSLANVSYGSIVTYTCDPDPEEGVNFILIGESTLRCTVDSQKTGTWSGPAPRCELSTSAVQCPHPQILRGRMVSGQKDRYTYNDTVIFACMFGFTLKGSKQIRCNAQGTWEPSAPVCEKECQAPPNILNGQKEDRHMVRFDPGTSIKYSCNPGYVLVGEESIQCTSEGVWTPPVPQCKVAACEATGRQLLTKPQHQFVRPDVNSSCGEGYKLSGSVYQECQGTIPWFMEIRLCKEITCPPPPVIYNGAHTGSSLEDFPYGTTVTYTCNPGPERGVEFSLIGESTIRCTSNDQERGTWSGPAPLCKLSLLAVQCSHVHIANGYKISGKEAPYFYNDTVTFKCYSGFTLKGSSQIRCKADNTWDPEIPVCEKETCQHVRQSLQELPAGSRVELVNTSCQDGYQLTGHAYQMCQDAENGIWFKKIPLCKVIHCHPPPVIVNGKHTGMMAENFLYGNEVSYECDQGFYLLGEKKLQCRSDSKGHGSWSGPSPQCLRSPPVTRCPNPEVKHGYKLNKTHSAYSHNDIVYVDCNPGFIMNGSRVIRCHTDNTWVPGVPTCIKKAFIGCPPPPKTPNGNHTGGNIARFSPGMSILYSCDQGYLLVGEALLLCTHEGTWSQPAPHCKEVNCSSPADMDGIQKGLEPRKMYQYGAVVTLECEDGYMLEGSPQSQCQSDHQWNPPLAVCRSRSLAPVLCGIAAGLILLTFLIVITLYVISKHRARNYYTDTSQKEAFHLEAREVYSVDPYNPAS

SEQ ID NO: 121830 - protein, 971 aa, Artificial Sequence
  derived and/or modified sequence
MGAAGLLGVFLALVAPGVLGISCGSPPPILNGRISYYSTPIAVGTVIRYSCSGTFRLIGEKSLLCITKDKVDGTWDKPAPKCEYFNKYSSCPEPIVPGGYKIRGSTPYRHGDSVTFACKTNFSMNGNKSVWCQANNMWGPTRLPTCVSVFPLECPALPMIHNGHHTSENVGSIAPGLSVTYSCESGYLLVGEKIINCLSSGKWSAVPPTCEEARCKSLGRFPNGKVKEPPILRVGVTANFFCDEGYRLQGPPSSRCVIAGQGVAWTKMPVCEEIFCPSPPPILNGRHIGNSLANVSYGSIVTYTCDPDPEEGVNFILIGESTLRCTVDSQKTGTWSGPAPRCELSTSAVQCPHPQILRGRMVSGQKDRYTYNDTVIFACMFGFTLKGSKQIRCNAQGTWEPSAPVCEKECQAPPNILNGQKEDRHMVRFDPGTSIKYSCNPGYVLVGEESIQCTSEGVWTPPVPQCKVAACEATGRQLLTKPQHQFVRPDVNSSCGEGYKLSGSVYQECQGTIPWFMEIRLCKEITCPPPPVIYNGAHTGSSLEDFPYGTTVTYTCNPGPERGVEFSLIGESTIRCTSNDQERGTWSGPAPLCKLSLLAVQCSHVHIANGYKISGKEAPYFYNDTVTFKCYSGFTLKGSSQIRCKADNTWDPEIPVCEKETCQHVRQSLQELPAGSRVELVNTSCQDGYQLTGHAYQMCQDAENGIWFKKIPLCKVIHCHPPPVIVNGKHTGMMAENFLYGNEVSYECDQGFYLLGEKKLQCRSDSKGHGSWSGPSPQCLRSPPVTRCPNPEVKHGYKLNKTHSAYSHNDIVYVDCNPGFIMNGSRVIRCHTDNTWVPGVPTCIKKEVNCSSPADMDGIQKGLEPRKMYQYGAVVTLECEDGYMLEGSPQSQCQSDHQWNPPLAVCRSRSLAPVLCGIAAGLILLTFLIVITLYVISKHRARNYYTDTSQKEAFHLEAREVYSVDPYNPAS

SEQ ID NO: 121831 - protein, 1006 aa, Artificial Sequence
  derived and/or modified sequence
MGAAGLLGVFLALVAPGVLGISCGSPPPILNGRISYYSTPIAVGTVIRYSCSGTFRLIGEKSLLCITKDKVDGTWDKPAPKCEYFNKYSSCPEPIVPGGYKIRGSTPYRHGDSVTFACKTNFSMNGNKSVWCQANNMWGPTRLPTCVSVFPLECPALPMIHNGHHTSENVGSIAPGLSVTYSCESGYLLVGEKIINCLSSGKWSAVPPTCEEARCKSLGRFPNGKVKEPPILRVGVTANFFCDEGYRLQGPPSSRCVIAGQGVAWTKMPVCEEIFCPSPPPILNGRHIGNSLANVSYGSIVTYTCDPDPEEGVNFILIGESTLRCTVDSQKTGTWSGPAPRCELSTSAVQCPHPQILRGRMVSGQKDRYTYNDTVIFACMFGFTLKGSKQIRCNAQGTWEPSAPVCEKECQAPPNILNGQKEDRHMVRFDPGTSIKYSCNPGYVLVGEESIQCTSEGVWTPPVPQCKVAACEATGRQLLTKPQHQFVRPDVNSSCGEGNHLPTTPCYLQWGTHREFLRRFSIWNHGHLHMPGPERGVEFSLIGESTIRCTSNDQERGTWSGPAPLCKLSLLAVQCSHVHIANGYKISGKEAPYFYNDTVTFKCYSGFTLKGSSQIRCKADNTWDPEIPVCEKETCQHVRQSLQELPAGSRVELVNTSCQDGYQLTGHAYQMCQDAENGIWFKKIPLCKVIHCHPPPVIVNGKHTGMMAENFLYGNEVSYECDQGFYLLGEKKLQCRSDSKGHGSWSGPSPQCLRSPPVTRCPNPEVKHGYKLNKTHSAYSHNDIVYVDCNPGFIMNGSRVIRCHTDNTWVPGVPTCIKKAFIGCPPPPKTPNGNHTGGNIARFSPGMSILYSCDQGYLLVGEALLLCTHEGTWSQPAPHCKEVNCSSPADMDGIQKGLEPRKMYQYGAVVTLECEDGYMLEGSPQSQCQSDHQWNPPLAVCRSRSLAPVLCGIAAGLILLTFLIVITLYVISKHRARNYYTDTSQKEAFHLEAREVYSVDPYNPAS

SEQ ID NO: 121832 - DNA, 3102 bp, Artificial Sequence
  derived and/or modified sequence
atgggcgctgcggggctcctgggcgtctttctggcccttgtggccccgggtgttctaggaattagttgtggcagtcctccacctatcctcaatggccgcattagttactattcaactcctattgcagtgggtacagtgatccgctatagctgtagtggaaccttcagactgatcggagagaagtccctgctttgtattacgaaggataaggtggatgggacatgggataagcccgctccaaaatgtgagtactttaacaagtattcctcttgtcctgaacctatcgtgccgggagggtataaaattcgcggttccaccccctatagacatggggattccgtgacctttgcttgcaagacaaacttcagcatgaatgggaacaagtcagtctggtgtcaggccaataacatgtggggaccaacccgcctccccacgtgcgtgagcgtctttcctctggagtgtcccgctcttccaatgattcacaatgggcaccatacttccgagaacgtaggcagtatcgcccctggcctctctgttacttatagctgcgagagcgggtatcttttggttggcgagaagattattaactgtctgtctagcgggaagtggtcagccgttccccctacttgcgaagaagcccgctgcaaatctctcggccggtttccaaatggcaaagtgaaggagccccctattctgcgcgtgggcgtgacagctaactttttctgcgacgagggatacagactgcaggggccaccatccagccgatgcgtgatagcaggacaaggcgtcgcctggacgaaaatgcctgtgtgtgaagagattttctgcccatcccctccgcctattcttaacggccgacacatcggaaacagcctggccaatgtttcctacggtagtatagtgacctacacgtgtgaccccgacccggaggaaggggtaaattttattttgatcggggagtccaccctgcggtgcacagtcgactcacagaaaacaggaacttggtcaggccccgcaccaaggtgcgaacttagcacgagcgcagtccaatgccctcatccccagatactgcgtggtagaatggtgtctggccagaaggacagatacacctacaacgatactgttatctttgcgtgcatgtttggatttacgcttaaggggtccaagcaaatcaggtgcaatgcccaggggacctgggagcctagtgcccccgtttgcgagaaagagtgtcaggcaccgccaaacatcttgaatggccagaaggaggacaggcatatggtcaggtttgatcccggcacttccattaagtactcttgcaatcccggttacgtgcttgtaggggaagagtcaatccaatgtacaagtgagggcgtctggactcccccagtgccccagtgcaaagtggctgcctgtgaagcaactgggcggcagctcttgaccaaaccccagcaccagttcgtaaggccagatgtgaactcctcctgtggcgaagggtacaaactctctggcagcgtgtaccaggaatgccagggcaccataccatggttcatggaaatcaggttgtgcaaggagattacatgtcccccgccacctgtgatctacaatggcgcccacacaggttctagcctggaggacttcccttacggcaccactgtcacctacacatgtaaccccggccccgaaaggggcgtggaattttctctgatcggggagtccacgattaggtgtacctcaaatgaccaagagcgtggcacatggtctggtcccgcacctctgtgcaaattgagtttgctggcagtacagtgttcgcacgtgcatatagcaaacggatacaaaatttccggcaaggaggcaccatacttctacaacgacactgtcacattcaaatgttactccggctttacattgaagggaagctcacagatccgttgtaaggcggacaacacttgggaccccgaaattcctgtgtgcgaaaaagagacatgccaacacgtgcggcagtccctgcaggaacttcccgcaggcagccgggtggagctggtcaataccagctgtcaggatggctaccagctgacaggccatgcttatcagatgtgtcaagatgctgaaaatggtatctggtttaaaaaaatcccactgtgcaaggtcatacactgtcaccctccgcccgtgatcgtgaacgggaaacacaccgggatgatggccgaaaactttctgtacgggaatgaagtgagctatgagtgtgatcagggcttttatctgttaggagagaaaaaactccagtgtcgcagcgacagcaagggccacggcagttggagtggcccaagtccacagtgtctgcggtcgcctcctgttacccgttgtccaaatcccgaggttaaacatggatataagctgaacaaaactcactccgcatacagtcacaatgatattgtgtatgtcgactgtaatcccgggtttatcatgaatggcagtagagttatcagatgtcacacagacaacacatgggttcccggtgtcccgacatgcattaaaaaagccttcatcggttgtcccccccccccaaagaccccaaatgggaatcatacaggaggaaatattgcacgattttccccaggcatgagcatcttgtactcatgcgaccagggttacctgctggtaggggaagcgttgctgctgtgcacccatgagggaacatggtcccaaccggcacctcactgcaaagaagtgaactgttcgagcccggcagatatggatgggatccagaaaggtctggagccacggaagatgtatcagtacggcgccgtagtcactctggagtgcgaggatgggtacatgctcgagggctctcctcagtcccagtgccaatctgaccaccagtggaaccctccgttggcagtatgcaggtcaaggtcactggcccccgtgctgtgcggaatcgctgctgggctgattctgctgacatttctgattgtgatcaccctctatgtcatctcaaagcacagagcaagaaactactataccgacacatcgcagaaagaggctttccatttggaagctagagaggtgtattcagtcgacccctataatcctgcttcatag

SEQ ID NO: 121833 - DNA, 2916 bp, Artificial Sequence
  derived and/or modified sequence
atgggcgcagctggccttctaggagtgtttctagctctggtcgctccaggagtactcggtatctcctgcggaagtccgcctccgattttgaatggtaggatctcttattactccactcccattgcggttggaactgtgattaggtattcgtgttccggcacttttcgcttgatcggagaaaaatccttactgtgtataaccaaggataaggtggatggcacctgggacaaaccagcacccaagtgcgagtattttaacaagtactccagctgtcccgagccgatcgtgcctggaggctataaaattcgggggtccacgccgtacaggcatggcgattctgtgacatttgcttgcaagacaaacttctctatgaatggaaacaagagcgtgtggtgtcaggccaacaatatgtgggggccaacccggttgcccacgtgtgtctctgtgttccccctggaatgtccagcgctccctatgatccacaatggacatcacacatctgaaaacgttggttctattgccccagggctgagtgtcacctacagctgtgaaagcgggtacctcctggtcggcgagaaaatcatcaattgtctgtccagcggaaaatggtctgccgtccctcccacctgcgaggaggccaggtgcaagtctctgggtcggtttcccaatggcaaggtgaaggaaccgcccattctcagggtgggggttacagctaactttttctgcgatgaaggctatcgtctccaggggccaccaagctcccgttgtgttattgctgggcagggggtggcctggaccaagatgccggtgtgcgaggaaatattctgcccgtcccctcctccaatattgaatggacgccatatcggcaactcactcgctaatgtctcctacggatcaatcgtcacttatacgtgtgatccggatcctgaggagggagtgaattttattctgattggcgagagtactctgcgctgcaccgtggatagccagaagacgggcacctggtctggaccggctcctcggtgcgagctgtccacctcagctgtgcagtgccctcacccccaaatcttaagagggcgaatggtttcgggtcagaaagataggtatacatacaacgacaccgttatctttgcctgtatgttcgggttcacactgaagggaagcaaacagattaggtgcaacgctcaggggacatgggagccatcagcacccgtctgtgagaaggaatgtcaggcacctccaaacatcctgaacgggcagaaggaagatcgtcatatggtgcgatttgaccctgggacttctatcaagtatagctgtaaccctgggtatgtcttggttggggaagaatcaatacagtgtaccagcgagggagtgtggactcccccagtccctcaatgtaaggtggcagcgtgtgaggctacaggaagacagcttttgactaagccccaacaccagtttgtgaggccagatgtgaatagcagctgtggtgaagggtacaagctctctgggtccgtctaccaggagtgccaggggaccatcccctggtttatggaaattcggctctgtaaagaaatcacatgtcctcctcctcctgtgatttataatggagctcataccgggagttcactggaggactttccttatggtaccactgtgacctatacttgtaaccctggcccagagcggggagtagagttcagccttatcggcgagtctactatccgctgtacctctaatgaccaggagcgcgggacttggtctggaccagctcctctgtgtaaactgagcctgctggctgtgcagtgcagtcacgtgcacatagctaacggttacaaaatttccggaaaagaggcgccatacttctataacgacactgttaccttcaagtgttattcagggttcacactgaagggatcctcccagatacgctgcaaggccgacaatacttgggacccagaaatccctgtttgcgagaaggaaacctgccagcacgtgagacagagcctgcaggaactgccggccggcagtcgggtggagttagtgaacactagctgtcaggacggatatcagctgaccggccacgcctaccagatgtgccaggacgccgagaacggaatctggtttaaaaaaataccactctgtaaagtaatacactgccatcctcccccagtgatcgtgaatggcaagcatacgggtatgatggctgagaatttcctatacgggaatgaggttagctatgagtgtgaccagggattctacctgttaggcgagaaaaagctacagtgtcgctccgactctaaggggcatggctcctggagcggaccttcaccgcagtgtttgagatctcctcctgtgacgagatgtccaaaccccgaagtcaaacacggctacaagcttaacaagacccatagcgcatacagccacaacgatattgtgtacgtagactgtaaccccggctttatcatgaatgggagcagggtcataaggtgtcatacagataacacctgggtgcctggcgtgcccacatgtattaaaaaggaggttaactgcagttccccagccgatatggatggcatacagaagggtcttgagcccaggaaaatgtaccagtatggtgcagtggtgacacttgagtgcgaggatggatacatgctggagggatctccccaatcacagtgccagtccgatcaccaatggaaccctcctttggccgtctgtaggtcgcggtcactggcccctgtcctgtgcggtatcgccgctggcctaatcctgctgactttcctgatagtgatcaccctctacgtgatctctaagcacagagctcgtaattactatacggatacatcacagaaggaggccttccacttggaggcacgggaagtgtacagtgtcgacccttataaccctgcgtcctag

SEQ ID NO: 121834 - DNA, 3021 bp, Artificial Sequence
  derived and/or modified sequence
atgggagccgctggactgctgggggtttttctggctctggtcgcccccggcgtccttgggataagttgcggatcgcccccacccattttaaatgggcggatcagctactactccacccccattgctgtcgggaccgtaatcaggtatagttgtagcggaacgtttcgattgatcggagagaagagtctcctctgtattacgaaagataaagtcgatggcacatgggacaagcccgcgccaaagtgtgagtattttaacaagtactcgagttgtcccgagcctattgttcccggcggttataagatcagaggttcaacaccctaccggcacggcgactccgtaacctttgcgtgtaaaactaatttttccatgaatgggaataagtccgtgtggtgtcaggccaataacatgtggggacctaccagactgcccacctgcgttagtgtcttccccctggaatgcccggctctcccaatgatccacaacggacaccatacctcagagaacgtgggatccattgctcccgggctgagtgttacttattcctgtgaaagcggatatctacttgtcggcgagaaaatcataaattgtctctcaagtggcaagtggtccgctgtaccccccacttgcgaagaagcccggtgtaaatctctcgggcggttcccaaatggaaaagttaaggaacctccaattctccgggtcggagtgaccgccaacttcttctgcgatgaaggctatagactgcaggggccaccaagtagccgctgcgttattgccggtcagggcgtggcctggaccaagatgcccgtgtgcgaggagattttttgtccctcacctccccctatcctcaatggacgccacatcggaaatagccttgccaatgttagctacggctccatcgtcacctatacttgcgatcccgatccagaagagggcgtcaatttcatactgattggcgaatcgaccctgcgctgcactgtggactcccagaaaacaggtacatggagcggccctgctccacggtgtgagctgtcaacctctgccgtacagtgtccccatccccaaatcctcagaggaagaatggttagtgggcagaaagatagatatacatacaacgacaccgtcatcttcgcctgtatgtttggatttacactgaaggggtctaagcaaattcggtgtaatgcacagggtacgtgggagcctagtgccccggtctgcgagaaggagtgtcaggctccccctaacatcttaaatggccagaaagaggaccgacatatggtaaggttcgaccccggcacttcgatcaaatattcctgtaatcccggatacgttcttgtgggcgaagagagcattcagtgcacgtcagaaggagtctggacgcctccagtccctcagtgcaaagtggccgcttgtgaggcaactggtagacagcttctgactaagccccaacatcaattcgtaagacccgatgtgaatagctcgtgcggagagggcaatcacctcccaacgaccccctgctatctccagtggggaacacatagagagtttttgaggagattctccatctggaaccacggacatctgcacatgccaggccctgagaggggagtcgagttctctcttatcggcgagtccactatcaggtgcacatcaaatgaccaggagcggggaacctggagtggacccgctcccctgtgcaaactcagtctgcttgcagtccagtgtagtcacgtgcatatcgccaatggctataagatcagcggaaaagaagctccatatttctacaatgacaccgtaactttcaagtgttatagtggctttaccctgaaagggagcagtcagatccggtgcaaggcagataatacttgggatccagaaattccagtctgtgaaaaggaaacctgccagcacgtgcgacagtcgctccaggaattacccgctggatcaagagtagagcttgttaatacttcctgccaggacggatatcagttgacagggcatgcctatcagatgtgtcaagacgctgagaacggtatctggtttaagaagatccctctgtgcaaagttattcattgtcacccaccccctgtgattgttaatgggaaacataccggcatgatggctgagaactttctctacggaaacgaggtatcctatgaatgtgatcaggggttctacctgctcggggagaagaagctgcagtgcaggtcagactccaagggacacggctcatggagcggcccatcaccacagtgtttgcggtcaccccccgttactcgatgtccaaatcccgaagtcaagcatggttacaagcttaacaaaacgcattcagcatatagccacaacgatattgtgtatgtggattgcaatcccgggtttattatgaacgggtctcgtgtcatccgttgccacacggataacacatgggtgccaggggttcctacgtgcatcaagaaagcgtttatcggctgccccccaccaccgaagacacctaatggaaaccacactggtggaaacatcgcacgctttagcccaggcatgtcgatactgtattcctgcgaccaaggttaccttctcgtgggagaggccctactgctgtgcacccacgagggcacttggtctcagcccgccccgcattgtaaggaggtaaactgttcctctcccgcagacatggatggaatccaaaagggactggagcccaggaaaatgtaccaatatggcgctgttgtcactctggagtgcgaggacggctacatgttagagggttccccacagtcacagtgtcagtcagaccatcagtggaacccccccctggccgtgtgtcgtagccgtagcctcgcccccgtgttgtgcgggatagccgctggcttgattctcctgaccttccttatagtgatcacgctgtacgtgatcagcaagcatcgagccaggaattactacacggacacatcacaaaaggaggcattccacctggaagctagagaggtttattccgttgatccctacaaccctgcttcctag

SEQ ID NO: 121835 - DNA, 3102 bp, Artificial Sequence
  derived and/or modified sequence
atgggcgccgccggcctgctgggcgtcttcctggccctggtggcccctggggtgctgggcatcagctgtggcagccccccacccatcctgaatggccgcatctcctactacagcacccccatcgctgtgggcaccgtcatccgctacagctgcagcggcaccttccgcctcatcggggagaagagcctgctgtgcatcaccaaggacaaggtggatggcacctgggacaagccagcccccaagtgtgagtacttcaacaagtacagcagctgcccagagcccatcgtgcctgggggctacaagatccggggcagcaccccctaccgccacggggacagcgtgacctttgcctgcaagaccaacttctccatgaatggaaacaagtctgtgtggtgccaggccaacaacatgtggggccccacccggctgcccacctgtgtgtctgtgttccccctggagtgcccagccctgcccatgatccacaacggccaccacaccagtgaaaatgtgggcagcatcgcccctggcctgtctgtgacctacagctgtgagagcggctacctgctggtgggggagaagatcatcaactgcctgagcagcggcaagtggagcgctgtgccccccacctgtgaggaggcccgctgcaagagcctgggccgcttccccaacgggaaggtgaaggagccccccatcctgcgggtgggcgtgacagccaacttcttctgtgatgagggctaccgcctgcagggcccccccagcagccgctgtgtgattgctggccagggcgtggcctggaccaagatgcctgtgtgtgaggagatcttctgccccagccccccacccatcctgaatggccgccacatcggcaacagcctggccaacgtgtcctatggcagcatcgtgacctacacctgtgaccctgaccctgaggagggcgtgaacttcatcctgattggagagagcaccctgcgctgcaccgtggacagccagaagacaggcacctggagcggccctgccccccgctgtgagctgagcaccagcgctgtgcagtgcccccacccccagatcctgcggggccgcatggtgtctggccagaaggaccgctacacctacaatgacaccgtcatctttgcctgcatgtttggcttcaccctgaagggcagcaagcagatccgctgcaatgcccagggcacctgggagcccagcgcccctgtgtgtgagaaggagtgccaggccccacccaacatcctgaatggccagaaggaggacagacacatggtgcgctttgatcctggcaccagcatcaagtacagctgcaaccctggctacgtgctggtgggggaggagagcatccagtgcaccagcgagggcgtgtggaccccacctgtgccccagtgcaaggtggccgcctgtgaggccaccggccggcagctgctgaccaagccccagcaccagtttgtgcggccagatgtgaacagcagctgtggggagggctacaagctgagcggctctgtgtaccaggagtgccagggcaccatcccctggttcatggagatccggctgtgcaaggagatcacctgccccccacctcctgtgatctacaatggagcccacacaggcagcagcctggaggacttcccctacggcaccaccgtgacctacacctgcaaccctggccctgagcggggcgtggagttcagcctgattggagagagcaccatccgctgcaccagcaatgaccaggagcggggcacctggagcggccctgcccccctgtgcaagctgagcctgctggccgtgcagtgcagccacgtgcacatcgccaacggctacaagatcagcggcaaggaggccccctacttctacaatgacacagtgaccttcaagtgctacagcggcttcaccctgaagggcagcagccagatccgctgcaaggctgacaacacctgggaccctgagatccctgtgtgtgagaaggagacctgccagcacgtgcggcagagcctgcaggagctgcctgctggcagccgggtggagctggtgaacaccagctgccaggacggctaccagctgaccggccacgcctaccagatgtgccaggatgctgaaaatggcatctggttcaagaagatccccctgtgcaaggtgatccactgccaccccccacctgtgattgtgaatggcaagcacacaggcatgatggccgagaacttcctgtatggaaatgaggtgtcctatgaatgtgaccagggcttctacctgctgggggagaagaagctgcagtgccgcagtgacagcaaaggacatggctcctggagcggccccagcccccagtgcctgcggagcccccctgtgacccgctgccccaaccctgaggtgaagcacggctacaagctgaacaagacccacagcgcctacagccacaatgacatcgtgtatgtggactgcaaccctggcttcatcatgaatggcagcagggtcatccgctgccacacagacaacacctgggtgcctggggtgcccacctgcatcaagaaggccttcatcggctgccccccaccacccaagaccccaaatggaaaccacactggaggcaacatcgcccgcttcagccctggcatgagcatcctgtacagctgtgaccagggctacctgctggtgggggaggccctgctgctgtgcacccatgagggcacctggagccagcctgccccccactgcaaggaggtgaactgcagcagccctgctgacatggatggcatccagaagggcctggagcccaggaagatgtaccagtatggagctgtggtgaccctggagtgtgaagatggctacatgctggagggcagcccccagagccagtgccagagcgaccaccagtggaacccccccctggccgtgtgccgcagccgcagcctggcccctgtgctgtgtggcattgctgctggcctcatcctgctgaccttcctgattgtcatcaccctgtatgtgatcagcaagcaccgggccaggaactactacacagacaccagccagaaggaggccttccacctggaggcccgggaggtgtacagcgtggacccctacaacccagccagctag

SEQ ID NO: 121836 - DNA, 2916 bp, Artificial Sequence
  derived and/or modified sequence
atgggcgccgccggcctgctgggcgtcttcctggccctggtggcccctggggtgctgggcatcagctgtggcagccccccacccatcctgaatggccgcatctcctactacagcacccccatcgctgtgggcaccgtcatccgctacagctgcagcggcaccttccgcctcatcggggagaagagcctgctgtgcatcaccaaggacaaggtggatggcacctgggacaagccagcccccaagtgtgagtacttcaacaagtacagcagctgcccagagcccatcgtgcctgggggctacaagatccggggcagcaccccctaccgccacggggacagcgtgacctttgcctgcaagaccaacttctccatgaatggaaacaagtctgtgtggtgccaggccaacaacatgtggggccccacccggctgcccacctgtgtgtctgtgttccccctggagtgcccagccctgcccatgatccacaacggccaccacaccagtgaaaatgtgggcagcatcgcccctggcctgtctgtgacctacagctgtgagagcggctacctgctggtgggggagaagatcatcaactgcctgagcagcggcaagtggagcgctgtgccccccacctgtgaggaggcccgctgcaagagcctgggccgcttccccaacgggaaggtgaaggagccccccatcctgcgggtgggcgtgacagccaacttcttctgtgatgagggctaccgcctgcagggcccccccagcagccgctgtgtgattgctggccagggcgtggcctggaccaagatgcctgtgtgtgaggagatcttctgccccagccccccacccatcctgaatggccgccacatcggcaacagcctggccaacgtgtcctatggcagcatcgtgacctacacctgtgaccctgaccctgaggagggcgtgaacttcatcctgattggagagagcaccctgcgctgcaccgtggacagccagaagacaggcacctggagcggccctgccccccgctgtgagctgagcaccagcgctgtgcagtgcccccacccccagatcctgcggggccgcatggtgtctggccagaaggaccgctacacctacaatgacaccgtcatctttgcctgcatgtttggcttcaccctgaagggcagcaagcagatccgctgcaatgcccagggcacctgggagcccagcgcccctgtgtgtgagaaggagtgccaggccccacccaacatcctgaatggccagaaggaggacagacacatggtgcgctttgatcctggcaccagcatcaagtacagctgcaaccctggctacgtgctggtgggggaggagagcatccagtgcaccagcgagggcgtgtggaccccacctgtgccccagtgcaaggtggccgcctgtgaggccaccggccggcagctgctgaccaagccccagcaccagtttgtgcggccagatgtgaacagcagctgtggggagggctacaagctgagcggctctgtgtaccaggagtgccagggcaccatcccctggttcatggagatccggctgtgcaaggagatcacctgccccccacctcctgtgatctacaatggagcccacacaggcagcagcctggaggacttcccctacggcaccaccgtgacctacacctgcaaccctggccctgagcggggcgtggagttcagcctgattggagagagcaccatccgctgcaccagcaatgaccaggagcggggcacctggagcggccctgcccccctgtgcaagctgagcctgctggccgtgcagtgcagccacgtgcacatcgccaacggctacaagatcagcggcaaggaggccccctacttctacaatgacacagtgaccttcaagtgctacagcggcttcaccctgaagggcagcagccagatccgctgcaaggctgacaacacctgggaccctgagatccctgtgtgtgagaaggagacctgccagcacgtgcggcagagcctgcaggagctgcctgctggcagccgggtggagctggtgaacaccagctgccaggacggctaccagctgaccggccacgcctaccagatgtgccaggatgctgaaaatggcatctggttcaagaagatccccctgtgcaaggtgatccactgccaccccccacctgtgattgtgaatggcaagcacacaggcatgatggccgagaacttcctgtatggaaatgaggtgtcctatgaatgtgaccagggcttctacctgctgggggagaagaagctgcagtgccgcagtgacagcaaaggacatggctcctggagcggccccagcccccagtgcctgcggagcccccctgtgacccgctgccccaaccctgaggtgaagcacggctacaagctgaacaagacccacagcgcctacagccacaatgacatcgtgtatgtggactgcaaccctggcttcatcatgaatggcagcagggtcatccgctgccacacagacaacacctgggtgcctggggtgcccacctgcatcaagaaggaggtgaactgcagcagccctgctgacatggatggcatccagaagggcctggagcccaggaagatgtaccagtatggagctgtggtgaccctggagtgtgaagatggctacatgctggagggcagcccccagagccagtgccagagcgaccaccagtggaacccccccctggccgtgtgccgcagccgcagcctggcccctgtgctgtgtggcattgctgctggcctcatcctgctgaccttcctgattgtcatcaccctgtatgtgatcagcaagcaccgggccaggaactactacacagacaccagccagaaggaggccttccacctggaggcccgggaggtgtacagcgtggacccctacaacccagccagctag

SEQ ID NO: 121837 - DNA, 3021 bp, Artificial Sequence
  derived and/or modified sequence
atgggcgccgccggcctgctgggcgtcttcctggccctggtggcccctggggtgctgggcatcagctgtggcagccccccacccatcctgaatggccgcatctcctactacagcacccccatcgctgtgggcaccgtcatccgctacagctgcagcggcaccttccgcctcatcggggagaagagcctgctgtgcatcaccaaggacaaggtggatggcacctgggacaagccagcccccaagtgtgagtacttcaacaagtacagcagctgcccagagcccatcgtgcctgggggctacaagatccggggcagcaccccctaccgccacggggacagcgtgacctttgcctgcaagaccaacttctccatgaatggaaacaagtctgtgtggtgccaggccaacaacatgtggggccccacccggctgcccacctgtgtgtctgtgttccccctggagtgcccagccctgcccatgatccacaacggccaccacaccagtgaaaatgtgggcagcatcgcccctggcctgtctgtgacctacagctgtgagagcggctacctgctggtgggggagaagatcatcaactgcctgagcagcggcaagtggagcgctgtgccccccacctgtgaggaggcccgctgcaagagcctgggccgcttccccaacgggaaggtgaaggagccccccatcctgcgggtgggcgtgacagccaacttcttctgtgatgagggctaccgcctgcagggcccccccagcagccgctgtgtgattgctggccagggcgtggcctggaccaagatgcctgtgtgtgaggagatcttctgccccagccccccacccatcctgaatggccgccacatcggcaacagcctggccaacgtgtcctatggcagcatcgtgacctacacctgtgaccctgaccctgaggagggcgtgaacttcatcctgattggagagagcaccctgcgctgcaccgtggacagccagaagacaggcacctggagcggccctgccccccgctgtgagctgagcaccagcgctgtgcagtgcccccacccccagatcctgcggggccgcatggtgtctggccagaaggaccgctacacctacaatgacaccgtcatctttgcctgcatgtttggcttcaccctgaagggcagcaagcagatccgctgcaatgcccagggcacctgggagcccagcgcccctgtgtgtgagaaggagtgccaggccccacccaacatcctgaatggccagaaggaggacagacacatggtgcgctttgatcctggcaccagcatcaagtacagctgcaaccctggctacgtgctggtgggggaggagagcatccagtgcaccagcgagggcgtgtggaccccacctgtgccccagtgcaaggtggccgcctgtgaggccaccggccggcagctgctgaccaagccccagcaccagtttgtgcggccagatgtgaacagcagctgtggggagggcaaccacctgcccaccaccccctgctacctgcagtggggcacccaccgggagttcctgcggcgcttcagcatctggaaccacggccacctgcacatgcctggccctgagcggggcgtggagttcagcctcatcggggagagcaccatccgctgcaccagcaatgaccaggagcggggcacctggagcggccctgcccccctgtgcaagctgagcctgctggccgtgcagtgcagccacgtgcacatcgccaacggctacaagatcagcggcaaggaggccccctacttctacaatgacacagtgaccttcaagtgctacagcggcttcaccctgaagggcagcagccagatccgctgcaaggctgacaacacctgggaccctgagatccctgtgtgtgagaaggagacctgccagcacgtgcggcagagcctgcaggagctgcctgctggcagccgggtggagctggtgaacaccagctgccaggacggctaccagctgactggacatgcctaccagatgtgccaggatgctgaaaatggcatctggttcaagaagatccccctgtgcaaggtgatccactgccaccccccacctgtgattgtgaatggcaagcacacaggcatgatggccgagaacttcctgtatggaaatgaggtgtcctatgaatgtgaccagggcttctacctgctgggggagaagaagctgcagtgccgcagtgacagcaagggccacggctcctggagcggccccagcccccagtgcctgcggagcccccctgtgacccgctgccccaaccctgaggtgaagcacggctacaagctgaacaagacccacagcgcctacagccacaatgacatcgtgtatgtggactgcaaccctggcttcatcatgaatggcagcagggtcatccgctgccacacagacaacacctgggtgcctggggtgcccacctgcatcaagaaggccttcatcggctgccccccaccacccaagacccccaacggcaaccacactggaggcaacatcgcccgcttcagccctggcatgagcatcctgtacagctgtgaccagggctacctgctggtgggggaggccctgctgctgtgcacccatgagggcacctggagccagcctgccccccactgcaaggaggtgaactgcagcagccctgctgacatggatggcatccagaagggcctggagcccaggaagatgtaccagtacggggctgtggtgaccctggagtgtgaagatggctacatgctggagggcagcccccagagccagtgccagagcgaccaccagtggaacccccccctggccgtgtgccgcagccgcagcctggcccctgtgctgtgtggcattgctgctggcctcatcctgctgaccttcctgattgtcatcaccctgtatgtgatcagcaagcaccgggccaggaactactacacagacaccagccagaaggaggccttccacctggaggcccgggaggtgtacagcgtggacccctacaacccagccagctag

SEQ ID NO: 121838 - DNA, 3102 bp, Artificial Sequence
  derived and/or modified sequence
atgggcgccgccggcctgctgggcgtgttcctggccctggtggcccccggcgttttggggatctcatgcggctcccccccccctatccttaatggccgcatctcttactacagtacaccaatcgctgttggaaccgtaatccggtattcctgctccgggactttcagacttattggcgaaaaatcgctgctctgcatcactaaggataaagtcgacggcacctgggataagcctgccccaaaatgcgaatacttcaataagtattcgagctgcccggaacccatagttccagggggatacaagatccgcgggagtaccccctatcggcacggcgactctgtgaccttcgcctgcaagaccaatttcagcatgaacgggaataaaagcgtctggtgtcaggccaacaacatgtggggtcccactcggctgcccacctgcgtatctgtttttccccttgaatgtccagccttacctatgatccacaacggtcaccacacctccgaaaatgtaggctccattgcaccaggcctgtctgtaacttattcctgtgaaagcggctatctgctggtcggagaaaagattattaattgcctgtccagtgggaaatggtccgctgtccctccaacatgtgaagaagcacgatgcaagagtctgggaagatttcccaatggcaaggtcaaagaaccacccattttgagggttggtgtgacagcaaacttcttctgcgatgagggctatcgcttgcagggtcccccctcaagtagatgcgttatcgctgggcagggagtcgcctggaccaagatgcctgtctgcgaggaaatcttctgccctagtcccccccctattctgaatgggaggcatattgggaacagcctagctaacgtgtcgtatggttcgatcgtcacctatacttgcgatccagaccctgaggagggtgtgaacttcatccttatcggagagtctactctgcggtgtactgtagattcgcagaagactgggacatggtccggccccgcaccacgatgtgagctcagcacatccgccgtacagtgtcctcatccccaaattttacgcggacgtatggtctcagggcaaaaggaccgatacacttataacgatactgtgatctttgcctgcatgttcgggtttacactgaaaggatcaaagcagattcgttgcaacgcacagggaacctgggaaccctctgcgcctgtgtgtgagaaggaatgtcaggcccctccaaatattttgaatggccagaaggaagacaggcatatggtgcggttcgatccggggacctctattaagtacagctgtaatccgggctacgtccttgtgggcgaggagtctatccagtgcacgagcgagggagtctggaccccccccgtcccacaatgcaaggtcgcagcctgtgaagccacaggccggcagctgctcaccaagcctcagcatcaattcgttcggcctgatgtgaattccagctgcggtgaaggttacaaactgtcaggtagcgtctaccaggagtgccagggcaccattccatggttcatggaaattcgcttgtgtaaggagattacatgccccccccccccagtcatttataacggtgcgcacaccgggagctctcttgaggatttcccttatggcaccaccgttacctatacgtgcaatcccggccctgagcgcggggtagagttcagcctgatcggagagagcaccatcagatgcactagtaatgatcaggagaggggaacctggagcggcccagctccactctgcaagctcagtctcctcgcagtgcagtgtagccatgtacatattgcaaacgggtacaagatctccggtaaagaagctccttacttttacaatgatactgtgactttcaaatgttattctgggtttacacttaagggctccagtcagattcgatgtaaagcggacaacacctgggatccagaaatcccagtgtgcgagaaggaaacttgccaacacgttcgacagagcctgcaggaactccctgccggctccagggtggagctggtaaacacatcgtgtcaggatggttaccagctgacaggtcatgcataccagatgtgccaggatgcagagaatggtatctggtttaagaaaatccccttgtgcaaggtgattcactgccatccaccccctgtgattgtaaacggtaagcacaccggaatgatggccgagaactttctgtatggaaacgaagtgtcatatgagtgtgatcagggtttttacctcctgggagagaaaaaactacagtgccgttctgattctaaaggtcatgggagctggtccggccccagtcctcagtgtttacgctctccaccagtaaccagatgtcctaaccccgaagttaaacatggctataagctgaacaagacccactcagcttattcccacaatgacattgtctacgtggattgcaacccaggattcattatgaatgggtcccgggtgatccgctgccacacagacaacacttgggtgccaggggtgcccacatgcattaagaaggccttcattggatgcccccctccccccaagacccccaacggtaatcatactgggggcaacattgcccgcttcagcccgggaatgagcatactgtactcatgtgatcaaggatatctcctcgtgggcgaggctctgcttttatgcacccacgaaggcacctggtcacaacccgcgccacactgtaaagaggtcaattgttcctcaccagccgacatggacgggatacaaaagggcctggagcctcgcaagatgtaccagtacggcgccgtggtcaccctcgagtgtgaggacggatatatgcttgagggctcaccgcagtctcagtgtcagagcgatcatcagtggaatccgcctttagcagtatgtagatcacgcagccttgctccggtgttgtgcggcattgctgctgggctgattctgcttaccttcctcattgtgattaccctctatgtaatcagcaaacatcgggctagaaattactataccgacacatctcagaaggaggcctttcacctggaggctcgcgaggtgtattccgttgacccctataatccagcttcttag

SEQ ID NO: 121839 - DNA, 2916 bp, Artificial Sequence
  derived and/or modified sequence
atgggcgccgccggcctgctgggcgtgttcctggccctggtggccccgggcgttctaggcatctcctgcggaagccccccacccatcttaaatggccgcatctcctattattctacccccatcgccgtagggaccgtgattcggtacagctgctctggcaccttccgactgataggcgagaaaagtcttctttgcatcaccaaagataaagttgatgggacgtgggacaagcctgcccccaagtgtgaatacttcaataaatattccagctgcccagagccgattgtacctggcggctataaaattcgaggcagcactccttatcggcacggggattcagtaacctttgcttgtaaaacaaacttctccatgaatgggaataaatctgtgtggtgccaggcaaataatatgtggggaccgaccagactcccgacctgtgtttccgtttttccacttgagtgccccgcactgcccatgattcataatggacatcacactagcgagaacgttggatccatcgctcctggcctatcggtcacatatagttgcgagtctggttatctgttggtcggggagaaaattatcaattgcctgtctagcggcaaatggagcgctgtgccacccacatgcgaagaagcccgctgcaaatccctgggtagattccctaatgggaaagtgaaggaacccccgatcctccgggtgggtgtgaccgcaaacttcttctgtgacgagggctataggctgcagggacccccatctagcaggtgtgttatcgccgggcagggggttgcttggacaaaaatgcctgtctgtgaggaaatcttttgcccatcacccccgccaatccttaatggtcgacacatcggtaattccttagccaacgtgtcctacggaagtatcgtcacctacacgtgtgaccctgatccggaagaaggcgtgaacttcatcctgatcggagagtcaacattacggtgcactgtggattctcaaaaaacagggacctggtcaggccctgcgcccagatgtgagctaagcaccagcgccgtccagtgtcctcacccgcagattctgcgggggaggatggtcagtggtcaaaaggaccggtacacctacaatgacactgtaatcttcgcatgtatgttcggctttacactcaaggggtctaaacaaatcagatgcaacgctcagggaacctgggagcccagcgcacctgtatgcgagaaagagtgtcaggcccctccaaatatcctgaatggacagaaggaggatagacacatggtccgatttgatcctgggacaagcatcaagtacagctgtaatcccgggtacgttcttgtgggcgaggagagcatacaatgcaccagcgaaggcgtgtggaccccccccgtgcctcaatgtaaggttgcagcctgcgaagcaacaggtcgccagctgctgacaaaaccacagcatcagttcgtgcgccctgacgttaattcatcctgcggagaagggtataaactatccggttcagtctaccaagagtgccaggggacaatcccatggttcatggagatccggctgtgcaaagaaataacttgcccccctccgcctgtcatctataacggtgcacacacggggagttctctcgaagattttccttatggcactactgtcacctatacatgtaaccctgggcccgaaaggggggtggagttctctctcattggtgaaagtactatacgctgcacaagcaacgatcaggagagagggacgtggagcgggcctgccccactatgcaagctgagccttttggcggtgcagtgtagtcatgtccacattgccaacggatataagatatctgggaaagaggccccctacttctacaatgacaccgtcacttttaagtgctactctggttttaccctgaagggctcctcccaaattagatgcaaggctgacaatacttgggacccggaaatccccgtctgtgagaaggaaacatgtcagcacgtgaggcagagcctacaggagctccccgccgggtctagagtagagctggtcaatacctcatgtcaggatggttatcaattgacaggacacgcttatcagatgtgtcaagatgccgaaaatgggatttggttcaaaaagatcccgctctgtaaggtgatacactgtcatcctccccccgtgatcgttaatgggaagcatacaggaatgatggccgagaacttcctctatggaaacgaagtttcttatgaatgcgatcaggggttctatctacttggtgagaaaaagctgcagtgcaggtctgattctaagggacatggctcatggtccggcccttccccccagtgcctacggtcacctcccgtcacacggtgccctaacccagaggtaaagcacggatacaagctgaacaaaacacactccgcctactcacataacgacatcgtctacgtggactgtaatcctggctttattatgaatgggtcgcgggttattaggtgccacacagacaatacctgggtgccaggagtcccaacatgtattaaaaaggaagttaattgctcttcaccggccgatatggacggtatccagaaaggattggagccgaggaagatgtatcagtatggcgcagtggtgactctggagtgtgaagacggctatatgctcgagggaagccctcagtcccagtgtcagagcgatcatcaatggaacccccctttggccgtttgtaggtctagaagtctggcccctgtgctctgtggcatcgcggcaggactgatcctgctcacctttctcattgtcattactctgtacgttatctctaagcaccgggcaaggaattactacaccgatacttcccaaaaggaggcgtttcacctggaggccagagaggtgtattccgtggatccttacaatcctgcctcctag

SEQ ID NO: 121840 - DNA, 3021 bp, Artificial Sequence
  derived and/or modified sequence
atgggcgccgccggcctgctgggcgtgttcctggccctggtggccccaggggtgttggggatatcttgtggcagtcctccaccgattttgaacggccggatatcctattactcaaccccgatcgctgtgggcacggtcatccggtacagctgtagtggtacatttaggcttattggagagaagtccttgctgtgcatcaccaaggacaaggtcgatgggacctgggacaaacccgctcccaaatgtgaatatttcaataaatattccagttgccccgagccaattgtgcctggtggctacaagattcgcggctcgacaccctacagacatggcgacagtgtcacattcgcttgcaaaactaacttctcaatgaacggcaataagtcagtctggtgtcaggccaacaacatgtggggccccacaaggctgcccacctgtgtctctgtcttcccactagaatgcccagctctgcctatgatccacaacggccaccataccagcgaaaatgttggctcgatcgccccaggcttgtccgtgacctacagctgcgaatcgggatatctgctcgtgggcgaaaaaatcattaattgcctttcctcagggaagtggagtgcagtccccccaacatgtgaggaagctcgttgtaaatccttaggtcggttccctaatggaaaggtgaaggaacctccaatcctgcgcgtcggagtaacagcgaactttttttgtgacgaagggtaccgcctacaaggaccaccaagctcccgctgcgttatcgcaggacagggcgttgcttggactaagatgccagtgtgtgaagagatcttttgcccctcacctccgccaatcctgaatggccggcatattggcaactctttagccaatgtctcctatgggagcattgtcacttacacatgtgaccccgacccagaggaaggggtcaacttcatcttgattggagagtcaaccctaagatgtaccgtagacagtcagaagacaggcacttggagcggtcctgctccacgttgtgagctgagcactagcgccgttcagtgccctcacccacagatacttaggggacgaatggtgagcgggcagaaagaccggtatacctataacgatacagtaatcttcgcttgcatgttcggattcaccctgaagggaagcaaacaaatcaggtgcaacgcgcagggaacctgggaaccaagcgcgccagtctgcgagaaggagtgccaagcccctcctaacattctcaacggacaaaaggaagataggcacatggtgcgtttcgaccccggcacatctatcaagtattcctgtaacccaggctatgtcctcgttggtgaggaaagcatacagtgtactagtgagggcgtgtggaccccgcccgtcccccagtgcaaggttgccgcctgtgaggccaccggcagacagttgctcacaaaaccacagcaccagtttgtacgccctgatgtgaattcctcctgcggcgaggggaaccacctgccaactacaccgtgttatctacagtggggtacacatcgggagtttctgaggagattttccatctggaatcatggccatctacatatgccaggccctgagagaggcgtggaatttagtctgattggcgagtcaaccatcagatgtacatccaatgatcaggagaggggaacctggagcgggcctgccccgctttgcaaactttcgctgctcgctgttcagtgctcacatgtccatatagctaacgggtacaagattagtggaaaagaagcaccctatttttataatgatacagtgactttcaagtgctatagtggcttcaccctgaaaggaagtagccagattcggtgcaaggcagacaacacctgggatccggaaatccccgtgtgtgaaaaagagacctgtcagcacgtgcgccagtccctgcaggagctaccagccggatcacgagtagagttagtcaatacttcctgccaggatggatatcagttgactgggcacgcttaccagatgtgccaagatgccgagaatgggatttggttcaagaagatccccctgtgcaaggtcatccactgccacccaccccccgtgattgtaaatggaaaacatacaggcatgatggcagagaattttctgtatgggaacgaggtatcttacgaatgtgatcagggattctatttgttgggagaaaaaaaacttcagtgcagatcagatagcaaaggtcacgggtcctggtcagggccctccccccagtgccttcgtagccctcccgtgaccagatgcccaaaccctgaggtgaaacacggctacaagttgaataagactcactcagcatactctcacaatgacatcgtgtacgtagactgcaaccccggcttcattatgaacggatctagggtcatcaggtgccacacggacaacacatgggtccctggcgttcccacttgcatcaagaaagctttcattggctgccctccacctccaaaaactcccaacggcaatcatacaggtggcaacattgctaggttctcaccagggatgtcaatcctctatagctgcgatcaaggttacctgctcgttggcgaagccttgttgttgtgcacgcatgaaggcacttggtctcagcccgctccccactgcaaggaggttaactgtagttcccccgctgacatggatggcattcagaaaggtctggaaccgagaaagatgtatcagtacggggctgtagtcaccctggaatgcgaggacgggtacatgcttgaggggtcgccacagtcgcagtgtcaatctgatcaccagtggaaccctccactcgctgtctgcaggagcaggagtctcgcaccggtactctgcggcatcgcggccggcctaatcctactcacttttctgatcgtgatcactctgtacgttattagcaagcaccgtgccagaaattactataccgacactagccagaaagaggcgttccatttggaggccagggaggtctactccgtggatccttataatccagcttcttag

SEQ ID NO: 121841 - DNA, 3102 bp, Artificial Sequence
  derived and/or modified sequence
atgggcgcagctggcttactgggggtattcctggctctagtggctcccggtgtgcttggcatctcctgcggatcccctcctccaattctgaatgggcgtattagttactatagcaccccgattgcagtcggaacagttatccgctattcatgtagtggtacatttcgcctcatcggggagaagtcattgctgtgtattaccaaggataaggtggacggcacatgggacaagccagccccaaagtgcgagtattttaataagtattcttcgtgccccgagcccattgtgcctggcggatacaagatacggggttccaccccttacaggcacggcgacagtgttacctttgcttgtaagacaaatttttccatgaatggaaataagtcagtgtggtgtcaggctaacaatatgtggggaccaaccaggctccctacttgcgtctcagtgttcccactcgagtgtcctgctctcccgatgatacacaatggacaccatacaagtgagaatgtaggtagcatcgccccaggcctgagcgtgacatatagctgtgagagtggctacctcctggtcggcgagaaaattatcaactgtttgtcaagtggtaaatggtccgccgtaccacccacttgtgaagaggcaagatgcaagtccctgggacggtttccaaatggaaaagtgaaggagccgccaattttgcgggtgggagtgacagcaaactttttctgcgacgagggataccgcctgcagggtcccccaagcagccgctgtgttatcgccggtcagggtgtggcctggaccaaaatgcctgtgtgcgaggaaatcttctgtcctagcccccctcccattcttaacgggaggcacattggcaattcgttggctaatgtttcgtacggatcaattgtcacgtacacgtgcgatcccgatcctgaggagggtgttaatttcattctcatcggtgagagtacactgagatgtacagttgattcacagaagactggaacatggagcggccctgccccacggtgtgagttgagcacaagtgctgtgcagtgcccccacccccagattctccggggacgcatggtgtccggacagaaggaccggtacacatataatgacacagtaatcttcgcctgtatgtttggcttcacattgaagggatcaaagcagatccggtgcaacgcccagggtacctgggaaccctcagctcctgtatgcgagaaagagtgtcaggcccctccaaacatccttaacgggcagaaggaggacagacatatggtgaggttcgatcctggtacttccataaaatacagttgcaatccgggatacgtgctagtaggagaggagagcatccagtgtacctccgagggggtgtggacccctccggtcccccagtgcaaggtcgcagcatgcgaggctacaggaagacagctactgactaaacctcagcaccagttcgtccgccctgacgttaactcctcctgtggtgaaggttataaactgagtggctccgtttaccaggagtgtcagggcacaatcccctggtttatggagattagactttgcaaggaaataacatgtcctcctccccctgtgatatacaacggtgcccacaccggcagcagtctcgaggatttcccgtacggcactactgtcacatatacttgtaaccccggtcctgagcgcggagtggagttttccttgatcggggagtctacaatccgttgtacctccaatgaccaggaaagaggcacatggagtggcccagcgccactgtgtaagctatcattattggccgttcagtgttctcatgtgcatattgccaacggctacaagatctcaggcaaggaggccccttacttttataacgatacggttaccttcaaatgctactctggtttcacactcaaaggatccagccagattagatgtaaagcggataatacttgggaccccgagatcccggtgtgtgagaaagagacctgccagcacgtccggcagtcactacaggaactcccagccggatcccgcgtggagctggtgaacacctcctgtcaggacggctaccagttgactggccatgcttaccagatgtgccaggacgccgagaatggaatatggttcaagaaaattcctctttgtaaagtgatccactgccacccccctccagtcatcgtcaacggcaaacacaccggaatgatggccgaaaattttctctatggcaacgaagtttcatacgagtgcgaccaaggattctatttgctgggcgaaaagaagttgcaatgccgctccgatagtaagggtcatggctcatggtcaggtcccagcccacagtgcctccgtagccctcccgtcaccagatgccccaacccagaggtcaaacacgggtacaagctgaacaagacccattctgcttactcccacaatgacatagtctacgtggactgcaacccgggatttatcatgaatggaagcagggtgatacgatgccacaccgacaatacatgggtcccgggagttccaacatgtatcaagaaggcttttattggctgcccaccgcctccaaagactccaaatggtaatcacaccgggggaaatatcgctaggttctcaccgggaatgtcgatcctgtatagctgtgatcaggggtacctgttggttggcgaggcgttactgctgtgtacccatgaagggacttggtcgcagcctgcgcctcactgcaaggaggttaattgtagctcccctgccgatatggatggtatccagaagggccttgagcccagaaaaatgtatcaatacggagccgtcgtgacccttgaatgcgaagatggttacatgctcgaaggctctccacagagccagtgtcaaagtgatcaccagtggaatcccccacttgcggtctgtcgctctcggagtttggcgccagtgctgtgtgggatcgctgccggactcattctcttgacattcttgattgtgatcacactttatgtgattagcaaacatcgcgctcgaaactattataccgacactagccagaaggaagcatttcaccttgaggccagggaggtgtacagtgtggatccatacaatcccgcatcttag

SEQ ID NO: 121842 - DNA, 2916 bp, Artificial Sequence
  derived and/or modified sequence
atgggcgctgctgggctcttgggggtctttttagccctcgtggccccaggtgtgttgggaattagctgcgggtccccgcctccaatactcaacgggaggattagttactactctaccccaatcgccgtgggcactgtgatccggtattcttgcagcgggacattccgactcattggcgaaaaatccctgttgtgtatcacaaaggataaggtggatggaacctgggacaaacctgctccaaagtgcgagtacttcaataagtactctagttgtcccgagccaattgtgcctggcggatacaagatccggggttcaaccccctatcgccatggcgactcggtcacattcgcttgcaagaccaatttctccatgaatggcaacaaatctgtgtggtgccaggccaacaacatgtggggcccaacaagattacctacgtgcgtgagcgttttccccctggagtgccctgccctacctatgatacacaacggccaccatacttccgaaaatgttggctcaatcgctcctgggctgtccgtaacttattcatgtgagagcggttatctgttggttggagagaagattattaattgtttgtcttccggcaaatggtccgctgtgcccccaacctgcgaggaggccaggtgcaaaagtctcggaagattcccgaacggtaaggtgaaggagcctccaatactgcgcgtgggtgtcactgccaacttcttctgtgatgaaggttatcgcctgcaagggccaccctcctctagatgtgtgattgcaggccaaggggtggcatggactaaaatgccagtttgcgaggaaattttttgccctagccctccccctatcctgaacggacgccacattggaaattccctagctaacgtctcatatggcagcatcgtaacctatacctgcgaccctgatcctgaagaaggagtaaattttattttaatcggggaatcaacgctacgctgcaccgtagactctcaaaaaaccggcacctggagcggtcctgctccccgttgtgagcttagtacttcagccgttcagtgcccccacccacaaatcttaaggggaagaatggtgagcggtcagaaagacaggtacacatacaacgataccgttatttttgcatgtatgtttggatttactctgaaagggagtaagcagatccgttgcaatgctcagggcacatgggagccgagtgctcctgtgtgtgaaaaagagtgtcaggctccacctaacattcttaatggccaaaaagaggatcggcacatggtcaggttcgaccctggtacctcaatcaaatactcttgtaaccccggatacgtgttggttggagaagaatcaattcagtgcaccagcgagggggtgtggaccccccctgtcccacagtgtaaagtggcagcttgtgaggctacggggagacagcttcttaccaagccacagcatcagttcgtgcgcccagacgtgaatagctcgtgcggcgaaggctataaactttctgggtcagtttaccaggagtgccaggggaccatcccctggttcatggagataaggctgtgcaaggagataacgtgtccaccaccccctgttatttataacggcgctcatacaggctcctcattggaggatttcccttacggcactactgtcacatatacgtgcaatcctggaccagagagaggagtggaatttagccttattggcgagtctacgattcgatgcaccagtaacgaccaagagcgcggtacttggtcgggacccgctccactgtgtaagctctcgctgctcgcagtacagtgcagtcatgttcacatcgctaatggctataagataagcggtaaggaggcaccctacttctacaacgatactgtcacctttaaatgttacagcggcttcacactcaaaggaagctctcaaattaggtgtaaagcagataacacgtgggacccagagattccagtgtgcgagaaggagacctgccagcatgtacgtcagtccctgcaggagctacctgcgggttcccgagtggaacttgtcaacacctcttgccaagatgggtatcagctaacgggccatgcctatcagatgtgtcaggacgcagaaaacgggatctggttcaaaaagattcccctttgtaaagtcatccattgccatccgcctcccgtcatcgtcaacggtaagcacacagggatgatggccgagaacttcctgtacgggaacgaagtgagctatgagtgcgaccaaggattctacttgcttggggaaaagaaactgcagtgtcgttctgacagtaagggacacggtagctggtccggcccttctccccagtgtcttaggagccccccagtgacccgctgcccgaatcccgaggtgaagcacggctacaaactgaacaaaactcacagtgcatatagtcataacgatattgtctacgttgactgcaatccaggttttatcatgaacgggagccgagtgatccgctgccacacggacaacacgtgggtcccaggggttccgacctgtatcaaaaaagaagtgaattgctctagccccgctgacatggacgggatacagaaaggccttgagcccagaaaaatgtatcagtatggcgcagtggttactcttgagtgcgaagacgggtacatgttggaaggatccccccagagccagtgtcaaagcgatcaccagtggaacccacccttggccgtgtgcagatcgcggagcctggcaccagttctttgcggtattgctgcaggactgatcctgctcacctttctgattgtcattacactctacgtcatctcaaagcaccgtgccaggaactactatactgacaccagtcagaaggaagcgttccacttggaggccagggaagtttactctgtcgacccgtataaccccgcttcttag

SEQ ID NO: 121843 - DNA, 3021 bp, Artificial Sequence
  derived and/or modified sequence
atgggagcagccggtttactgggtgtgtttctcgcactggtggccccaggggtcttgggtatctcttgtggctctccgcctcctatcttaaatggtaggatcagctactacagcactccaatcgccgtgggaaccgtaattcgctattcctgcagtggaaccttcagactgatcggcgaaaaatccctgttgtgtatcacgaaagacaaagtggacggcacgtgggataagcctgctccaaagtgcgaatattttaataaatatagcagttgtcctgagcctatcgttcccggtggctataagatacggggttcaaccccgtaccggcacggtgactctgtcaccttcgcatgcaagacaaatttcagcatgaacggcaataagtctgtgtggtgtcaggccaacaatatgtggggcccaacccggttgcctacctgcgttagtgttttcccccttgagtgccccgctctgcccatgattcataatggccaccacacctcagagaacgtcgggtctattgccccaggcctttccgtgacttattcctgcgaatcagggtatttgctagtgggagagaaaatcatcaattgtcttagctctggcaaatggtccgcagttcccccaacctgcgaggaggcacgatgtaagtcactcggtcgatttccgaacgggaaggtgaaggaacctcctatccttagggtcggcgttaccgccaacttcttttgtgacgagggttacaggcttcagggccctccaagtagtagatgcgtgatcgcaggccagggcgttgcatggaccaaaatgcctgtctgtgaagaaattttttgtccaagcccccctcccattctgaacggcaggcacattggcaacagccttgccaacgtctcctacggaagcatcgtgacctacacctgcgatcctgacccagaagagggggtgaacttcatcctgattggagagagtacattaaggtgcactgtggactcacagaaaacaggaacgtggtcaggtccagccccaaggtgtgaattgtcaacatccgccgttcagtgcccgcacccccagattctccgcggtagaatggtctcagggcaaaaagataggtacacctataatgatactgtgatctttgcctgtatgttcggattcacgctcaaggggtccaagcagattcgctgcaacgcacaaggtacctgggaaccctcagctcccgtgtgcgaaaaggaatgccaggcaccaccaaatattctgaatggccagaaggaggataggcatatggtgcgtttcgatccaggaaccagtatcaagtacagctgtaatccaggctacgtgctggtgggcgaagagagtatacagtgcacgagcgagggagtatggacacctccagtccctcagtgcaaggtggccgcttgcgaggctactggacgccagctgctcaccaagccacagcatcagtttgtacgaccagatgttaattcatcgtgtggagaaggaaaccacctgcctacaactccatgttacctccaatggggaacccatagagagttcctgcgcagattcagcatatggaaccacggccatctgcatatgcctgggccagagcggggagtggaattttctctgatcggagaatcaacaatccggtgcacttcaaacgatcaagagaggggtacttggagcggcccagctcccctgtgtaaactttccctgctggcggtgcagtgcagccatgtccacattgctaatgggtacaagatctctggcaaagaggctccatacttctacaatgacacggttacatttaagtgctactcgggtttcaccctgaagggctccagtcagatcagatgcaaggccgacaacacgtgggatcctgaaatcccggtgtgcgagaaggagacttgtcagcacgtgaggcagtcgctgcaggagctcccggctggcagccgtgttgagcttgtcaacacatcgtgccaggacggctaccaactgacaggccacgcctaccaaatgtgccaggacgccgagaatggcatttggttcaaaaaaattcccctttgcaaggtgattcattgccaccccccacccgtaattgtaaatggaaagcacactggaatgatggcggaaaattttctttatgggaatgaggtcagttacgagtgcgaccagggtttttatttactgggagaaaaaaagctacagtgccgttcggattcgaagggtcacggcagctggtccggcccatcaccacagtgcttgagatctccccctgtgacacgatgtccaaatccagaggtgaagcatggctataagctgaataagacccatagtgcttattcgcataacgatatcgtgtatgtcgactgtaaccctgggttcataatgaatgggagtagggtcatccgttgccacactgataatacctgggttccgggagtccccacttgtattaaaaaggcgttcatagggtgccctccacccccaaaaactccgaacgggaaccacaccggcggtaacatagccaggttctcacccggaatgtcgattttatacagctgtgatcaaggatacctgttggtaggcgaggctctccttttgtgcacgcacgagggcacctggtctcagccagctcctcattgtaaagaagtgaattgcagtagccccgcagatatggatggaatccagaaaggcttggaaccccgaaagatgtaccagtatggcgctgtggtaactctggagtgcgaggacggatatatgttagaagggtcaccacagtctcagtgtcagtccgaccaccagtggaatccacccctggctgtgtgtcgctcacgcagcttggcacccgtgctctgtggcatcgcagccggactcatactgctgaccttcctgatcgttattactttatacgtgatttccaaacatagggccaggaactactacaccgacaccagccagaaggaggcctttcatctggaggccagggaggtgtactctgtggacccttacaatccggcatcctag

SEQ ID NO: 121844 - DNA, 4063 bp, Artificial Sequence
  derived and/or modified sequence
caccggcgccgcgtcagcccccaggccgcctgcaggtgtgcgctcagaactagcacgtgtgccggacactatttaagggcccgcctctcctggctcacagctgcttgctgctccagccttgccctcccagagctgccggacgctcgcgggtctcggaacgcatcccgccgcgggggcttcggccgtggcatgggcgccgcgggcctgctcggggttttcttggctctcgtcgcaccgggggtcctcgggatttcttgtggctctcctccgcctatcctaaatggccggattagttattattctacccccattgctgttggtaccgtgataaggtacagttgttcaggtaccttccgcctcattggagaaaaaagtctattatgcataactaaagacaaagtggatggaacctgggataaacctgctcctaaatgtgaatatttcaataaatattcttcttgccctgagcccatagtaccaggaggatacaaaattagaggctctacaccctacagacatggtgattctgtgacatttgcctgtaaaaccaacttctccatgaacggaaacaagtctgtttggtgtcaagcaaataatatgtgggggccgacacgactaccaacctgtgtaagtgttttccctctcgagtgtccagcacttcctatgatccacaatggacatcacacaagtgagaatgttggctccattgctccaggattgtctgtgacttacagctgtgaatctggttacttgcttgttggagaaaagatcattaactgtttgtcttcgggaaaatggagtgctgtcccccccacatgtgaagaggcacgctgtaaatctctaggacgatttcccaatgggaaggtaaaggagcctccaattctccgggttggtgtaactgcaaactttttctgtgatgaagggtatcgactgcaaggcccaccttctagtcggtgtgtaattgctggacagggagttgcttggaccaaaatgccagtatgtgaagaaattttttgcccatcacctccccctattctcaatggaagacatataggcaactcactagcaaatgtctcatatggaagcatagtcacttacacttgtgacccggacccagaggaaggagtgaacttcatccttattggagagagcactctccgttgtacagttgatagtcagaagactgggacctggagtggccctgccccacgctgtgaactttctacttctgcggttcagtgtccacatccccagatcctaagaggccgaatggtatctgggcagaaagatcgatatacctataacgacactgtgatatttgcttgcatgtttggcttcaccttgaagggcagcaagcaaatccgatgcaatgcccaaggcacatgggagccatctgcaccagtctgtgaaaaggaatgccaggcccctcctaacatcctcaatgggcaaaaggaagatagacacatggtccgctttgaccctggaacatctataaaatatagctgtaaccctggctatgtgctggtgggagaagaatccatacagtgtacctctgagggggtgtggacaccccctgtaccccaatgcaaagtggcagcgtgtgaagctacaggaaggcaactcttgacaaaaccccagcaccaatttgttagaccagatgtcaactcttcttgtggtgaagggtacaagttaagtgggagtgtttatcaggagtgtcaaggcacaattccttggtttatggagattcgtctttgtaaagaaatcacctgcccaccaccccctgttatctacaatggggcacacaccgggagttccttagaagattttccatatggaaccacggtcacttacacatgtaaccctgggccagaaagaggagtggaattcagcctcattggagagagcaccatccgttgtacaagcaatgatcaagaaagaggcacctggagtggccctgctcccctgtgtaaactttccctccttgctgtccagtgctcacatgtccatattgcaaatggatacaagatatctggcaaggaagccccatatttctacaatgacactgtgacattcaagtgttatagtggatttactttgaagggcagtagtcagattcgttgcaaagctgataacacctgggatcctgaaataccagtttgtgaaaaagaaacatgccagcatgtgagacagagtcttcaagaacttccagctggttcacgtgtggagctagttaatacgtcctgccaagatgggtaccagttgactggacatgcttatcagatgtgtcaagatgctgaaaatggaatttggttcaaaaagattccactttgtaaagttattcactgtcaccctccaccagtgattgtcaatgggaagcacacaggcatgatggcagaaaactttctatatggaaatgaagtctcttatgaatgtgaccaaggattctatctcctgggagagaaaaaattgcagtgcagaagtgattctaaaggacatggatcttggagcgggccttccccacagtgcttacgatctcctcctgtgactcgctgccctaatccagaagtcaaacatgggtacaagctcaataaaacacattctgcatattcccacaatgacatagtgtatgttgactgcaatcctggcttcatcatgaatggtagtcgcgtgattaggtgtcatactgataacacatgggtgccaggtgtgccaacttgtatcaaaaaagccttcatagggtgtccacctccgcctaagacccctaacgggaaccatactggtggaaacatagctcgattttctcctggaatgtcaatcctgtacagctgtgaccaaggctacctgctggtgggagaggcactccttctttgcacacatgagggaacctggagccaacctgcccctcattgtaaagaggtaaactgtagctcaccagcagatatggatggaatccagaaagggctggaaccaaggaaaatgtatcagtatggagctgttgtaactctggagtgtgaagatgggtatatgctggaaggcagtccccagagccagtgccaatcggatcaccaatggaaccctcccctggcggtttgcagatcccgttcacttgctcctgtcctttgtggtattgctgcaggtttgatacttcttaccttcttgattgtcattaccttatacgtgatatcaaaacacagagcacgcaattattatacagatacaagccagaaagaagcttttcatttagaagcacgagaagtatattctgttgatccatacaacccagccagctgatcagaagacaaactggtgtgtgcctcattgcttggaattcagcggaatattgattagaaagaaactgctctaatatcagcaagtctctttatatggcctcaagatcaatgaaatgatgtcataagcgatcacttcctatatgcacttattctcaagaagaacatctttatggtaaagatgggagcccagtttcactgccatatactcttcaaggactttctgaagcctcacttatgagatgcctgaagccaggccatggctataaacaattacatggctctaaaaagttttgccctttttaaggaaggcactaaaaagagctgtcctggtatctagacccatcttctttttgaaatcagcatactcaatgttactatctgcttttggttataatgtgtttttaattatctaaagtatgaagcattttctggggttatgatggctttacctttattaggaagtatggttttattttgatagtagcttcctcctctggtggtgttaatcatttcatttttacccttacttggtttgagtttctctcacattactgtatatactttgcctttccataatcactcagtgattgcaatttgcacaagtttttttaaattatgggaatcaagatttaatcctagagatttggtgtacaattcaggctttggatgtttctttagcagttttgtgataagttctagttgcttgtaaaatttcacttaataatgtgtacattagtcattcaataaattgtaattgtaaagaaaacatacaa

SEQ ID NO: 121845 - DNA, 3877 bp, Artificial Sequence
  derived and/or modified sequence
caccggcgccgcgtcagcccccaggccgcctgcaggtgtgcgctcagaactagcacgtgtgccggacactatttaagggcccgcctctcctggctcacagctgcttgctgctccagccttgccctcccagagctgccggacgctcgcgggtctcggaacgcatcccgccgcgggggcttcggccgtggcatgggcgccgcgggcctgctcggggttttcttggctctcgtcgcaccgggggtcctcgggatttcttgtggctctcctccgcctatcctaaatggccggattagttattattctacccccattgctgttggtaccgtgataaggtacagttgttcaggtaccttccgcctcattggagaaaaaagtctattatgcataactaaagacaaagtggatggaacctgggataaacctgctcctaaatgtgaatatttcaataaatattcttcttgccctgagcccatagtaccaggaggatacaaaattagaggctctacaccctacagacatggtgattctgtgacatttgcctgtaaaaccaacttctccatgaacggaaacaagtctgtttggtgtcaagcaaataatatgtgggggccgacacgactaccaacctgtgtaagtgttttccctctcgagtgtccagcacttcctatgatccacaatggacatcacacaagtgagaatgttggctccattgctccaggattgtctgtgacttacagctgtgaatctggttacttgcttgttggagaaaagatcattaactgtttgtcttcgggaaaatggagtgctgtcccccccacatgtgaagaggcacgctgtaaatctctaggacgatttcccaatgggaaggtaaaggagcctccaattctccgggttggtgtaactgcaaactttttctgtgatgaagggtatcgactgcaaggcccaccttctagtcggtgtgtaattgctggacagggagttgcttggaccaaaatgccagtatgtgaagaaattttttgcccatcacctccccctattctcaatggaagacatataggcaactcactagcaaatgtctcatatggaagcatagtcacttacacttgtgacccggacccagaggaaggagtgaacttcatccttattggagagagcactctccgttgtacagttgatagtcagaagactgggacctggagtggccctgccccacgctgtgaactttctacttctgcggttcagtgtccacatccccagatcctaagaggccgaatggtatctgggcagaaagatcgatatacctataacgacactgtgatatttgcttgcatgtttggcttcaccttgaagggcagcaagcaaatccgatgcaatgcccaaggcacatgggagccatctgcaccagtctgtgaaaaggaatgccaggcccctcctaacatcctcaatgggcaaaaggaagatagacacatggtccgctttgaccctggaacatctataaaatatagctgtaaccctggctatgtgctggtgggagaagaatccatacagtgtacctctgagggggtgtggacaccccctgtaccccaatgcaaagtggcagcgtgtgaagctacaggaaggcaactcttgacaaaaccccagcaccaatttgttagaccagatgtcaactcttcttgtggtgaagggtacaagttaagtgggagtgtttatcaggagtgtcaaggcacaattccttggtttatggagattcgtctttgtaaagaaatcacctgcccaccaccccctgttatctacaatggggcacacaccgggagttccttagaagattttccatatggaaccacggtcacttacacatgtaaccctgggccagaaagaggagtggaattcagcctcattggagagagcaccatccgttgtacaagcaatgatcaagaaagaggcacctggagtggccctgctcccctgtgtaaactttccctccttgctgtccagtgctcacatgtccatattgcaaatggatacaagatatctggcaaggaagccccatatttctacaatgacactgtgacattcaagtgttatagtggatttactttgaagggcagtagtcagattcgttgcaaagctgataacacctgggatcctgaaataccagtttgtgaaaaagaaacatgccagcatgtgagacagagtcttcaagaacttccagctggttcacgtgtggagctagttaatacgtcctgccaagatgggtaccagttgactggacatgcttatcagatgtgtcaagatgctgaaaatggaatttggttcaaaaagattccactttgtaaagttattcactgtcaccctccaccagtgattgtcaatgggaagcacacaggcatgatggcagaaaactttctatatggaaatgaagtctcttatgaatgtgaccaaggattctatctcctgggagagaaaaaattgcagtgcagaagtgattctaaaggacatggatcttggagcgggccttccccacagtgcttacgatctcctcctgtgactcgctgccctaatccagaagtcaaacatgggtacaagctcaataaaacacattctgcatattcccacaatgacatagtgtatgttgactgcaatcctggcttcatcatgaatggtagtcgcgtgattaggtgtcatactgataacacatgggtgccaggtgtgccaacttgtatcaaaaaagaggtaaactgtagctcaccagcagatatggatggaatccagaaagggctggaaccaaggaaaatgtatcagtatggagctgttgtaactctggagtgtgaagatgggtatatgctggaaggcagtccccagagccagtgccaatcggatcaccaatggaaccctcccctggcggtttgcagatcccgttcacttgctcctgtcctttgtggtattgctgcaggtttgatacttcttaccttcttgattgtcattaccttatacgtgatatcaaaacacagagcacgcaattattatacagatacaagccagaaagaagcttttcatttagaagcacgagaagtatattctgttgatccatacaacccagccagctgatcagaagacaaactggtgtgtgcctcattgcttggaattcagcggaatattgattagaaagaaactgctctaatatcagcaagtctctttatatggcctcaagatcaatgaaatgatgtcataagcgatcacttcctatatgcacttattctcaagaagaacatctttatggtaaagatgggagcccagtttcactgccatatactcttcaaggactttctgaagcctcacttatgagatgcctgaagccaggccatggctataaacaattacatggctctaaaaagttttgccctttttaaggaaggcactaaaaagagctgtcctggtatctagacccatcttctttttgaaatcagcatactcaatgttactatctgcttttggttataatgtgtttttaattatctaaagtatgaagcattttctggggttatgatggctttacctttattaggaagtatggttttattttgatagtagcttcctcctctggtggtgttaatcatttcatttttacccttacttggtttgagtttctctcacattactgtatatactttgcctttccataatcactcagtgattgcaatttgcacaagtttttttaaattatgggaatcaagatttaatcctagagatttggtgtacaattcaggctttggatgtttctttagcagttttgtgataagttctagttgcttgtaaaatttcacttaataatgtgtacattagtcattcaataaattgtaattgtaaagaaaacatacaa

SEQ ID NO: 121846 - DNA, 3841 bp, Artificial Sequence
  derived and/or modified sequence
ccggacgctcgcgggtctcggaacgcatcccgccgcgggggcttcggccgtggcatgggcgccgcgggcctgctcggggttttcttggctctcgtcgcaccgggggtcctcgggatttcttgtggctctcctccgcctatcctaaatggccggattagttattattctacccccattgctgttggtaccgtgataaggtacagttgttcaggtaccttccgcctcattggagaaaaaagtctattatgcataactaaagacaaagtggatggaacctgggataaacctgctcctaaatgtgaatatttcaataaatattcttcttgccctgagcccatagtaccaggaggatacaaaattagaggctctacaccctacagacatggtgattctgtgacatttgcctgtaaaaccaacttctccatgaacggaaacaagtctgtttggtgtcaagcaaataatatgtgggggccgacacgactaccaacctgtgtaagtgttttccctctcgagtgtccagcacttcctatgatccacaatggacatcacacaagtgagaatgttggctccattgctccaggattgtctgtgacttacagctgtgaatctggttacttgcttgttggagaaaagatcattaactgtttgtcttcgggaaaatggagtgctgtcccccccacatgtgaagaggcacgctgtaaatctctaggacgatttcccaatgggaaggtaaaggagcctccaattctccgggttggtgtaactgcaaactttttctgtgatgaagggtatcgactgcaaggcccaccttctagtcggtgtgtaattgctggacagggagttgcttggaccaaaatgccagtatgtgaagaaattttttgcccatcacctccccctattctcaatggaagacatataggcaactcactagcaaatgtctcatatggaagcatagtcacttacacttgtgacccggacccagaggaaggagtgaacttcatccttattggagagagcactctccgttgtacagttgatagtcagaagactgggacctggagtggccctgccccacgctgtgaactttctacttctgcggttcagtgtccacatccccagatcctaagaggccgaatggtatctgggcagaaagatcgatatacctataacgacactgtgatatttgcttgcatgtttggcttcaccttgaagggcagcaagcaaatccgatgcaatgcccaaggcacatgggagccatctgcaccagtctgtgaaaaggaatgccaggcccctcctaacatcctcaatgggcaaaaggaagatagacacatggtccgctttgaccctggaacatctataaaatatagctgtaaccctggctatgtgctggtgggagaagaatccatacagtgtacctctgagggggtgtggacaccccctgtaccccaatgcaaagtggcagcgtgtgaagctacaggaaggcaactcttgacaaaaccccagcaccaatttgttagaccagatgtcaactcttcttgtggtgaaggaaatcacctgcccaccaccccctgttatctacaatggggcacacaccgggagttccttagaagattttccatatggaaccacggtcacttacacatgcctgggccagaaagaggagtggaattcagcctcattggagagagcaccatccgttgtacaagcaatgatcaagaaagaggcacctggagtggccctgctcccctgtgtaaactttccctccttgctgtccagtgctcacatgtccatattgcaaatggatacaagatatctggcaaggaagccccatatttctacaatgacactgtgacattcaagtgttatagtggatttactttgaagggcagtagtcagattcgttgcaaagctgataacacctgggatcctgaaataccagtttgtgaaaaagaaacatgccagcatgtgagacagagtcttcaagaacttccagctggttcacgtgtggagctagttaatacgtcctgccaagatgggtaccagttgactggacatgcttatcagatgtgtcaagatgctgaaaatggaatttggttcaaaaagattccactttgtaaagttattcactgtcaccctccaccagtgattgtcaatgggaagcacacaggcatgatggcagaaaactttctatatggaaatgaagtctcttatgaatgtgaccaaggattctatctcctgggagagaaaaaattgcagtgcagaagtgattctaaaggacatggatcttggagcgggccttccccacagtgcttacgatctcctcctgtgactcgctgccctaatccagaagtcaaacatgggtacaagctcaataaaacacattctgcatattcccacaatgacatagtgtatgttgactgcaatcctggcttcatcatgaatggtagtcgcgtgattaggtgtcatactgataacacatgggtgccaggtgtgccaacttgtatcaaaaaagccttcatagggtgtccacctccgcctaagacccctaacgggaaccatactggtggaaacatagctcgattttctcctggaatgtcaatcctgtacagctgtgaccaaggctacctgctggtgggagaggcactccttctttgcacacatgagggaacctggagccaacctgcccctcattgtaaagaggtaaactgtagctcaccagcagatatggatggaatccagaaagggctggaaccaaggaaaatgtatcagtatggagctgttgtaactctggagtgtgaagatgggtatatgctggaaggcagtccccagagccagtgccaatcggatcaccaatggaaccctcccctggcggtttgcagatcccgttcacttgctcctgtcctttgtggtattgctgcaggtttgatacttcttaccttcttgattgtcattaccttatacgtgatatcaaaacacagagcacgcaattattatacagatacaagccagaaagaagcttttcatttagaagcacgagaagtatattctgttgatccatacaacccagccagctgatcagaagacaaactggtgtgtgcctcattgcttggaattcagcggaatattgattagaaagaaactgctctaatatcagcaagtctctttatatggcctcaagatcaatgaaatgatgtcataagcgatcacttcctatatgcacttattctcaagaagaacatctttatggtaaagatgggagcccagtttcactgccatatactcttcaaggactttctgaagcctcacttatgagatgcctgaagccaggccatggctataaacaattacatggctctaaaaagttttgccctttttaaggaaggcactaaaaagagctgtcctggtatctagacccatcttctttttgaaatcagcatactcaatgttactatctgcttttggttataatgtgtttttaattatctaaagtatgaagcattttctggggttatgatggctttacctttattaggaagtatggttttattttgatagtagcttcctcctctggtggtgttaatcatttcatttttacccttacttggtttgagtttctctcacattactgtatatactttgcctttccataatcactcagtgattgcaatttgcacaagtttttttaaattatgggaatcaagatttaatcctagagatttggtgtacaattcaggctttggatgtttctttagcagttttgtgataagttctagttgcttgtaaaatttcacttaataatgtgtacattagtcattcaataaattgtaattgtaaagaaaac

SEQ ID NO: 121847 - DNA, 3102 bp, Artificial Sequence
  derived and/or modified sequence
atgggcgccgccggcctgctgggcgtgttcctggccctggtggcccccggcgtgctgggcatcagctgcggcagccccccccccatcctgaacggcagaatcagctactacagcacccccatcgccgtgggcaccgtgatcagatacagctgcagcggcaccttcagactgatcggcgagaagagcctgctgtgcatcaccaaggacaaggtggacggcacctgggacaagcccgcccccaagtgcgagtacttcaacaagtacagcagctgccccgagcccatcgtgcccggcggctacaagatcagaggcagcaccccctacagacacggcgacagcgtgaccttcgcctgcaagaccaacttcagcatgaacggcaacaagagcgtgtggtgccaggccaacaacatgtggggccccaccagactgcccacctgcgtgagcgtgttccccctggagtgccccgccctgcccatgatccacaacggccaccacaccagcgagaacgtgggcagcatcgcccccggcctgagcgtgacctacagctgcgagagcggctacctgctggtgggcgagaagatcatcaactgcctgagcagcggcaagtggagcgccgtgccccccacctgcgaggaggccagatgcaagagcctgggcagattccccaacggcaaggtgaaggagccccccatcctgagagtgggcgtgaccgccaacttcttctgcgacgagggctacagactgcagggcccccccagcagcagatgcgtgatcgccggccagggcgtggcctggaccaagatgcccgtgtgcgaggagatcttctgccccagccccccccccatcctgaacggcagacacatcggcaacagcctggccaacgtgagctacggcagcatcgtgacctacacctgcgaccccgaccccgaggagggcgtgaacttcatcctgatcggcgagagcaccctgagatgcaccgtggacagccagaagaccggcacctggagcggccccgcccccagatgcgagctgagcaccagcgccgtgcagtgcccccacccccagatcctgagaggcagaatggtgagcggccagaaggacagatacacctacaacgacaccgtgatcttcgcctgcatgttcggcttcaccctgaagggcagcaagcagatcagatgcaacgcccagggcacctgggagcccagcgcccccgtgtgcgagaaggagtgccaggccccccccaacatcctgaacggccagaaggaggacagacacatggtgagattcgaccccggcaccagcatcaagtacagctgcaaccccggctacgtgctggtgggcgaggagagcatccagtgcaccagcgagggcgtgtggaccccccccgtgccccagtgcaaggtggccgcctgcgaggccaccggcagacagctgctgaccaagccccagcaccagttcgtgagacccgacgtgaacagcagctgcggcgagggctacaagctgagcggcagcgtgtaccaggagtgccagggcaccatcccctggttcatggagatcagactgtgcaaggagatcacctgcccccccccccccgtgatctacaacggcgcccacaccggcagcagcctggaggacttcccctacggcaccaccgtgacctacacctgcaaccccggccccgagagaggcgtggagttcagcctgatcggcgagagcaccatcagatgcaccagcaacgaccaggagagaggcacctggagcggccccgcccccctgtgcaagctgagcctgctggccgtgcagtgcagccacgtgcacatcgccaacggctacaagatcagcggcaaggaggccccctacttctacaacgacaccgtgaccttcaagtgctacagcggcttcaccctgaagggcagcagccagatcagatgcaaggccgacaacacctgggaccccgagatccccgtgtgcgagaaggagacctgccagcacgtgagacagagcctgcaggagctgcccgccggcagcagagtggagctggtgaacaccagctgccaggacggctaccagctgaccggccacgcctaccagatgtgccaggacgccgagaacggcatctggttcaagaagatccccctgtgcaaggtgatccactgccaccccccccccgtgatcgtgaacggcaagcacaccggcatgatggccgagaacttcctgtacggcaacgaggtgagctacgagtgcgaccagggcttctacctgctgggcgagaagaagctgcagtgcagaagcgacagcaagggccacggcagctggagcggccccagcccccagtgcctgagaagcccccccgtgaccagatgccccaaccccgaggtgaagcacggctacaagctgaacaagacccacagcgcctacagccacaacgacatcgtgtacgtggactgcaaccccggcttcatcatgaacggcagcagagtgatcagatgccacaccgacaacacctgggtgcccggcgtgcccacctgcatcaagaaggccttcatcggctgcccccccccccccaagacccccaacggcaaccacaccggcggcaacatcgccagattcagccccggcatgagcatcctgtacagctgcgaccagggctacctgctggtgggcgaggccctgctgctgtgcacccacgagggcacctggagccagcccgccccccactgcaaggaggtgaactgcagcagccccgccgacatggacggcatccagaagggcctggagcccagaaagatgtaccagtacggcgccgtggtgaccctggagtgcgaggacggctacatgctggagggcagcccccagagccagtgccagagcgaccaccagtggaacccccccctggccgtgtgcagaagcagaagcctggcccccgtgctgtgcggcatcgccgccggcctgatcctgctgaccttcctgatcgtgatcaccctgtacgtgatcagcaagcacagagccagaaactactacaccgacaccagccagaaggaggccttccacctggaggccagagaggtgtacagcgtggacccctacaaccccgccagctag

SEQ ID NO: 121848 - DNA, 2916 bp, Artificial Sequence
  derived and/or modified sequence
atgggcgccgccggcctgctgggcgtgttcctggccctggtggcccccggcgtgctgggcatcagctgcggcagccccccccccatcctgaacggcagaatcagctactacagcacccccatcgccgtgggcaccgtgatcagatacagctgcagcggcaccttcagactgatcggcgagaagagcctgctgtgcatcaccaaggacaaggtggacggcacctgggacaagcccgcccccaagtgcgagtacttcaacaagtacagcagctgccccgagcccatcgtgcccggcggctacaagatcagaggcagcaccccctacagacacggcgacagcgtgaccttcgcctgcaagaccaacttcagcatgaacggcaacaagagcgtgtggtgccaggccaacaacatgtggggccccaccagactgcccacctgcgtgagcgtgttccccctggagtgccccgccctgcccatgatccacaacggccaccacaccagcgagaacgtgggcagcatcgcccccggcctgagcgtgacctacagctgcgagagcggctacctgctggtgggcgagaagatcatcaactgcctgagcagcggcaagtggagcgccgtgccccccacctgcgaggaggccagatgcaagagcctgggcagattccccaacggcaaggtgaaggagccccccatcctgagagtgggcgtgaccgccaacttcttctgcgacgagggctacagactgcagggcccccccagcagcagatgcgtgatcgccggccagggcgtggcctggaccaagatgcccgtgtgcgaggagatcttctgccccagccccccccccatcctgaacggcagacacatcggcaacagcctggccaacgtgagctacggcagcatcgtgacctacacctgcgaccccgaccccgaggagggcgtgaacttcatcctgatcggcgagagcaccctgagatgcaccgtggacagccagaagaccggcacctggagcggccccgcccccagatgcgagctgagcaccagcgccgtgcagtgcccccacccccagatcctgagaggcagaatggtgagcggccagaaggacagatacacctacaacgacaccgtgatcttcgcctgcatgttcggcttcaccctgaagggcagcaagcagatcagatgcaacgcccagggcacctgggagcccagcgcccccgtgtgcgagaaggagtgccaggccccccccaacatcctgaacggccagaaggaggacagacacatggtgagattcgaccccggcaccagcatcaagtacagctgcaaccccggctacgtgctggtgggcgaggagagcatccagtgcaccagcgagggcgtgtggaccccccccgtgccccagtgcaaggtggccgcctgcgaggccaccggcagacagctgctgaccaagccccagcaccagttcgtgagacccgacgtgaacagcagctgcggcgagggctacaagctgagcggcagcgtgtaccaggagtgccagggcaccatcccctggttcatggagatcagactgtgcaaggagatcacctgcccccccccccccgtgatctacaacggcgcccacaccggcagcagcctggaggacttcccctacggcaccaccgtgacctacacctgcaaccccggccccgagagaggcgtggagttcagcctgatcggcgagagcaccatcagatgcaccagcaacgaccaggagagaggcacctggagcggccccgcccccctgtgcaagctgagcctgctggccgtgcagtgcagccacgtgcacatcgccaacggctacaagatcagcggcaaggaggccccctacttctacaacgacaccgtgaccttcaagtgctacagcggcttcaccctgaagggcagcagccagatcagatgcaaggccgacaacacctgggaccccgagatccccgtgtgcgagaaggagacctgccagcacgtgagacagagcctgcaggagctgcccgccggcagcagagtggagctggtgaacaccagctgccaggacggctaccagctgaccggccacgcctaccagatgtgccaggacgccgagaacggcatctggttcaagaagatccccctgtgcaaggtgatccactgccaccccccccccgtgatcgtgaacggcaagcacaccggcatgatggccgagaacttcctgtacggcaacgaggtgagctacgagtgcgaccagggcttctacctgctgggcgagaagaagctgcagtgcagaagcgacagcaagggccacggcagctggagcggccccagcccccagtgcctgagaagcccccccgtgaccagatgccccaaccccgaggtgaagcacggctacaagctgaacaagacccacagcgcctacagccacaacgacatcgtgtacgtggactgcaaccccggcttcatcatgaacggcagcagagtgatcagatgccacaccgacaacacctgggtgcccggcgtgcccacctgcatcaagaaggaggtgaactgcagcagccccgccgacatggacggcatccagaagggcctggagcccagaaagatgtaccagtacggcgccgtggtgaccctggagtgcgaggacggctacatgctggagggcagcccccagagccagtgccagagcgaccaccagtggaacccccccctggccgtgtgcagaagcagaagcctggcccccgtgctgtgcggcatcgccgccggcctgatcctgctgaccttcctgatcgtgatcaccctgtacgtgatcagcaagcacagagccagaaactactacaccgacaccagccagaaggaggccttccacctggaggccagagaggtgtacagcgtggacccctacaaccccgccagctag

SEQ ID NO: 121849 - DNA, 3021 bp, Artificial Sequence
  derived and/or modified sequence
atgggcgccgccggcctgctgggcgtgttcctggccctggtggcccccggcgtgctgggcatcagctgcggcagccccccccccatcctgaacggcagaatcagctactacagcacccccatcgccgtgggcaccgtgatcagatacagctgcagcggcaccttcagactgatcggcgagaagagcctgctgtgcatcaccaaggacaaggtggacggcacctgggacaagcccgcccccaagtgcgagtacttcaacaagtacagcagctgccccgagcccatcgtgcccggcggctacaagatcagaggcagcaccccctacagacacggcgacagcgtgaccttcgcctgcaagaccaacttcagcatgaacggcaacaagagcgtgtggtgccaggccaacaacatgtggggccccaccagactgcccacctgcgtgagcgtgttccccctggagtgccccgccctgcccatgatccacaacggccaccacaccagcgagaacgtgggcagcatcgcccccggcctgagcgtgacctacagctgcgagagcggctacctgctggtgggcgagaagatcatcaactgcctgagcagcggcaagtggagcgccgtgccccccacctgcgaggaggccagatgcaagagcctgggcagattccccaacggcaaggtgaaggagccccccatcctgagagtgggcgtgaccgccaacttcttctgcgacgagggctacagactgcagggcccccccagcagcagatgcgtgatcgccggccagggcgtggcctggaccaagatgcccgtgtgcgaggagatcttctgccccagccccccccccatcctgaacggcagacacatcggcaacagcctggccaacgtgagctacggcagcatcgtgacctacacctgcgaccccgaccccgaggagggcgtgaacttcatcctgatcggcgagagcaccctgagatgcaccgtggacagccagaagaccggcacctggagcggccccgcccccagatgcgagctgagcaccagcgccgtgcagtgcccccacccccagatcctgagaggcagaatggtgagcggccagaaggacagatacacctacaacgacaccgtgatcttcgcctgcatgttcggcttcaccctgaagggcagcaagcagatcagatgcaacgcccagggcacctgggagcccagcgcccccgtgtgcgagaaggagtgccaggccccccccaacatcctgaacggccagaaggaggacagacacatggtgagattcgaccccggcaccagcatcaagtacagctgcaaccccggctacgtgctggtgggcgaggagagcatccagtgcaccagcgagggcgtgtggaccccccccgtgccccagtgcaaggtggccgcctgcgaggccaccggcagacagctgctgaccaagccccagcaccagttcgtgagacccgacgtgaacagcagctgcggcgagggcaaccacctgcccaccaccccctgctacctgcagtggggcacccacagagagttcctgagaagattcagcatctggaaccacggccacctgcacatgcccggccccgagagaggcgtggagttcagcctgatcggcgagagcaccatcagatgcaccagcaacgaccaggagagaggcacctggagcggccccgcccccctgtgcaagctgagcctgctggccgtgcagtgcagccacgtgcacatcgccaacggctacaagatcagcggcaaggaggccccctacttctacaacgacaccgtgaccttcaagtgctacagcggcttcaccctgaagggcagcagccagatcagatgcaaggccgacaacacctgggaccccgagatccccgtgtgcgagaaggagacctgccagcacgtgagacagagcctgcaggagctgcccgccggcagcagagtggagctggtgaacaccagctgccaggacggctaccagctgaccggccacgcctaccagatgtgccaggacgccgagaacggcatctggttcaagaagatccccctgtgcaaggtgatccactgccaccccccccccgtgatcgtgaacggcaagcacaccggcatgatggccgagaacttcctgtacggcaacgaggtgagctacgagtgcgaccagggcttctacctgctgggcgagaagaagctgcagtgcagaagcgacagcaagggccacggcagctggagcggccccagcccccagtgcctgagaagcccccccgtgaccagatgccccaaccccgaggtgaagcacggctacaagctgaacaagacccacagcgcctacagccacaacgacatcgtgtacgtggactgcaaccccggcttcatcatgaacggcagcagagtgatcagatgccacaccgacaacacctgggtgcccggcgtgcccacctgcatcaagaaggccttcatcggctgcccccccccccccaagacccccaacggcaaccacaccggcggcaacatcgccagattcagccccggcatgagcatcctgtacagctgcgaccagggctacctgctggtgggcgaggccctgctgctgtgcacccacgagggcacctggagccagcccgccccccactgcaaggaggtgaactgcagcagccccgccgacatggacggcatccagaagggcctggagcccagaaagatgtaccagtacggcgccgtggtgaccctggagtgcgaggacggctacatgctggagggcagcccccagagccagtgccagagcgaccaccagtggaacccccccctggccgtgtgcagaagcagaagcctggcccccgtgctgtgcggcatcgccgccggcctgatcctgctgaccttcctgatcgtgatcaccctgtacgtgatcagcaagcacagagccagaaactactacaccgacaccagccagaaggaggccttccacctggaggccagagaggtgtacagcgtggacccctacaaccccgccagctag

SEQ ID NO: 121850 - protein, 699 aa, Artificial Sequence
  derived and/or modified sequence
MRWLLLYYALCFSLSKASAHTVELNNMFGQIQSPGYPDSYPSDSEVTWNITVPDGFRIKLYFMHFNLESSYLCEYDYVKVETEDQVLATFCGRETTDTEQTPGQEVVLSPGSFMSITFRSDFSNEERFTGFDAHYMAVDVDECKEREDEELSCDHYCHNYIGGYYCSCRFGYILHTDNRTCRVECSDNLFTQRTGVITSPDFPNPYPKSSECLYTIELEEGFMVNLQFEDIFDIEDHPEVPCPYDYIKIKVGPKVLGPFCGEKAPEPISTQSHSVLILFHSDNSGENRGWRLSYRAAGNECPELQPPVHGKIEPSQAKYFFKDQVLVSCDTGYKVLKDNVEMDTFQIECLKDGTWSNKIPTCKIVDCRAPGELEHGLITFSTRNNLTTYKSEIKYSCQEPYYKMLNNNTGIYTCSAQGVWMNKVLGRSLPTCLPVCGLPKFSRKLMARIFNGRPAQKGTTPWIAMLSHLNGQPFCGGSLLGSSWIVTAAHCLHQSLDPEDPTLRDSDLLSPSDFKIILGKHWRLRSDENEQHLGVKHTTLHPQYDPNTFENDVALVELLESPVLNAFVMPICLPEGPQQEGAMVIVSGWGKQFLQRFPETLMEIEIPIVDHSTCQKAYAPLKKKVTRDMICAGEKEGGKDACAGDSGGPMVTLNRERGQWYLVGTVSWGDDCGKKDRYGVYSYIHHNKDWIQRVTGVRN

SEQ ID NO: 121851 - DNA, 2100 bp, Artificial Sequence
  derived and/or modified sequence
atgaggtggctccttctttactatgccctgtgtttctctctgagtaaagcgagtgcacacacagtagagcttaacaatatgttcggccagatccagagtccgggataccctgatagctacccgtcagactccgaagttacttggaatatcactgtgccagacggcttccgaatcaagctgtatttcatgcacttcaatcttgaatcctcatatctctgtgagtatgactacgttaaggtggaaaccgaagaccaggtcttggccacattctgtggccgcgagacaactgacacggagcaaacccccggccaggaagtggtgctctctcccggtagcttcatgagcataacctttcgaagcgatttcagcaacgaggagcgctttacagggttcgacgcgcattatatggccgtggatgtggacgaatgtaaagaaagagaggatgaagaactgtcatgcgatcattattgtcataattacatcggcggctattactgctcctgccgattcggctatatcctacacacagacaatcggacatgcagagttgaatgcagcgacaacctctttacgcagcgaaccggtgttatcacaagcccggactttcccaacccttatccaaagagctcggaatgtttgtataccatcgaactcgaggagggtttcatggtaaatttgcagttcgaagatatcttcgacattgaggatcaccctgaggtgccttgcccatatgattacattaagataaaagtgggcccaaaagttctcggccctttctgtggagagaaagcacctgagccaataagcacccagagccatagtgtgttgatcctgttccattccgacaattcaggtgagaatcgcgggtggcgtctttcttatcgggcggctggaaacgagtgccccgagctgcagcctcccgtgcacggaaagattgagccctctcaggctaagtactttttcaaggaccaggtcttggtgagctgcgacaccggctataaagtgctgaaagacaacgtggagatggacacgttccagatcgaatgtcttaaggacggaacctggtccaacaagatcccaacttgcaagatcgtcgattgccgcgcgcccggagaattggaacacggcctgattacgtttagcactaggaacaatctgacgacttacaagagcgagattaagtattcgtgtcaggagccttattacaagatgcttaacaacaataccggtatatatacttgttcagcacagggcgtatggatgaataaggtccttggtagatcgctgcccacctgtctgcccgtctgtggtcttcctaagttctcccggaagttgatggcaagaatattcaacggcagaccagcccagaaaggaaccaccccatggattgccatgctgtcgcaccttaatggccaacctttctgtggcgggtctctgctgggctcctcgtggatcgtgactgccgcacattgccttcaccagtctctggaccccgaagatcccacattgcgggactcagatcttctgtccccctcggactttaagattattttagggaaacattggcggctgcgttcggatgaaaatgagcagcacctgggggtaaaacatacaaccctccacccacagtacgatcccaatacctttgagaacgacgtcgccctggtcgaactgctggaaagccccgtgctaaatgctttcgtgatgccaatttgtctgccagaggggccccaacaggagggcgccatggtgattgtctcagggtggggcaagcagttcttacaaagattccccgaaaccttgatggagatagagatcccaattgtcgatcacagcacttgtcaaaaagcatacgctcctctcaagaaaaaagtaacgagggacatgatctgtgccggtgaaaaggaaggtggcaaagacgcttgtgccggtgactccggggggccaatggtcacactcaatcgcgaacgcggccagtggtacctggttgggacagtgtcatggggagacgattgcggcaaaaaggataggtacggggtgtacagttacatacaccacaacaaggattggatacagcgggtgacaggggtccgaaattag

SEQ ID NO: 121852 - DNA, 2100 bp, Artificial Sequence
  derived and/or modified sequence
atgcgctggctgctgctgtactatgccctgtgcttcagcctgagcaaggccagcgcccacacagtggagctgaacaacatgtttggccagatccagagccctggctacccagacagctaccccagcgacagcgaggtgacctggaacatcaccgtgcctgatggcttccgcatcaagctgtacttcatgcacttcaacctggagagcagctacctgtgtgaatatgactatgtgaaggtggagacagaggaccaggtgctggccaccttctgtggccgggagaccacagacacagagcagaccccaggccaggaggtggtgctgagccctggcagcttcatgagcatcaccttcagaagtgacttcagcaatgaggagcgcttcaccggctttgatgcccactacatggctgtggatgtggatgagtgcaaggagagagaagatgaggagctgagctgtgaccactactgccacaactacatcggcggctactactgcagctgccgcttcggctacatcctgcacacagacaacagaacctgccgggtggagtgcagcgacaacctcttcacccagaggactggagtcatcaccagcccagacttccccaacccctaccccaagagcagtgaatgtctgtacaccatcgagctggaggagggcttcatggtgaacctgcagtttgaggacatctttgatattgaggaccaccctgaggtgccctgcccctatgactacatcaagatcaaggtgggccccaaggtgctgggccccttctgtggggagaaggcccctgagcccatcagcacccagagccacagcgtgctgatcctcttccacagcgacaacagcggggagaacagaggctggaggctgagctacagagctgctggaaatgaatgtcctgagctgcagccccctgtgcacggcaagattgagcccagccaggccaagtacttcttcaaggaccaggtgctggtgtcctgtgacaccggctacaaggtgctgaaggacaacgtggagatggacaccttccagatcgagtgcctgaaggatggcacctggagcaacaagatccccacctgcaagatcgtggactgccgggcccctggagagctggagcacggcctcatcaccttcagcaccaggaacaacctgaccacctacaagtctgagatcaagtacagctgccaggagccctactacaagatgctgaacaacaacacaggcatctacacctgcagcgcccagggcgtgtggatgaacaaggtgctgggccgcagcctgcccacctgcctgcctgtgtgtggcctgcccaagttcagcaggaagctgatggcccgcatcttcaacggccggcctgcccagaagggcaccaccccctggatcgccatgctgagccacctgaatggccagcccttctgtggcggcagcctgctgggcagctcctggatcgtgacagctgcccactgcctgcaccagagcctggaccctgaggaccccaccctgcgggacagcgacctgctgagccccagcgacttcaagatcatcctgggcaagcactggaggctgcggagtgatgaaaatgagcagcacctgggcgtgaagcacaccaccctgcacccccagtatgaccccaacacctttgaaaatgatgtggccctggtggagctgctggagagccctgtgctgaatgcctttgtgatgcccatctgcctgcctgagggcccccagcaggagggcgccatggtgattgtgtctggctggggcaagcagttcctgcagcgcttccctgagaccctgatggagattgagatccccatcgtggaccacagcacctgccagaaggcctatgcccccctgaagaagaaggtgacccgggacatgatctgtgccggggagaaggagggcggcaaggatgcctgtgccggggacagcggcggccccatggtgaccctgaaccgggagcggggccagtggtacctggtgggcaccgtgtcctggggagatgactgtgggaagaaggacagatatggagtgtacagctacatccaccacaacaaggactggatccagagggtgactggagtgaggaactag

SEQ ID NO: 121853 - DNA, 4407 bp, Artificial Sequence
  derived and/or modified sequence
acacacagagtgatacaaatacctgcttgagcccctcagttattttctctcaagggctgaagtcagccacacaggataaaggagggaagggaaggagcagatcttttcggtaggaagacagattttgttgtcaggttcctgggagtgcaagagcaagtcaaaggagagagagaggagagaggaaaagccagagggagagagggggagaggggatctgttgcaggcaggggaaggcgtgacctgaatggagaatgccagccaattccagagacacacagggacctcagaacaaagataaggcatcacggacaccacaccgggcacgagctcacaggcaagtcaagctgggaggaccaaggccgggcagccgggagcacccaaggcaggaaaatgaggtggctgcttctctattatgctctgtgcttctccctgtcaaaggcttcagcccacaccgtggagctaaacaatatgtttggccagatccagtcgcctggttatccagactcctatcccagtgattcagaggtgacttggaatatcactgtcccagatgggtttcggatcaagctttacttcatgcacttcaacttggaatcctcctacctttgtgaatatgactatgtgaaggtagaaactgaggaccaggtgctggcaaccttctgtggcagggagaccacagacacagagcagactcccggccaggaggtggtcctctcccctggctccttcatgtccatcactttccggtcagatttctccaatgaggagcgtttcacaggctttgatgcccactacatggctgtggatgtggacgagtgcaaggagagggaggacgaggagctgtcctgtgaccactactgccacaactacattggcggctactactgctcctgccgcttcggctacatcctccacacagacaacaggacctgccgagtggagtgcagtgacaacctcttcactcaaaggactggggtgatcaccagccctgacttcccaaacccttaccccaagagctctgaatgcctgtataccatcgagctggaggagggtttcatggtcaacctgcagtttgaggacatatttgacattgaggaccatcctgaggtgccctgcccctatgactacatcaagatcaaagttggtccaaaagttttggggcctttctgtggagagaaagccccagaacccatcagcacccagagccacagtgtcctgatcctgttccatagtgacaactcgggagagaaccggggctggaggctctcatacagggctgcaggaaatgagtgcccagagctacagcctcctgtccatgggaaaatcgagccctcccaagccaagtatttcttcaaagaccaagtgctcgtcagctgtgacacaggctacaaagtgctgaaggataatgtggagatggacacattccagattgagtgtctgaaggatgggacgtggagtaacaagattcccacctgtaaaattgtagactgtagagccccaggagagctggaacacgggctgatcaccttctctacaaggaacaacctcaccacatacaagtctgagatcaaatactcctgtcaggagccctattacaagatgctcaacaataacacaggtatatatacctgttctgcccaaggagtctggatgaataaagtattggggagaagcctacccacctgccttccagtgtgtgggctccccaagttctcccggaagctgatggccaggatcttcaatggacgcccagcccagaaaggcaccactccctggattgccatgctgtcacacctgaatgggcagcccttctgcggaggctcccttctaggctccagctggatcgtgaccgccgcacactgcctccaccagtcactcgatccggaagatccgaccctacgtgattcagacttgctcagcccttctgacttcaaaatcatcctgggcaagcattggaggctccggtcagatgaaaatgaacagcatctcggcgtcaaacacaccactctccacccccagtatgatcccaacacattcgagaatgacgtggctctggtggagctgttggagagcccagtgctgaatgccttcgtgatgcccatctgtctgcctgagggaccccagcaggaaggagccatggtcatcgtcagcggctgggggaagcagttcttgcaaaggttcccagagaccctgatggagattgaaatcccgattgttgaccacagcacctgccagaaggcttatgccccgctgaagaagaaagtgaccagggacatgatctgtgctggggagaaggaagggggaaaggacgcctgtgcgggtgactctggaggccccatggtgaccctgaatagagaaagaggccagtggtacctggtgggcactgtgtcctggggtgatgactgtgggaagaaggaccgctacggagtatactcttacatccaccacaacaaggactggatccagagggtcaccggagtgaggaactgaatttggctcctcagccccagcaccaccagctgtgggcagtcagtagcagaggacgatcctccgatgaaagcagccatttctcctttccttcctcccatcccccctccttcggcctatccattactgggcaatagagcaggtatcttcacccccttttcactctctttaaagagatggagcaagagagtggtcagaacacaggccgaatccaggctctatcacttactagtttgcagtgctgggcaggtgacttcatctcttcgaacttcagtttcttcataagatggaaatgctataccttacctacctcgtaaaagtctgatgaggaaaagattaactaatagatgcatagcacttaacagagtgcatagcatacactgttttcaataaatgcaccttagcagaaggtcgatgtgtctaccaggcagacgaagctctcttacaaacccctgcctgggtcttagcattgatcagtgacacacctctcccctcaaccttgaccatctccatctgcccttaaatgctgtatgcttttttgccaccgtgcaacttgcccaacatcaatcttcaccctcatccctaaaaaagtaaaacagacaaggttctgagtcctgtggtatgtcccctagcaaatgtaactaggaacatgcactagatgacagattgcgggagggcctgagagaagcagggacaggagggagcctggggattgtggtttgggaaggcagacacctggttctagaactagctctgcccttagccccctgtatgaccctatgcaagtcctcctccctcatctcaaagggtcctcaaagctctgacgatctaagatacaatgaagccattttccccctgataagatgaggtaaagccaatgtaaccaaaaggcaaaaattacaatcggttcaaaggaactttgatgcagacaaaatgctgctgctgctgctcctgaaatacccacccctttccactacgggtgggttcccaaggacatgggacaggcaaagtgtgagccaaaggatccttccttattcctaagcagagcatctgctctgggccctggcctccttcccttcttgggaaactgggctgcatgaggtgggccctggtagtttgtaccccaggcccctatactcttccttcctatgtccacagctgaccccaagcagccgttccccgactcctcacccctgagcctcaccctgaactccctcatcttgcaaggccataagtgttttccaagcaaaatgcctctcccatcctctctcaggaagcttctagagactttatgccctccagagctccaagatataagccctccaagggatcagaagctccaagttcctgtcttctgttttatagaaattgatcttccctgggggactttaactcttgacctgtatgcagctgttggagtaattccaggtctcttgaaaaaaaagaggaagataatggagaatgagaacatatatatatatatattaagccccaggctgaatactcagggacagcaattcacagcctgcctctggttctataaacaagtcattctacctctttgtgccctgctgtttattctgtaaggggaaggtggcaatgggacccagctccatcagacacttgtcaagctagcagaaactccattttcaatgccaaagaagaactgtaatgctgttttggaatcatcccaaggcatcccaagacaccatatcttcccatttcaagcactgcctgggcacaccccaacatcccaggctgtggtggctcctgtgggaactacctagatgaagagagtatcatttataccttctaggagctcctattgggagacatgaaacatatgtaattgactaccatgtaatagaacaaaccctgccaagtgctgctttggaaagtcatggaggtaaaagaaagacc

SEQ ID NO: 121854 - DNA, 2100 bp, Artificial Sequence
  derived and/or modified sequence
atgcggtggctgctgctgtactacgccctgtgcttcagcctgagcaaggccagcgcacacacagtagagttgaacaatatgtttggacagatccagagtcccggatatccagactcttatcccagcgattccgaggtcacttggaatatcactgtgccagacgggttcagaatcaaactgtacttcatgcattttaacctcgaatcatcctatctgtgcgaatacgactatgtaaaagtggagacagaagaccaggttttggctacgttctgcggacgcgaaactaccgacactgagcagactccggggcaggaagtggtgctgtcccctggaagtttcatgtccatcacctttcggtctgacttcagtaacgaggaaagattcaccggtttcgatgcccattatatggccgtggatgtggacgagtgcaaggaaagagaggatgaggagctgagctgcgatcattactgccataattacatcggtgggtattactgttcttgtagattcggttacatcctgcatacagataatcggacatgccgcgtggaatgttcagataacctgtttactcagagaacaggcgtgattacatctccggatttccccaacccctatcctaaatcctccgagtgcctctataccatcgaattggaggagggcttcatggtcaacctgcaattcgaggacatttttgatattgaagatcatcccgaggtaccttgtccctatgattacatcaaaatcaaggtggggccaaaagtgcttggccccttttgtggggagaaagcgcccgaacctatcagcacccagtcgcactctgtcctcatactttttcattccgataattccggagagaaccgtggctggcggctgtcctacagggcagccggaaatgagtgcccagaactccagcccccggtacacgggaagattgagcccagccaggccaaatacttctttaaggaccaggtattggtgtcatgcgatacgggatataaagtgttgaaggataatgtggagatggacacgtttcagatcgagtgcctgaaagacggcacatggagcaataaaatccccacgtgcaaaattgtagactgtcgcgcccctggagagcttgaacacggtctcattactttctcgaccagaaataacctgacaacttataagtccgagatcaaatacagctgccaggagccatactacaagatgttgaacaacaatacaggcatttacacatgctccgctcagggcgtttggatgaataaggtactgggccgcagtctgcccacctgcctgcccgtatgcggactgcccaaattctcaaggaaactcatggcacgaattttcaatggcagacctgcgcagaagggcactaccccttggattgccatgctgtcacatctcaatgggcaaccattttgtggaggaagcctcctaggctcttcctggatcgtcacagcagcacattgtctgcatcaaagcctggatccagaagatccaaccctccgcgactctgacctgctgtccccctcagactttaagatcattctcggcaaacactggcgattgaggtccgatgaaaacgagcagcacctgggtgtgaaacacaccaccttacacccccagtacgaccctaatacctttgaaaatgatgtggcgctcgtggaactattggagtccccagtcctcaatgcatttgttatgccaatttgcctgcctgaagggcctcagcaggaaggcgcgatggtcattgtatccgggtggggcaagcagtttctacagcgattccctgaaaccctgatggaaatcgagatcccaatagtcgatcatagcacatgccagaaggcatatgcaccgctaaagaagaaagtgacacgtgacatgatttgtgccggggaaaaggaagggggtaaagatgcatgtgcaggggacagtgggggtccaatggtgacccttaatagagagagaggccagtggtatttggtgggcaccgtgtcgtggggggatgattgtggcaagaaagaccgttacggggtctactcatatattcaccacaacaaagattggattcagcgggtaacaggtgttcgcaactag

SEQ ID NO: 121855 - DNA, 2100 bp, Artificial Sequence
  derived and/or modified sequence
atgagatggctcctgctatattatgccctgtgctttagcttgtcaaaagcatccgcccatacggtcgagttgaataacatgttcggtcagatccagagccctggataccccgacagctatccaagtgatagtgaagttacatggaacatcaccgtgcccgatggctttcggatcaaactctacttcatgcacttcaaccttgagagttcatatctgtgcgaatacgactatgtaaaagttgaaactgaggatcaggtgttggccactttttgtggcagagaaacaactgacaccgagcagacaccgggtcaggaagtagtgttgtctccaggatcgtttatgagcattacattccgctctgatttctcaaacgaagaacgctttacaggttttgacgctcattacatggctgtggatgttgacgaatgtaaagaaagggaagatgaggagcttagctgtgatcattactgtcacaactacattgggggatactactgtagctgcagattcggttacatcttgcatacagacaatagaacatgtcgggtagaatgtagtgacaacctattcacacagcgaacgggagtaatcactagcccagattttccaaacccgtacccaaagagtagtgagtgcctgtacactatcgagctggaggagggtttcatggttaacctgcaatttgaggatatatttgacatagaagaccaccctgaggtcccttgcccgtatgattacatcaaaattaaggtcggacctaaagtcctggggcctttttgcggagagaaagctcctgaacccatctccactcaatcccacagcgttctgatcctgtttcacagcgataactccggggagaacagagggtggaggctctcttatagggctgcgggaaacgaatgtccagaacttcagccgcctgtgcatgggaaaatagagccttcacaggccaagtacttctttaaagatcaagtgttggtcagctgcgacactggatataaagtgttgaaggacaatgtggagatggatacattccagattgaatgcttaaaagacggtacatggagcaataagatacccacatgcaaaatcgtcgactgcagagcccctggcgaattagaacatgggctgatcaccttttctacccgtaataacctgacaacatataagagtgagatcaagtactcctgtcaggagccctattataagatgctgaataacaacaccggcatttacacttgctccgcccagggggtctggatgaacaaagtattagggagaagtctgcccacatgtctacctgtgtgtggactccctaaattctccaggaagctcatggcccgtattttcaacggaaggcctgcccagaagggcacaacaccctggatcgctatgctatcccatctgaatggccagcctttttgtggcggaagcttgctcgggtcctcatggattgtcacagccgctcactgtctacaccagtctctcgacccagaagatccaactctccgcgatagcgacctgctaagtccatccgacttcaagattatcctgggcaagcactggcgtctgaggagtgacgaaaatgaacagcacttgggagtcaagcacaccacactgcacccccagtacgacccgaacactttcgagaatgatgtcgcgctggtggaactgctcgagtcccccgtccttaacgccttcgtgatgcctatttgcctgcctgaggggccacagcaggagggcgctatggttatcgtgagcggatggggtaagcagtttctgcagaggttccccgaaactctcatggagatcgagatccccattgtagaccacagcacctgtcagaaggcgtatgcccctcttaagaagaaggttacacgcgatatgatctgcgccggtgagaaagagggcggtaaagatgcctgtgcgggtgactccggaggaccaatggtgacactgaaccgcgagaggggccaatggtacttggtcggcacagtcagctggggagacgactgcggtaaaaaagatcgatatggggtctactcgtacatacatcataataaggactggatccagagggttaccggtgtacgtaattag

SEQ ID NO: 121856 - DNA, 2100 bp, Artificial Sequence
  derived and/or modified sequence
atgagatggctgttgctgtattacgcactgtgcttctctctgtcaaaggcttctgctcacaccgtcgagctgaacaacatgttcggccagatacaatcccctggataccccgatagctacccgtccgactccgaggttacctggaatataaccgtcccagatggattcagaatcaagctgtatttcatgcattttaacttggaatcaagctacctgtgcgagtacgactatgtcaaggtagaaacggaagaccaggtcctggccacattttgcggcagagagaccaccgacaccgagcagactcctgggcaggaagtcgtgctctccccaggaagctttatgtctatcacgttcagatccgactttagcaacgaagagcgttttacagggttcgatgcccactatatggcagtggacgtagatgagtgcaaagagagggaagatgaagaattatcctgcgaccactattgccataattacatcggcggatactactgctcttgtcgcttcggttatattttgcatacagataatcgcacctgccgagtcgaatgtagtgataatttgtttacccagaggacgggagtgatcacatctcccgacttccctaacccctacccaaaatcgtccgagtgtctgtatactatcgaattagaagaggggttcatggtgaatcttcagtttgaggacatttttgacatagaggaccatcctgaagttccatgtccatatgattatattaaaataaaggtggggcccaaagttctcgggcccttctgcggagaaaaagcacccgagcctatatccactcagtcccacagtgttttaatcctgtttcactcagacaactccggcgaaaaccgcggctggcgtctttcataccgcgctgcgggaaatgaatgccctgaacttcagcctcccgtacacgggaaaattgaaccatcccaagctaagtatttttttaaagatcaagtgcttgtttcgtgcgacactggctacaaggttctcaaggataacgtggaaatggacactttccaaatcgaatgtctgaaggacggcacctggagcaacaagatacctacttgcaagattgttgactgtagagccccaggtgaactggaacatggccttatcacattctcgacccggaataacctcaccacatataagtcagaaatcaaatacagttgtcaggaaccttattacaagatgctgaacaacaatactggaatatacacatgttcggcacaaggcgtgtggatgaacaaggtactgggcagatcgcttcccacctgccttccagtatgtggattacctaagttctctagaaaattgatggcacgcatttttaacggacgacctgctcagaagggcacaactccctggatcgccatgctgagtcatctgaacgggcaacccttttgtggaggtagtctactcgggtcaagctggattgtcacagccgcccattgcctgcatcagtcacttgatccagaggaccctaccctcagggactccgatcttctgagccctagcgatttcaagatcatccttgggaagcactggcgcctgcgatcagatgaaaacgagcagcacctaggcgtgaaacataccaccctgcacccccagtatgacccaaacactttcgagaatgatgttgccttagtggaattactggaatctcccgtattgaacgctttcgtcatgcctatctgcttaccagaagggcctcagcaagagggcgctatggtgatcgtttctggctggggcaaacaattccttcagcgatttccagagacccttatggaaattgaaattccaatcgtggatcactctacatgccaaaaggcttatgcccctctcaagaagaaggtcacacgtgatatgatctgcgcaggcgagaaagaggggggcaaggatgcttgcgctggggactccggtggccccatggtgaccctgaaccgcgagagaggtcagtggtatttggtgggcactgtgagctggggagatgattgtgggaaaaaagatcggtacggcgtgtattcatatatacatcacaataaggattggatccagcgggtgacgggagtgcgcaactag

SEQ ID NO: 121857 - DNA, 2100 bp, Artificial Sequence
  derived and/or modified sequence
atgcgctggctccttctgtactacgctttatgtttctcactgagcaaagcctcagctcacacggtagagttaaataacatgtttggacaaattcaatctcccggataccctgactcctatccttctgatagcgaggtgacttggaatattaccgtaccagatggctttcgaatcaaactgtacttcatgcattttaacctggagtcgagttacctctgcgaatacgactatgtgaaggtcgagaccgaagatcaagtactggccaccttttgcggccgcgagactactgatactgagcagacgcctggccaggaagtcgtcctgtctccaggaagcttcatgtccatcacgtttcggtcggatttttcgaacgaagaacgattcactggtttcgacgcccattacatggctgtagacgttgacgagtgcaaagaacgagaagatgaggaactgtcttgcgatcactattgtcacaactatatcggaggctattactgcagctgtagattcgggtacattctgcataccgataatagaacctgtcgtgtcgaatgctctgacaacctattcactcaacgcacaggtgttatcacctcacctgatttccctaatccctacccgaaatcatcagaatgtttatataccattgaactggaggagggctttatggttaacctgcagtttgaagacatctttgatattgaagaccacccagaagtcccatgcccatacgactatatcaaaattaaggtggggcccaaagtgctcggaccgttctgtggcgagaaggcccccgagccaataagcacccaatcacatagcgtacttattctttttcactcagacaactccggagagaaccgcggttggaggctgtcctacagagcagcaggcaacgaatgccccgaactgcaaccccctgtacatggcaagattgagccgtcacaagcaaaatattttttcaaggaccaggtgctggtttcctgcgatactgggtataaggttctcaaagacaacgtggaaatggatacgttccagatcgaatgtttgaaggatggaacatggtcaaacaaaattcccacctgtaagatcgtggactgtcgcgctccgggagaactcgaacacggtctaattaccttctctacccgaaacaacctgacgacatacaagtcagaaattaaatattcatgccaggaaccctactacaaaatgctcaataataacacgggaatctacacatgcagtgcccagggcgtatggatgaataaagttctggggcgatctttaccaacgtgcctcccagtctgtggcctacctaagttttcacgtaaactgatggctcgcatctttaacggacgacctgcacagaaagggacaactccatggatcgctatgttatcccacttaaatggacaacctttttgcggggggtcactcctcggctcctcgtggatcgtaactgcggctcattgccttcaccaatctctggatccagaagatcccacactaagggatagtgatttgcttagtccaagtgactttaaaatcatcctgggtaaacactggagattgagatcagacgaaaatgagcagcacctgggagtgaagcacactactctccacccccagtatgaccccaatacatttgagaacgacgtggccctggttgagctgcttgaatcgcccgtcctgaatgcttttgtgatgccaatctgtctccccgagggaccacagcaagaaggagctatggtaattgtgtccggctggggaaagcaatttctgcaacgctttccagaaaccctcatggaaattgaaattcctatagtcgaccacagcacttgtcagaaagcctatgcccccctcaaaaaaaaggtaacgagggacatgatttgcgcaggtgaaaaggaaggcggaaaagacgcgtgcgccggagactctggaggtcctatggtaaccttgaacagagaaaggggccagtggtacctggtggggacagtgtcttggggagacgactgcggaaagaaagatagatacggggtgtacagctacattcaccacaacaaagattggatacaacgtgttacaggggtgcgaaactag

SEQ ID NO: 121858 - DNA, 2100 bp, Artificial Sequence
  derived and/or modified sequence
atgagatggctgctgctgtactacgccctgtgcttcagcctgagcaaggccagcgcccacaccgtggagctgaacaacatgttcggccagatccagagccccggctaccccgacagctaccccagcgacagcgaggtgacctggaacatcaccgtgcccgacggcttcagaatcaagctgtacttcatgcacttcaacctggagagcagctacctgtgcgagtacgactacgtgaaggtggagaccgaggaccaggtgctggccaccttctgcggcagagagaccaccgacaccgagcagacccccggccaggaggtggtgctgagccccggcagcttcatgagcatcaccttcagaagcgacttcagcaacgaggagagattcaccggcttcgacgcccactacatggccgtggacgtggacgagtgcaaggagagagaggacgaggagctgagctgcgaccactactgccacaactacatcggcggctactactgcagctgcagattcggctacatcctgcacaccgacaacagaacctgcagagtggagtgcagcgacaacctgttcacccagagaaccggcgtgatcaccagccccgacttccccaacccctaccccaagagcagcgagtgcctgtacaccatcgagctggaggagggcttcatggtgaacctgcagttcgaggacatcttcgacatcgaggaccaccccgaggtgccctgcccctacgactacatcaagatcaaggtgggccccaaggtgctgggccccttctgcggcgagaaggcccccgagcccatcagcacccagagccacagcgtgctgatcctgttccacagcgacaacagcggcgagaacagaggctggagactgagctacagagccgccggcaacgagtgccccgagctgcagccccccgtgcacggcaagatcgagcccagccaggccaagtacttcttcaaggaccaggtgctggtgagctgcgacaccggctacaaggtgctgaaggacaacgtggagatggacaccttccagatcgagtgcctgaaggacggcacctggagcaacaagatccccacctgcaagatcgtggactgcagagcccccggcgagctggagcacggcctgatcaccttcagcaccagaaacaacctgaccacctacaagagcgagatcaagtacagctgccaggagccctactacaagatgctgaacaacaacaccggcatctacacctgcagcgcccagggcgtgtggatgaacaaggtgctgggcagaagcctgcccacctgcctgcccgtgtgcggcctgcccaagttcagcagaaagctgatggccagaatcttcaacggcagacccgcccagaagggcaccaccccctggatcgccatgctgagccacctgaacggccagcccttctgcggcggcagcctgctgggcagcagctggatcgtgaccgccgcccactgcctgcaccagagcctggaccccgaggaccccaccctgagagacagcgacctgctgagccccagcgacttcaagatcatcctgggcaagcactggagactgagaagcgacgagaacgagcagcacctgggcgtgaagcacaccaccctgcacccccagtacgaccccaacaccttcgagaacgacgtggccctggtggagctgctggagagccccgtgctgaacgccttcgtgatgcccatctgcctgcccgagggcccccagcaggagggcgccatggtgatcgtgagcggctggggcaagcagttcctgcagagattccccgagaccctgatggagatcgagatccccatcgtggaccacagcacctgccagaaggcctacgcccccctgaagaagaaggtgaccagagacatgatctgcgccggcgagaaggagggcggcaaggacgcctgcgccggcgacagcggcggccccatggtgaccctgaacagagagagaggccagtggtacctggtgggcaccgtgagctggggcgacgactgcggcaagaaggacagatacggcgtgtacagctacatccaccacaacaaggactggatccagagagtgaccggcgtgagaaactag

SEQ ID NO: 121859 - protein, 137 aa, Artificial Sequence
  derived and/or modified sequence
MTMETVESQHDGSITASLTESKSAHVQTQTGQNSIPALAQVAAIAETDESAESEGVIDSHKRREILSRRPSYRKILNELSSDVPGVPKIEEERSEEEGTPPSIATMAVPTSIYQTSTGQYSMYAAIRYDTVLALSLL

SEQ ID NO: 121860 - DNA, 1308 bp, Artificial Sequence
  derived and/or modified sequence
gctggcggccggcagggggcggagttcgagcctggatttttttcctcggggcctcccccgggaggccgtcccggcgtgggggaggggaggacggggcgggaggacgcggttcggtcggctgcagcgctacttttggtccggggtcggcagggaggccgcggctaccgcatcacagctgacgtgaggactacgtggggccgctgccggctccgggttgctgggcggcggcgccgctgctgagcggcggtcgggctcgccgtctccacctcctcgcgtccgtaatcagtgacgaggtccgctacgtaaatccctttgcggcggacaaatgaccatggaaacagttgaatcccagcatgatggaagtataacagcttctttgacagagagcaagtctgctcatgtgcagactcagactggccaaaattcaatccctgctttagctcaggtagcagcaattgcagagacagatgaatctgcagaatcagaaggtgtaattgattctcataaacgtagagaaatcctttcacgaagaccctcttataggaaaatactgaatgaactgtcctctgatgtgcctggtgttcccaagattgaagaagagagatcagaggaagaaggaacaccacctagtattgctaccatggcagtaccaactagcatatatcagactagcacggggcaatacagtatgtatgctgcaattcgatatgatacagtgctagctttaagtcttctctagttatattgaagcaactcaggttttggcattaaattgttccattttaaaatgcatcattaatacctaaactgtatcatagaatgaaagtatatgttaaaaagtgagatctttgtattgacagctgtcatataattttgaaaagtaaaaattttgactgccgaatatagaagaaaattttggggtaaaaaggagaatttttcctatttacatgtttatattaatctctagtaaaacattgtttttgttgtctttatgatgcatgcgaacataaatgtctgtatttcattcttgttggcttttgttacccacaattacatactattcttactaatctgagagttttctaaagtatgttttcaatgtttcactactctctactctgttaatttgtgctacagtttttcctaaaagagaatggaaaaatgatttaattttttaaactgtagcaattggatagataattttatttgaaattttacacactgaaagctctaaataaacagatacattcacattcaaaaaaaaaaaaaaaaaaaaaaaaaaaaaaaaaaaaaaaaaaaaaaaaaaaa

SEQ ID NO: 121861 - DNA, 414 bp, Artificial Sequence
  derived and/or modified sequence
atgactatggagacagtggagtcgcaacacgatggatcaatcaccgcctccctgactgaaagcaagtccgctcacgtgcagactcagacagggcagaactccattcccgcactcgcacaggtggctgccatagcagaaactgacgaaagcgctgagtccgagggagtcatagatagccataagagaagggagatccttagtcgacgcccttcttatcgaaaaatcctgaatgaactgtcatcagacgtgcccggtgttcccaagatcgaagaagagcgaagcgaggaggagggaacacccccgtccattgctactatggcagtgccaacctctatttaccagaccagcaccgggcaatattcaatgtacgccgcaattagatacgacactgtactggcattgtctttgctatag

SEQ ID NO: 121862 - DNA, 414 bp, Artificial Sequence
  derived and/or modified sequence
atgacaatggaaaccgttgagtcacaacacgacggatcaatcaccgcctctctcacggaatccaagtctgcacatgtccaaacccagaccggacagaacagtatcccagccctggcccaggtggccgccattgctgaaactgatgaatcagcagaaagtgaaggtgttatcgattctcataagaggagggagatcctgtccaggaggccctcctatcgcaagattctcaatgaattgtctagtgatgtcccaggcgtaccaaaaattgaggaagagcgctccgaggaagaaggaacgcccccatccatcgccactatggctgtgcccacatctatttaccagacaagcacaggacagtattccatgtatgccgcgattcgctatgataccgtccttgccttgtctctgctgtag

SEQ ID NO: 121863 - DNA, 414 bp, Artificial Sequence
  derived and/or modified sequence
atgaccatggagaccgtggagagccagcatgatggcagcatcacagccagcctgacagagagcaagagcgcccacgtgcagacccagacaggccagaacagcatcccagccctggcccaggtggccgccatcgccgagacagatgagagcgctgagagcgagggcgtgattgacagccacaagaggcgggagatcctgagccggcggcccagctacaggaagatcctgaatgagctgagcagtgatgtgcctggggtgcccaagattgaggaggagaggtctgaggaggagggcaccccacccagcatcgccaccatggctgtgcccaccagcatctaccagaccagcacaggccagtacagcatgtatgctgccatccgctatgacacagtgctggccctgagcctgctgtag

SEQ ID NO: 121864 - DNA, 414 bp, Artificial Sequence
  derived and/or modified sequence
atgaccatggagaccgtggagagccagcacgacggcagcatcaccgcttctcttacagaaagtaagtcagcacacgtccagacacaaactggtcaaaattccattcctgccttagcccaggtggccgccatagccgagacggatgaaagtgctgagtccgaaggagttattgatagccacaagaggcgagaaatattgagccgtaggccatcttatagaaaaattcttaacgaattgagttctgacgtgccaggggttccaaagattgaggaggagagatctgaagaggagggcacccccccatctattgccacaatggctgtgcccaccagtatatatcagaccagtaccggacagtactccatgtacgccgccattagatacgacactgtgctagctctgtcccttctctag

SEQ ID NO: 121865 - DNA, 414 bp, Artificial Sequence
  derived and/or modified sequence
atgaccatggagaccgtggagagccagcacgacggcagcatcaccgcctctctcacagagagcaaatccgcacacgtgcagacgcagactgggcagaacagcattccagcactggctcaggttgccgcaatcgccgagactgacgaatctgctgagagcgagggcgtgatagactcgcacaagaggcgcgagatactatcgcgacgtccatcttaccgaaagattttaaacgagctgagcagcgatgtgcctggggtcccaaagatcgaagaagagagatccgaagaggaagggactccgccgtcaatcgccactatggcagtccccaccagcatctaccagacgtccacaggacagtacagcatgtacgcggccatcaggtatgacaccgtcctggccctgtcattactgtag

SEQ ID NO: 121866 - DNA, 414 bp, Artificial Sequence
  derived and/or modified sequence
atgactatggaaactgtcgagtcccagcacgatggtagtatcaccgccagcctgacagaaagcaagtctgcgcatgtgcagacccagaccggccagaattcaattcccgcattggcgcaggtagccgctattgctgagacagatgagtcagccgaatcagaaggggtgatcgattcccacaaaaggcgagagatactgtctcgccgaccatcctacaggaagatactaaatgaattatcaagtgatgtccccggtgtacccaagatcgaggaggaacgatcggaggaggagggcaccccccctagcatagcaacgatggccgtgcccacctccatctaccagacttctacaggacagtactccatgtacgctgcgattcggtacgataccgtgttggccctgtccctgctttag

SEQ ID NO: 121867 - DNA, 414 bp, Artificial Sequence
  derived and/or modified sequence
atgactatggagaccgtggagtcgcagcacgacggttccatcactgcctctttgaccgaaagcaaatccgcgcacgtgcagacccagaccgggcagaactcaatccctgcactggcccaggtggctgccattgcggagacagacgaatcggcggagtcagagggagttatcgatagtcataaacgcagggagatcctgtccaggaggccaagctatagaaaaatactaaatgagctgagcagcgatgttccgggtgttcccaagatcgaagaggaaaggtctgaagaggaggggacaccaccatcaatagcaactatggccgtcccgacctctatctaccaaacctccacagggcaatacagcatgtatgctgccataaggtacgacacagtgctcgcactcagcctgctttag

SEQ ID NO: 121868 - DNA, 1203 bp, Artificial Sequence
  derived and/or modified sequence
gcctcccccgggaggccgtcccggcgtgggggaggggaggacggggcgggaggacgcggttcggtcggctgcagcgctacttttggtccggggtcggcagggaggccgcggctaccgcatcacagctgacgtgaggactacgtggggccgctgccggctccgggttgctgggcggcggcgccgctgctgagcggcggtcgggctcgccgtctccacctcctcgcgtccgtaatcagtgacgaggtccgctacgtaaatccctttgcggcggacaaatgaccatggaaacagttgaatcccagcatgatggaagtataacagcttctttgacagagagcaagtctgctcatgtgcagactcagactggccaaaattcaatccctgctttagctcaggtagcagcaattgcagagacagatgaatctgcagaatcagaaggtgtaattgattctcataaacgtagagaaatcctttcacgaagaccctcttataggaaaatactgaatgaactgtcctctgatgtgcctggtgttcccaagattgaagaagagagatcagaggaagaaggaacaccacctagtattgctaccatggcagtaccaactagcatatatcagactagcacggggcaatacagtatgtatgctgcaattcgatatgatacagtgctagctttaagtcttctctagttatattgaagcaactcaggttttggcattaaattgttccattttaaaatgcatcattaatacctaaactgtatcatagaatgaaagtatatgttaaaaagtgagatctttgtattgacagctgtcatataattttgaaaagtaaaaattttgactgccgaatatagaagaaaattttggggtaaaaaggagaatttttcctatttacatgtttatattaatctctagtaaaacattgtttttgttgtctttatgatgcatgcgaacataaatgtctgtatttcattcttgttggcttttgttacccacaattacatactattcttactaatctgagagttttctaaagtatgttttcaatgtttcactactctctactctgttaatttgtgctacagtttttcctaaaagagaatggaaaaatgatttaattttttaaactgtagcaattggatagataattttatttgaaattttacacactgaaagctctaaataaacagatacattcaca

SEQ ID NO: 121869 - DNA, 731 bp, Artificial Sequence
  derived and/or modified sequence
cgccccacgcccgcttcgtgcgctcagctgccccgggacccgcctgcctcctcgcgaacttgggacgagttggaaaatcctccctgagagagccgtgcggctcaggggagcggtttaactcggaaaaggaaaaggaatccagaaacaaatgaccatggaaacagttgaatcccagcatgatggaagtataacagcttctttgacagagagcaagtctgctcatgtgcagactcagactggccaaaattcaatccctgctttagctcaggtagcagcaattgcagagacagatgaatctgcagaatcagaaggtgtaattgattctcataaacgtagagaaatcctttcacgaagaccctcttataggaaaatactgaatgaactgtcctctgatgtgcctggtgttcccaagattgaagaagagagatcagaggaagaaggaacaccacctagtattgctaccatggcagtaccaactagcatatatcagactagcacggggcaatacagtatgtatgctgcaattcgatatgatacagtgctagctttaagtcttctctagttatattgaagcaactcaggttttggcattaaattgttccattttaaaatgcatcattaatacctaaactgtatcatagaatgaaagtatatgttaaaaagtgagatctttgtattgacagctgtcatataattttgaaaagtaaaaattttgactgccgaatatagaa

SEQ ID NO: 121870 - DNA, 414 bp, Artificial Sequence
  derived and/or modified sequence
atgaccatggagaccgtggagagccagcacgacggcagcatcaccgccagcctgaccgagagcaagagcgcccacgtgcagacccagaccggccagaacagcatccccgccctggcccaggtggccgccatcgccgagaccgacgagagcgccgagagcgagggcgtgatcgacagccacaagagaagagagatcctgagcagaagacccagctacagaaagatcctgaacgagctgagcagcgacgtgcccggcgtgcccaagatcgaggaggagagaagcgaggaggagggcaccccccccagcatcgccaccatggccgtgcccaccagcatctaccagaccagcaccggccagtacagcatgtacgccgccatcagatacgacaccgtgctggccctgagcctgctgtag

SEQ ID NO: 121871 - protein, 322 aa, Artificial Sequence
  derived and/or modified sequence
MSPNFKLQCHFILIFLTALRGESRYLELREAADYDPFLLFSANLKRELAGEQPYRRALRCLDMLSLQGQFTFTADRPQLHCAAFFISEPEEFITIHYDQVSIDCQGGDFLKVFDGWILKGEKFPSSQDHPLPSAERYIDFCESGLSRRSIRSSQNVAMIFFRVHEPGNGFTLTIKTDPNLFPCNVISQTPNGKFTLVVPHQHRNCSFSIIYPVVIKISDLTLGHVNGLQLKKSSAGCEGIGDFVELLGGTGLDPSKMTPLADLCYPFHGPAQMKVGCDNTVVRMVSSGKHVNRVTFEYRQLEPYELENPNGNSIGEFCLSGL

SEQ ID NO: 121872 - DNA, 969 bp, Artificial Sequence
  derived and/or modified sequence
atgtcgccaaatttcaagctgcagtgtcattttatacttatctttctgactgcccttaggggggaatcgcgatatctcgagttacgggaggcggccgattacgatcccttcttactgtttagtgcaaatcttaaaagggagctagctggggagcagccatacaggagggccctgcggtgtttggatatgctgtctctacaagggcaatttacatttactgctgatcgacctcagttgcactgtgccgccttctttataagcgaacccgaggaatttatcaccattcattacgatcaggtgagtatcgactgtcaggggggagattttctgaaggtgttcgacggctggatactgaagggtgagaaattcccaagcagccaggaccacccactgcccagtgccgaacgttacatcgacttttgtgagagtggactgagtagaagatccattaggagcagtcagaacgtggctatgatcttcttccgagtgcacgagccaggcaatggattcaccctcactatcaagaccgacccaaatctgttcccttgtaatgtaatatctcagactccaaacggcaaattcactttggtcgtcccccaccagcacagaaattgctcattttctattatctatcctgttgtaattaagatcagcgatttaacattaggacatgtgaacggcctgcagctgaagaagtcttccgcagggtgtgaaggtatcggagatttcgtagaactgctggggggaaccggcttggaccccagcaaaatgaccccgctagccgatttgtgttatcccttccatggaccagcccaaatgaaggtgggctgcgacaacactgtcgtcaggatggtgtcttctgggaagcacgtcaatcgcgttaccttcgaatacagacagttggaaccatacgaactggaaaatcccaacggcaattcaattggagagttctgtcttagtggcctgtag

SEQ ID NO: 121873 - DNA, 969 bp, Artificial Sequence
  derived and/or modified sequence
atgagccccaacttcaagctgcagtgccacttcatcctgatcttcctgacagccctgcggggggagagccgctacctggagctgcgggaggccgctgactatgaccccttcctgctcttcagcgccaacctgaagcgggagctggccggggagcagccctacagaagagccctgcgctgcctggacatgctgagcctgcagggccagttcaccttcaccgctgaccggccccagctgcactgtgccgccttcttcatcagcgagcctgaggagttcatcaccatccactatgaccaggtgtccattgactgccagggcggggacttcctgaaggtgtttgatggctggatcctgaagggggagaagttccccagcagccaggaccaccccctgcccagcgctgagcgctacatcgacttctgtgagagcggcctgagcagaagaagcatccgcagcagccagaatgtggccatgatcttcttccgggtgcatgagcctggaaatggcttcaccctgaccatcaagacagaccccaacctcttcccctgcaacgtcatcagccagaccccaaatggcaagttcaccctggtggtgccccaccagcacaggaactgcagcttcagcatcatctaccctgtggtgatcaagatcagtgacctgaccctgggccacgtgaatggcctgcagctgaagaagagcagcgctggctgtgagggcatcggggactttgtggagctgctgggcggcaccggcctggaccccagcaagatgacccccctggccgacctgtgctaccccttccacggccctgcccagatgaaggtgggctgtgacaacacagtggtgaggatggtgtcctctgggaagcacgtgaacagagtgacctttgagtaccggcagctggagccctatgagctggagaaccccaacggcaacagcatcggggagttctgcctgagcggcctgtag

SEQ ID NO: 121874 - DNA, 969 bp, Artificial Sequence
  derived and/or modified sequence
atgagccccaacttcaagctgcagtgccacttcatcctgatcttcctgacagccctgagaggcgaaagcagatatctagagctgcgcgaagcagccgattacgatccgtttttgctgttctcagctaatttaaagagagaactggcaggcgagcagccttataggagggctttgaggtgcctggatatgctttccctgcaaggacagttcacgttcaccgctgatcggcctcagctgcactgcgctgccttcttcatttctgaacctgaggaatttataactattcactatgatcaggtgtctattgactgtcaaggcggtgactttctcaaagtgtttgatgggtggatactcaagggcgagaagtttccatccagtcaggatcacccgttgccaagcgctgaacgctatatcgatttctgcgaatccggcctgtcccgtcgctctatcaggtccagccagaacgtggcaatgattttctttagggtgcacgagccgggcaatgggtttacactgactataaaaacagaccccaatttatttccatgtaatgtcatcagtcaaactcctaacggtaagttcacattggtagttccccaccagcatcggaactgctccttcagtataatttacccagtggtcattaaaattagtgatcttaccttgggacatgttaacgggcttcaactgaagaaatcttcagctggctgcgagggcattggcgacttcgtggagcttttagggggcacgggtttagacccatccaaaatgactcccctagccgatctttgctacccatttcacggcccagctcagatgaaagtgggatgcgacaatactgttgttagaatggtgagtagtggtaagcacgtaaatcgggtgacctttgaataccgtcagctggagccttatgagcttgagaatcccaacgggaacagtataggtgaattttgcctgagcggcctctag

SEQ ID NO: 121875 - DNA, 969 bp, Artificial Sequence
  derived and/or modified sequence
atgtcacctaacttcaaactccaatgccacttcatacttatctttctgacagcactccggggagagagccggtacctagaactccgggaggcggcagactacgacccattcctgcttttcagcgccaatctgaagagagaactggctggtgagcagccgtaccggcgtgccctacggtgtctggatatgttgtctcttcaagggcagttcacatttaccgctgaccgaccccagcttcactgcgccgctttcttcattagcgaacccgaggagttcatcactatacactacgaccaggtgtccattgattgtcagggtggagacttcctcaaagtcttcgatggctggatcctaaaaggcgagaagtttccaagctctcaggaccatcccctgccttccgctgagcggtatattgacttctgtgagagtgggctaagccgcagatctatccgtagcagccaaaacgtcgccatgatattctttcgggtgcacgagcctggcaacggctttaccctgacaatcaagactgatcccaatttattcccttgcaacgtaatttcccagactccaaacggcaagtttactctagtcgtgccacaccagcataggaattgcagcttcagtatcatttaccctgtggtcattaaaatctctgacctcactctggggcatgtcaacggactacagctcaagaagtcgtccgcgggatgcgaaggcatcggggacttcgttgagctcctgggtgggaccggcttggacccctctaaaatgacgccccttgctgatctgtgttaccccttccacgggccagcgcaaatgaaggtagggtgcgacaataccgtggttcggatggtgtcttcaggtaaacacgttaatcgcgtgactttcgagtacagacaacttgagccctacgagctcgagaaccctaacggcaatagcatcggcgagttttgtctgagcgggctgtag

SEQ ID NO: 121876 - DNA, 1980 bp, Artificial Sequence
  derived and/or modified sequence
actttgatttgcaaaatggaaaattccctgaatgcccacagaaaagtataatgtagcatttagcaggtcaacaaaatgcactcccttattctttgtctccgcctcattctccaacactttagtgcactaagttgtagtgactgaaatcattcttggtgaataatgctgggccacgctgaaaatttgtggctgagagctggaccctcgtcatcgccacgtactctgtcaatgagacagggtaacccatggttactgagctccgatcagttaaggggcagagagcctccgctccccactgctctataaaagagacccagcaaagggaccctaccagcttctagctctcagtctgcgcgagggtgtaggaaggaaagcccaggacctccggagcagagcacagcagctgcagaggcaaggccagcatgtcgcccaacttcaaacttcagtgtcacttcattctcatcttcctgacggctctaagaggggaaagccggtacctagagctgagggaagcggcggactacgatcctttcctgctcttcagcgccaacctgaagcgggagctggctggggagcagccgtaccgccgcgctctgcggtgcctggacatgctgagcctccagggccagttcaccttcaccgccgaccggccgcagctgcactgcgcagccttcttcatcagcgagcccgaggagttcattaccatccactacgaccaggtctccatcgactgtcagggcggcgacttcctgaaggtatttgatggttggattctcaagggggagaagttccccagttcccaggatcatcctctcccctcagctgagcggtacatagatttctgtgagagtggtcttagcaggaggagcatcagatcttcccagaatgtggccatgatcttcttccgagtccatgaaccaggaaatggattcacattaaccataaagacagaccccaacctctttccttgcaatgtcatttctcagactccaaatggaaagtttaccctggtagttccacaccagcatcgaaactgcagcttctccataatttatcctgtggtgatcaaaatatctgatcttaccctgggacacgtaaatggtcttcagttaaagaaatcctcagcaggttgcgagggaataggagactttgtggagctgctgggaggaactggattggacccttccaagatgacgcctttagctgatctctgctacccctttcatggcccggcccagatgaaagttggctgtgacaacactgtggtgcgcatggtctccagtggaaaacacgtaaatcgtgtgacttttgagtatcgtcagctggagccgtacgagctggaaaacccaaatggaaacagtatcggggaattctgtttgtctggtctttgaataaccaacccagtgatttacatgctgatagctaagtgagtttttaatggccattgtgtatgattttgatgcacaactagttaaaagcctttcataccagtcagtattcccagccttgagcgcacgcgcgcacacacacacacacatacacacacgcattaatttttgtactttgcttcttttatgtttgtaatctgtaaatgaacacatggcagaaaataacccctgattggtaggatcatagttctaaatggaaatgtttgtaattctttgatgtgctacaaacctgaaactggtaagacaagcacaaagcaacgtgcaatacaaaaatcgtatctcaagggaaaatactcaaagaaagaaaagtggcagcacttatattagttttataacaggataaagtcttgtgtatagcaaagtagttgcatctgtttattttctatttattattgttacaataggtaatagttatagcaattatttattgatttgtaacaacttgtttttaaccaaactttgtagcatggaaaaaattttccatccacaaatacaaacatgaataaatacattcagaatgttggcaccatga

SEQ ID NO: 121877 - DNA, 969 bp, Artificial Sequence
  derived and/or modified sequence
atgagccccaacttcaagctgcagtgccacttcatcctgatcttcctgaccgccctgagaggcgagagcagatacctggagctgagagaggccgccgactacgaccccttcctgctgttcagcgccaacctgaagagagagctggccggcgagcagccctacagaagagccctgagatgcctggacatgctgagcctgcagggccagttcaccttcaccgccgacagaccccagctgcactgcgccgccttcttcatcagcgagcccgaggagttcatcaccatccactacgaccaggtgagcatcgactgccagggcggcgacttcctgaaggtgttcgacggctggatcctgaagggcgagaagttccccagcagccaggaccaccccctgcccagcgccgagagatacatcgacttctgcgagagcggcctgagcagaagaagcatcagaagcagccagaacgtggccatgatcttcttcagagtgcacgagcccggcaacggcttcaccctgaccatcaagaccgaccccaacctgttcccctgcaacgtgatcagccagacccccaacggcaagttcaccctggtggtgccccaccagcacagaaactgcagcttcagcatcatctaccccgtggtgatcaagatcagcgacctgaccctgggccacgtgaacggcctgcagctgaagaagagcagcgccggctgcgagggcatcggcgacttcgtggagctgctgggcggcaccggcctggaccccagcaagatgacccccctggccgacctgtgctaccccttccacggccccgcccagatgaaggtgggctgcgacaacaccgtggtgagaatggtgagcagcggcaagcacgtgaacagagtgaccttcgagtacagacagctggagccctacgagctggagaaccccaacggcaacagcatcggcgagttctgcctgagcggcctgtag

SEQ ID NO: 121878 - protein, 411 aa, Artificial Sequence
  derived and/or modified sequence
MDAALLHSLLEANCSLALAEELLLDGWGPPLDPEGPYSYCNTTLDQIGTCWPRSAAGALVERPCPEYFNGVKYNTTRNAYRECLENGTWASKINYSQCEPILDDKQRKYDLHYRIALVVNYLGHCVSVAALVAAFLLFLALRSIRCLRNVIHWNLITTFILRNVMWFLLQLVDHEVHESNEVWCRCITTIFNYFVVTNFFWMFVEGCYLHTAIVMTYSTERLRKCLFLFIGWCIPFPIIVAWAIGKLYYENEQCWFGKEPGDLVDYIYQGPIILVLLINFVFLFNIVRILMTKLRASTTSETIQYRKAVKATLVLLPLLGITYMLFFVNPGEDDLSQIMFIYFNSFLQSFQGFFVSVFYCFFNGEVRSAVRKRWHRWQDHHSLRVPMARAMSIPTSPTRISFHSIKQTAAV

SEQ ID NO: 121879 - DNA, 1236 bp, Artificial Sequence
  derived and/or modified sequence
atggacgccgccttgctccattcattacttgaggccaactgctcattggccctagccgaggagctgttactcgatggctggggaccaccgctggacccagaaggaccatatagctattgcaatactactttagatcagatcggaacgtgttggccaagaagcgctgcaggggcgcttgttgagcgtccttgtcccgagtacttcaacggggtgaagtacaacactacccgcaatgcctaccgggagtgcctcgagaatggcacctgggcttcgaagataaactattcccagtgtgagccgatccttgatgacaagcagaggaagtacgatctgcactatcggatcgccttggtagtgaattaccttgggcattgcgtctctgtcgccgctttggttgccgcctttctgctgtttctggccctccgatcgatcaggtgtctccggaacgtgatccactggaatctgattacaactttcattctcaggaacgtcatgtggtttctgctgcagttggtggatcacgaagttcatgagtccaacgaagtgtggtgtagatgcattaccacaatcttcaattatttcgtggtgaccaatttcttttggatgtttgtcgaaggctgctacttgcatactgcgatagtaatgacttatagtacagaacgccttcggaaatgcctcttcctgtttatcgggtggtgcatccctttccccatcatcgtggcttgggctataggcaagctctattatgagaacgagcaatgttggttcggcaaggagccgggcgatctggtagactacatctaccagggccctattattctcgtgctgcttatcaattttgtcttcctcttcaacatagtgagaattttaatgaccaaactcagggcttccacaacctctgaaacaatccagtaccgtaaggcagtgaaggcaactctcgtcctcttaccactgcttggcatcacttacatgttgttctttgtcaaccctggcgaagacgacctgagtcagattatgttcatatattttaattcctttcttcaatcctttcagggcttcttcgtttccgtattctactgcttctttaatggagaggtgcgctccgcagtgcggaagcgttggcatagatggcaggatcaccactctctccgggtgcccatggcgagagccatgagcatacctactagccccacccggatctctttccacagcattaagcagacggccgctgtgtag

SEQ ID NO: 121880 - DNA, 1236 bp, Artificial Sequence
  derived and/or modified sequence
atggatgctgccctgctgcacagcctgctggaggccaactgcagcctggccctggccgaggagctgctgctggatggctggggcccccccctggaccctgagggcccctacagctactgcaacaccaccctggaccagatcggcacctgctggcccaggtctgctgctggggccctggtggagcggccctgcccagagtacttcaatggagtgaagtacaacaccaccagaaatgcctaccgggagtgcctggagaatggcacctgggccagcaagatcaactacagccagtgtgagcccatcctggatgacaagcagaggaaatatgacctgcactacagaattgccctggtggtgaactacctgggccactgtgtgtctgtggccgccctggtggccgccttcctgctcttcctggccctgcggagcatccgctgcctgagaaatgtcatccactggaacctgatcaccaccttcatcctgagaaatgtgatgtggttcctgctgcagctggtggaccacgaggtgcatgagagcaatgaggtgtggtgccgctgcatcaccaccatcttcaactactttgtggtgaccaacttcttctggatgtttgtggagggctgctacctgcacacagccatcgtgatgacctacagcacagagcggctgaggaagtgcctcttcctgttcatcggctggtgcatccccttccccatcatcgtggcctgggccatcggcaagctgtactatgaaaatgagcagtgctggtttgggaaggagcccggggacctggtggactacatctaccagggccccatcatcctggtgctgctgatcaactttgtgttcctgttcaacatcgtgcgcatcctgatgaccaagctgcgggccagcaccaccagcgagaccatccagtacaggaaggctgtgaaggccaccctggtgctgctgcccctgctgggcatcacctacatgctgttctttgtgaaccctggagaagatgacctgagccagatcatgttcatctacttcaacagcttcctgcagagcttccagggcttctttgtgtctgtgttctactgcttcttcaatggagaggtgcgctctgctgtgaggaagcgctggcaccgctggcaggaccaccacagcctgcgggtgcccatggcccgggccatgagcatccccaccagccccacccgcatctccttccacagcatcaagcagacagctgctgtgtag

SEQ ID NO: 121881 - DNA, 1236 bp, Artificial Sequence
  derived and/or modified sequence
atggacgccgccctgctgcacagcctgctggaggccaactgcagcctcgcactagccgaagagctgcttttagatgggtggggacctcctctcgaccctgagggtccatactcctattgcaataccaccttggaccagatcggaacttgttggccccggtccgcagccggggcgctagttgagaggccctgccccgagtatttcaacggagtgaaatataacaccactcgaaatgcttatcgagagtgcttagagaatggcacttgggcaagcaaaatcaattattcccagtgtgagcccatactggacgacaaacagagaaagtacgacctgcactaccggatcgccctcgtcgtcaattatttaggacattgcgtgtccgtggcagcgttggtcgcagcattcctgctctttctcgcgctgcgatctattcgctgtctgcgtaatgtgatccactggaacttaattactacgtttattcttcggaatgtgatgtggtttctgcttcagctcgtggaccacgaggtgcacgaatccaacgaggtatggtgccggtgcatcaccacgattttcaactatttcgttgtcacaaattttttctggatgttcgtggaagggtgctacctccataccgccattgtgatgacatattctactgaaagacttcggaaatgtctgttcctcttcatcggttggtgcattccattcccaattattgtggcgtgggccatcggcaagctgtattatgagaacgaacaatgctggttcggaaaggaacctggggaccttgttgattatatctatcaagggccaattatcctcgttctcttgattaatttcgtatttttgttcaacatcgtccgtatcctgatgacaaagctgagggctagcacaacatcagagaccatccagtataggaaagccgtgaaagccacattggtgctgcttcccctgctggggattacatatatgttattctttgttaaccctggagaggatgatctgagtcaaatcatgttcatctattttaattcctttctgcaatctttccaaggctttttcgtttctgtgttttactgttttttcaacggggaggttcggagtgccgttagaaagcgttggcatcgctggcaggaccatcacagcctccgggtccccatggcccgggctatgagcatccctacctccccaactcgtatttcctttcattccatcaaacagaccgcggctgtttag

SEQ ID NO: 121882 - DNA, 1236 bp, Artificial Sequence
  derived and/or modified sequence
atggatgccgctctcctgcactccctgctggaagcaaattgcagccttgcccttgcagaggagctcctattggacggctggggaccccctcttgacccggaagggccttattcttactgtaacaccacacttgaccagatcggtacctgctggcccaggtcagccgcaggggcactggtggagcgcccatgccccgagtacttcaacggcgtcaaatacaacacaacacgtaatgcttaccgcgaatgtttggaaaacggcacatgggcctcaaagatcaactattctcaatgtgaacccattctcgatgataagcaacgtaagtatgatctgcattaccgtatcgccctggtcgtcaattatcttggacattgtgtaagcgtcgcggctctagtggctgcgtttctgctgttcctagcgcttcgcagcatcaggtgcctccgcaacgttatacattggaacttaattacaacatttatcctgcgaaacgtgatgtggttcctcctccaactggtggaccacgaggtgcacgaatctaacgaggtttggtgtagatgcattactactatttttaactactttgtggtaacaaatttcttttggatgtttgtggaaggctgctacctgcacacagcgattgttatgacctactccacggagcggctcagaaagtgcctgttcctctttattgggtggtgcattcctttccctataatagtggcctgggccattgggaagctgtactatgaaaacgaacagtgttggtttggcaaagaacctggagacctggtcgattacatttatcagggaccaataatcctggtgctgctgatcaactttgtgttcctatttaacatcgtacggatactgatgactaagcttcgcgcttcgaccacctctgaaactatccagtatcgaaaggccgtcaaagctaccctggtgttactgcctctgcttggtatcacttacatgttattctttgttaatcccggagaagacgacctaagtcagataatgttcatttattttaatagcttcctgcagtcctttcagggtttttttgtttccgttttctactgctttttcaacggggaagtgcgatctgccgtgagaaagaggtggcaccgttggcaggatcaccattccctccgggttccaatggccagagctatgtctatccctaccagcccgactcgcatttctttccattccataaagcagacggccgctgtgtag

SEQ ID NO: 121883 - DNA, 2530 bp, Artificial Sequence
  derived and/or modified sequence
agcattccgtcaccccaggcccacgctctccagcccaccgccctcctctggacgccgcgagtggaagagagctgcgaactgagaagccgtactttgggcagggtggagggcccgggggctggagactgagcccctccgagaggagccgcccggccccgccccccggcgcagccattggccgcggcggagcggctgtacccgcagctccgtgcactcggcggctcctctccgggaaggtccccacttgacagctctgggcgaccggaggtggcgcccaaaggctgcccgggagatcggggctgggctggcgggggccaggaccccgcgccctctcggccgctcactctcgcgtccactccctcgcagtcacgccgggcgcgcactcccactccctctccgcacgcggctgcgggacgcgatggacgcggcactgctccacagcctgctggaggccaactgcagcctggcgctggctgaagagctgctcttggacggctgggggccacccctggaccccgagggtccctactcctactgcaacacgaccttggaccagatcggaacgtgctggccccgcagcgctgccggagccctcgtggagaggccgtgccccgagtacttcaacggcgtcaagtacaacacgacccggaatgcctatcgagaatgcttggagaatgggacgtgggcctcaaagatcaactactcacagtgtgagcccattttggatgacaagcagaggaagtatgacctgcactaccgcatcgcccttgtcgtcaactacctgggccactgcgtatctgtggcagccctggtggccgccttcctgcttttcctggccctgcggagcattcgctgtctgcggaatgtgattcactggaacctcatcaccacctttatcctgcgaaatgtcatgtggttcctgctgcagctcgttgaccatgaagtgcacgagagcaatgaggtctggtgccgctgcatcaccaccatcttcaactacttcgtggtgaccaacttcttctggatgtttgtggaaggctgctacctgcacacggccattgtcatgacctactccactgagcgcctgcgcaagtgcctcttcctcttcatcggatggtgcatccccttccccatcatcgtcgcctgggccatcggcaagctctactatgagaatgaacagtgctggtttggcaaggagcctggcgacctggtggactacatctaccaaggccccatcattctcgtgctcctgatcaatttcgtatttctgttcaacatcgtcaggatcctaatgacaaagttacgcgcgtccaccacatccgagacaatccagtacaggaaggcagtgaaggccaccctggtgctcctgcccctcctgggcatcacctacatgctcttcttcgtcaatcccggggaggacgacctgtcacagatcatgttcatctatttcaactccttcctgcagtcgttccagggtttcttcgtgtctgtcttctactgcttcttcaatggagaggtgcgctcagccgtgaggaagaggtggcaccgctggcaggaccatcactcccttcgagtccccatggcccgggccatgtccatccctacatcacccacacggatcagcttccacagcatcaagcagacggccgctgtgtgacccctcggtcgcccacctgcacagctcccctgtcctcctccaccttcttcctctgggttctctgtgctgggcaggctctcgtggggcaggagatgggaggggagagaccagctctccagcctggcaggaaagagggggtgcggcagccaagggggactgcaagggacagggatgagtgggggccaccaggctcagcgcaagaggaagcagagggaattcacaggaccccctgagaagagccagtcagatgtctgcaggcatttgcccatcccagcctctctggccagggccttactgggcccagagcagagaaggacctgtccaacacacacagctatttatagtagcagacacagggctcccctgccctactcatggagccagcagccaggcaatggtgtggccctgcactggcccttggcctccacactcagtggtgcccctgcagttgggtggggtacgccagcaaaggatcagtttggctgccttatcccaggggctgtcacctagagaggctcacttgtaccccacccttgttcctgtgtcccctccccagccatcctcccgccttgggggctccatgaaggatgcaggcttccaggcctggcttcctctcttgggagaccccttctctgcctagtccacagattaggcaatcaaggaagacgccatcagggaagccacatccttagtcaaccagttgcatcgtgcggggcaaaatgaggagcagaggcatggaggagggaggcgtgggatgggaatagcagaaaccaaccatgtcttcagtgattgaaactcataccccattgccctttgccctccagtctccccttcagaaacatctctgctctctgtgaaataaaccatgcctcttgg

SEQ ID NO: 121884 - DNA, 1236 bp, Artificial Sequence
  derived and/or modified sequence
atggacgccgccctgctgcacagcctgctggaggccaactgcagcctggccctggccgaggagctgctgctggacggctggggcccccccctggaccccgagggcccctacagctactgcaacaccaccctggaccagatcggcacctgctggcccagaagcgccgccggcgccctggtggagagaccctgccccgagtacttcaacggcgtgaagtacaacaccaccagaaacgcctacagagagtgcctggagaacggcacctgggccagcaagatcaactacagccagtgcgagcccatcctggacgacaagcagagaaagtacgacctgcactacagaatcgccctggtggtgaactacctgggccactgcgtgagcgtggccgccctggtggccgccttcctgctgttcctggccctgagaagcatcagatgcctgagaaacgtgatccactggaacctgatcaccaccttcatcctgagaaacgtgatgtggttcctgctgcagctggtggaccacgaggtgcacgagagcaacgaggtgtggtgcagatgcatcaccaccatcttcaactacttcgtggtgaccaacttcttctggatgttcgtggagggctgctacctgcacaccgccatcgtgatgacctacagcaccgagagactgagaaagtgcctgttcctgttcatcggctggtgcatccccttccccatcatcgtggcctgggccatcggcaagctgtactacgagaacgagcagtgctggttcggcaaggagcccggcgacctggtggactacatctaccagggccccatcatcctggtgctgctgatcaacttcgtgttcctgttcaacatcgtgagaatcctgatgaccaagctgagagccagcaccaccagcgagaccatccagtacagaaaggccgtgaaggccaccctggtgctgctgcccctgctgggcatcacctacatgctgttcttcgtgaaccccggcgaggacgacctgagccagatcatgttcatctacttcaacagcttcctgcagagcttccagggcttcttcgtgagcgtgttctactgcttcttcaacggcgaggtgagaagcgccgtgagaaagagatggcacagatggcaggaccaccacagcctgagagtgcccatggccagagccatgagcatccccaccagccccaccagaatcagcttccacagcatcaagcagaccgccgccgtgtag

SEQ ID NO: 121885 - protein, 354 aa, Artificial Sequence
  derived and/or modified sequence
MKSLLLLVLISICWADHLSDNYTLDHDRAIHIQAENGPHLLVEAEQAKVFSHRGGNVTLPCKFYRDPTAFGSGIHKIRIKWTKLTSDYLKEVDVFVSMGYHKKTYGGYQGRVFLKGGSDSDASLVITDLTLEDYGRYKCEVIEGLEDDTVVVALDLQGVVFPYFPRLGRYNLNFHEAQQACLDQDAVIASFDQLYDAWRGGLDWCNAGWLSDGSVQYPITKPREPCGGQNTVPGVRNYGFWDKDKSRYDVFCFTSNFNGRFYYLIHPTKLTYDEAVQACLNDGAQIAKVGQIFAAWKILGYDRCDAGWLADGSVRYPISRPRRRCSPTEAAVRFVGFPDKKHKLYGVYCFRAYN

SEQ ID NO: 121886 - protein, 182 aa, Artificial Sequence
  derived and/or modified sequence
MKSLLLLVLISICWADHLSDNYTLDHDRAIHIQENGPHLLVEAEQAKVFSHRGGNVTLPCKFYRDPTAFGSGIHKIRIKWTKLTSDYLKEVDVFVSMGYHKKTYGGYQGRVFLKGGSDSDASLVITDLTLEDYGRYKCEVIEGLEDDTVVVALDLQGVVFPYFPRLGRYNLNFHEAQQACLD

SEQ ID NO: 121887 - protein, 158 aa, Artificial Sequence
  derived and/or modified sequence
MKSLLLLVLISICWADHLSDNYTLDHDRAIHIQAENGPHLLVEAEQAKVFSHRGGNVTLPCKFYRDPTAFGSGIHKIRIKWTKLTSDYLKEVDVFVSMGYHKKTYGGYQGRVFLKGGSDSDASLVITDLTLEDYGRYKCEVIEGLEDDTVVVALDLQG

SEQ ID NO: 121888 - protein, 199 aa, Artificial Sequence
  derived and/or modified sequence
MKSLLLLVLISICWADHLSDNYTLDHDRAIHIQAENGPHLLVEAEQAKVFSHRGGNVTLPCKFYRDPTAFGSGIHKIRIKWTKLTSDYLKEVDVFVSMGYHKKTYGGYQGRVFLKGGSDSDASLVITDLTLEDYGRYKCEVIEGLEDDTVVVALDLQGVVFPYFPRLGRYNLNFHEAQQACLDQDAVIASFDQLYDAWR

SEQ ID NO: 121889 - protein, 258 aa, Artificial Sequence
  derived and/or modified sequence
MKSLLLLVLISICWADHLSDNYTLDHDRAIHIQAENGPHLLVEAEQAKVFSHRGGNVTLPCKFYRDPTAFGSGIHKIRIKWTKLTSDYLKEVDVFVSMGYHKKTYGGYQGRVFLKGGSDSDASLVITDLTLEDYGRYKCEVIEGLEDDTVVVALDLQGVVFPYFPRLGRYNLNFHEAQQACLDQDAVIASFDQLYDAWRGGLDWCNAGWLSDGSVQYPITKPREPCGGQNTVPGVRNYGFWDKDKSRYDVFCFTSNFN

SEQ ID NO: 121890 - protein, 153 aa, Artificial Sequence
  derived and/or modified sequence
MKSLLLLVLISICWADHLSDNYTLDHDRAIHIQAENGPHLLVEAEQAKVFSHRGGNVTLPCKFYRDPTAFGSGIHKIRIKWTKLTSDYLKEVDVFVSMGYHKKTYGGYQGRVFLKGGSDSDASLVITDLTLEDYGRYKCEVIEGLEDDTVVVA

SEQ ID NO: 121891 - DNA, 1065 bp, Artificial Sequence
  derived and/or modified sequence
atgaaatctctgctgctgctggtgctcatcagtatttgctgggccgatcatctttccgataattacaccctggaccatgaccgcgcaatccacatccaggccgagaacggacctcacctccttgtagaggcagaacaggcgaaggtgttttcacaccgcggcggtaatgtgacattgccgtgtaaattttaccgtgaccctactgcctttggtagtggaatacataagatccgcataaaatggaccaagctaacatcggactatctgaaggaggtggatgtctttgtctctatgggatatcacaagaagacctacggggggtatcaaggcagagtcttcttaaagggtggctcagatagcgacgcctctctggtgattacggacttaactctagaggactatggcagatacaagtgcgaggtaattgaaggtttggaggacgacaccgtggtagtggccctggatctacagggagtggtattcccatactttccaaggctcggcaggtacaatctcaattttcatgaggctcagcaagcttgtctcgaccaggacgcagtgatcgcgagctttgatcagctatatgacgcgtggcgtggtggtctggattggtgtaatgccggatggctcagtgatgggagcgtgcaataccccattaccaaacctagagagccctgcggcggtcaaaacacggtgccaggggtgagaaactacggcttttgggacaaggacaaaagtagatacgatgtcttttgttttacatctaatttcaacgggagattctattacctgattcaccccaccaagctaacctacgacgaagctgttcaggcctgcctcaacgacggggcacagatcgcaaaggtggggcagatctttgcagcctggaagatactagggtacgatcgttgtgatgcgggctggctcgccgatgggtcagtgagatatcccatcagccggcctaggagacgatgttctccaactgaggccgcagtgcggttcgttgggttcccagataagaagcataagctgtatggagtgtactgctttagagcttacaactag

SEQ ID NO: 121892 - DNA, 549 bp, Artificial Sequence
  derived and/or modified sequence
atgaagagccttttactactcgttctgattagcatctgctgggccgatcatctgtccgataattacacactggatcatgatcgggcgatccacattcaagagaatggtccccatctgctggtagaggccgagcaggctaaggtattctcacacaggggaggcaacgtgacactgccctgtaaattttatcgggatcctaccgcatttggtagtggtattcataaaattaggatcaagtggacgaagctgacatccgattacctgaaagaggtggacgtctttgtgtccatggggtatcacaaaaagacctatggcggttaccagggtcgggtgttcctcaaggggggatccgatagtgacgccagcctggtgattaccgacctgaccctggaagactatggccggtataaatgtgaagtgatcgagggactggaggatgatactgtggtggtggctctggatctgcagggcgtggtgttcccttacttccctagactgggaaggtacaacctcaacttccacgaagcacagcaggcctgtctagattag

SEQ ID NO: 121893 - DNA, 477 bp, Artificial Sequence
  derived and/or modified sequence
atgaagtccttgctgctgctagtattgatctccatctgttgggccgaccatctctccgacaattatactcttgaccacgaccgcgcaatccatatccaggctgagaatggaccacatttgctcgtcgaggccgagcaggccaaagtgttttcgcaccgtggtggcaacgttaccctgccttgcaagttttatcgcgacccaaccgcatttggctccggaatacataaaataaggatcaaatggactaaactgacttccgactatttgaaagaggtcgatgtgttcgtttccatgggctatcacaaaaagacgtatggagggtatcagggacgggttttcctgaaagggggctccgacagcgacgcttctctcgtgattacagatctgacattggaagattatggtaggtacaagtgcgaagtgatcgaaggattagaggatgacactgtggtggtcgctctggacttgcagggctag

SEQ ID NO: 121894 - DNA, 600 bp, Artificial Sequence
  derived and/or modified sequence
atgaaaagtctgctcttactggtactgatcagtatttgctgggctgatcacttgtctgacaactacaccctggaccatgatcgggcaattcacatccaggcggaaaacgggcctcatctgctggtggaggctgagcaggcgaaggtgttctcacaccgcgggggcaatgtgactcttccctgcaagttctatcgggacccaaccgcttttggcagcggcatccacaagatcaggattaaatggacgaagctgacttctgattacctgaaggaagtggacgtgttcgtgagcatgggttatcataagaagacatatggcgggtaccaggggcgtgtctttcttaaaggaggatccgattcagatgcttcactggtaatcaccgacctaacactagaggattacggtaggtataagtgcgaggttattgaggggctagaagatgacactgtggtggtcgccttagacctccagggggttgttttcccgtattttccaagactgggacggtacaatctgaactttcatgaagcccagcaggcgtgccttgatcaagatgccgtgatcgctagttttgatcagctttatgatgcctggcgatag

SEQ ID NO: 121895 - DNA, 777 bp, Artificial Sequence
  derived and/or modified sequence
atgaaatctctgttattattggttctcatatcaatatgctgggctgatcacctgtctgacaactatacactggatcacgaccgcgcaattcacattcaggcagagaacggcccacatcttctagtagaggctgaacaggctaaggtcttttcccaccgtggaggcaatgtaactttaccctgcaagttttatcgggaccccacggctttcggttctggtattcataagatcagaatcaaatggactaaattgactagtgattatctcaaagaagtagatgtgtttgtgtcaatggggtatcataaaaagacatatggcgggtaccaggggcgggtcttcctcaaaggtgggtctgactctgacgcctccctggttattaccgacctaaccttggaggactatggcaggtacaaatgtgaggtgatcgaaggcctggaagatgataccgtggtggtggccctggacctgcagggtgtggtctttccctattttcccaggctgggaagatacaacctaaactttcacgaggcccaacaggcctgcttggaccaagatgccgtgatcgccagcttcgaccagctgtacgacgcatggcgcggaggattggattggtgtaatgcagggtggctgagtgatggctcagtgcagtacccgatcacaaagccccgagagccctgtgggggccagaacacggtaccaggagtgaggaactacggattttgggataaagacaaaagccggtatgatgtgttctgctttacgagtaattttaactag

SEQ ID NO: 121896 - DNA, 462 bp, Artificial Sequence
  derived and/or modified sequence
atgaaatcactgttgctgctggtcctcatctccatctgttgggctgaccatctatcagacaattatacactggatcatgacagagctatacacattcaggcagaaaacggtccccacctccttgtggaggcagaacaggcaaaggtgttctcacaccggggcgggaacgtgacactgccgtgtaagttttatagggaccccaccgcattcggttctggcatccataagatcagaattaagtggaccaaactaaccagcgactatttgaaggaggttgacgttttcgtgtctatgggctaccataagaagacgtacggaggctaccaggggagagtgtttttaaagggaggctctgatagcgacgccagcctcgtgattacagatctcactctggaggattatgggaggtacaagtgcgaggtgatagaggggctggaagatgacacagtcgtggtcgcctag

SEQ ID NO: 121897 - DNA, 5607 bp, Artificial Sequence
  derived and/or modified sequence
atccaaggatacaatagcagttgtttgttaagagaaatttaaactcaacaccaatactgagtccagtaaaccagaaaatatgcttctggtgatttgggtggaaggccatctccagtttaagaagctttatgtgccactatcatcattgtctgttatccttgatctcctttggtgaggggaaggcgggaaagagaggacctctccgacccttggatttttcttttaagcagaggctaataaaacaaagcgcaaactgactgtcctgaggagtctgctcacaccgctgccccgcagatcattccacagaccccttgtcccatcccttctggacagacccaggactgatgagggttcgggttcgggaggtgtggtgtggtgggggcttgtgtggctgtagcggccggctttcctaaaccccagagcgggatactcgggatctgagcagaggggaaagtcatctaagaggctgctgctttacaaggtctgggcacagagctgcccctcccttcctccctgaagtttgcatgaagtgcacattaggctgtaattaggggatttgggaggagaactttcctggtgacgctttgcttttcttctgctcttggtgagaaagtgcctccttcttcccaggatcaggacctctgccatccagcgccacaaagagacattctgcacacacactcacacacgcacacacacacacactctcacactcgcccagagacaaacttaaggtgaggagaaagagcgctagcttcacttgatctccagcttccaacttaagcagaacttgagagcatccgaactcctggatttcaggacaagtgaagaagattctttgggctataaagatgaagagtctacttcttctggtgctgatttcaatctgctgggctgatcatctttcagacaactatactctggatcatgacagagctattcacatccaagcagaaaatggcccccatctacttgtggaagcagagcaagccaaggtgttttcacacagaggtggcaatgttacactgccatgtaaattttatcgagaccctacagcatttggctcaggaatccataaaatccgaattaagtggaccaagctaacttcggattacctcaaggaagtggatgtttttgtttccatgggataccacaaaaaaacctatggaggctaccagggtagagtgtttctgaagggaggcagtgatagtgatgcttctctggtcatcacagacctcactctggaagattatgggagatataagtgtgaggtgattgaaggattagaagatgatactgttgtggtagcactggacttacaaggtgtggtattcccttactttccacgactggggcgctacaatctcaattttcacgaggcgcagcaggcgtgtctggaccaggatgctgtgatcgcctccttcgaccagctgtacgacgcctggcggggcgggctggactggtgcaatgccggctggctcagtgatggctctgtgcaatatcccatcacaaagcccagagagccctgtggggggcagaacacagtgcccggagtcaggaactacggattttgggataaagataaaagcagatatgatgttttctgttttacatccaatttcaatggccgtttttactatctgatccaccccaccaaactgacctatgatgaagcggtgcaagcttgtctcaatgatggtgctcagattgcaaaagtgggccagatatttgctgcctggaaaattctcggatatgaccgctgtgatgcgggctggttggcggatggcagcgtccgctaccccatctctaggccaagaaggcgctgcagtcctactgaggctgcagtgcgcttcgtgggtttcccagataaaaagcataagctgtatggtgtctactgcttcagagcatacaactgaatgtgcccttagagcgcatcagttttaaagtcattaagaacatgtgaaaggtgttttttttttccaatatgaactcatgcaagttaccaaaactgtgataacccttttttacttactgtaaagagtcattttcataaagatcaattcattgatttgttttttgtaaagctatcattcaatatatattataaattaatataaatttaagggaagctctatgtaaggagacttagagccaaactgtttaagctgtatcatcccaacaaagtatcctttcatgaacggggcatgcaatagcttaagaattgctaggattaaattaaggaaagtaaagctactcagagcagcaggttccacaagcacaaactttacacatttgtacaattttgaaatgcactacaataaacaaattagagcaacacatttgaaatacaggcttctttacataaactgagaggttatacaaaactcagtttcacaagggaacaatctatacctttctaaaagttaatatttcaagtctctaataggcagaatattttactctttaaaatcctgcctttctgaccaaaaaaaaaaaaaaaaattcatatggattccaatccatagtaacaagcacagttaaaactcctcaataatcccatttatatgaagcatgacacataaataagcagataatatttaaccaatgaaaaagacttctaccttcttataattaaaattacacatgtctaagaggaattgttttatcttttgagtagctttaccgagttgtatttaaattctaagggccatttgctaagcagcatttagcatctactcagggcagttatatagataaactgctggacagaaaaattgtaaaatttagcagcttgattttctgttagcctatgaaatgttattgtcctataaaaataactttaaactgatttaatatttcatatttacattatatgaaaatcaattacattataaaaggaatccctaatgcagaaacaaagatgcaactttcaaaattcttattattcctatttgtatatacacgagagaacccaaccagtgcctgtgtttggggggaaaagtcaacagtgtagttctaaaccttatcccaaacagaaaatgtggttaatgatgtcactttccttgctggtcatcattaggcttaaattaaatgctgaagctgtcatcaaagagtttacactaaaatcttcagggctttaaataaaaggttaagtccagcttccaaacacaattttccacattagcagctccaatcttcttaaataaagctctgttttcctatatttttatgactgctgagaccccacagggaccaatatttgtattcaaattacatttcatggtttcccattgtttcacaatgagttctaataaatgggatttactataataatccaagtatgacatagccggtatgctttcatgaatgtttttatgtagattttcctcccatgaacatgagtaaataaatctgtttcctgaatggattgtggttgcatttaaagctctgtaataattctaataaatttactctatagagttctgtgtgtggaaggtatagaacaattggaagtccatgaaaccataactataatcatatattattcagacaaaatattgtaataaaagtaggtcctttctttcatcaaaaacatatctgaaaattttcagatgctttaatattaaaagatgacaatgttatgtatgcacatttttaagttaggttggatatgcaaactgtacaaaactataaatccaaagagtttgtaaagtttaaactcaaacactggtggtataaatagaacttgcacttctaaattaaggaagatacctaaatggtctaggatgagatgatatattatttaaagaggggactatctcccaaataacaactttaacacctcaaatatgggggctagctcattgaaagaagtccatacttgaactattattatgtatgttccgataattttgttgaaaatacaagtgggaacaaatttctattgaagcaaacatctaattttcagttatgtccagaactctactttataatgttaaatgtagtagtatttcttaacttttaaatacttactactataggaattggtgctgatcaaaatctctggagtgactgttagctgattaaaatctataccacttacacatcatttttccattcgtgtaaaaaacaaaaaatcttaacacagtgaatactgctgagcagaattttttcttctcattttgctcaaaggaccagaatttccatgccctttatactcatacttgaatgagtctttttaatgttctcattttgctgtttttccaccaaatgtctattttcctacttcattccccaagatgtctcactgagcaggtctgaaaaagaaaggttattctaatacaattcctaacagaaagttggtacaacactggctaattcagaaatcgctcctcagacttagattccaagagtatcaaagagattagatgggaggctgggccaggaacccttgttttaatgtatttgtccataattaacactggtgaccatataaggaacaaagtatatctgcacatttcactgagacatctacattggaaaacccaaacaaaaagaagcaattcaaataaaaagacaacataagaacgaaaataagttggtcacattaacactggaagccatctttaagtgagtgctgtcatattgtgtcacagtaatttttagccaaatatggcgtttgtaaatttaaactttctctcatggaaagggggctggtacctgtcaaagtgttattttatgcaacaatatagtcactttttattttggcaattagaagtagactcaaaggagattacaatttggttgctggcagccattctgggtttcttgattttagtactccaaagaatatggtggtctcatggagtagctgaccactaaggaggggaggattaaaagggaatcacttatcagtttttagcataggatgcattaagaaatatcaacggataactgacatcgttttgttaagaagttaactgtatcgtagctcactactgccagagcggcaatggatgtacaacgaaagagatgaaaaatacaaaagttattaagccacctgattaaaagaaaaccaatatttaaaggcatttaatagatatcaagtataactttgaggagaagaatcaatctgtattaccaaaaaaaaaatgttttgattttctgtaagatacaatgaactggtacattaaaagtcaattttgtgttactgcagtatcttttaattcttctgagttgtagaatcttagctatttttctttgtgtcaaactctgtcaatacattatttccaagaaaggcatttaattcattcttgttctgatacatttgacttcaaattgtaaatacgtacaattttcatttcctagtactcttgcaaagtcaaaaaaaaaaaaagagcatttatatggtgtcgctaaatcaactatagtattatcccaaaatatattgacttttttctctttgtatatgactcaaagcataattaattttgcccaccagttcagcaatcccagaaatctattgtgttgttgattagattaacacattttaaatgctttataacttaatcatgagtgctgaattaaaaaaaggtttttcttttcata

SEQ ID NO: 121898 - DNA, 568 bp, Artificial Sequence
  derived and/or modified sequence
aagattctttgggctataaagatgaagagtctacttcttctggtgctgatttcaatctgctgggctgatcatctttcagacaactatactctggatcatgacagagctattcacatccaagaaaatggcccccatctacttgtggaagcagagcaagccaaggtgttttcacacagaggtggcaatgttacactgccatgtaaattttatcgagaccctacagcatttggctcaggaatccataaaatccgaattaagtggaccaagctaacttcggattacctcaaggaagtggatgtttttgtttccatgggataccacaaaaaaacctatggaggctaccagggtagagtgtttctgaagggaggcagtgatagtgatgcttctctggtcatcacagacctcactctggaagattatgggagatataagtgtgaggtgattgaaggattagaagatgatactgttgtggtagcactggacttacaaggtgtggtattcccttactttccacgactggggcgctacaatctcaattttcacgaggcgcagcaggcgtgtctggacc

SEQ ID NO: 121899 - DNA, 788 bp, Artificial Sequence
  derived and/or modified sequence
aataagtgaattaggttctggagtagaggctctcctacaaggacctccaggaacagactcagagctctttaataagtatcccagggagtcaggctttcttggaaaaaacaaattagtgtgagaagccagtactgtgcaatttcagttttaaaaatagccggtattgtcaaggctgctgtgtgcatgagagaaatagaaggtccttgttaattttcgtgtcagcttccacattaaaaccaagaagctccactgaaatccttgcctggcaaatactgcaaaggttataagtgaagaagattctttgggctataaagatgaagagtctacttcttctggtgctgatttcaatctgctgggctgatcatctttcagacaactatactctggatcatgacagagctattcacatccaagcagaaaatggcccccatctacttgtggaagcagagcaagccaaggtgttttcacacagaggtggcaatgttacactgccatgtaaattttatcgagaccctacagcatttggctcaggaatccataaaatccgaattaagtggaccaagctaacttcggattacctcaaggaagtggatgtttttgtttccatgggataccacaaaaaaacctatggaggctaccagggtagagtgtttctgaagggaggcagtgatagtgatgcttctctggtcatcacagacctcactctggaagattatgggagatataagtgtgaggtgattgaaggattagaagatgatactgttgtggtagcactggacttacaaggt

SEQ ID NO: 121900 - DNA, 799 bp, Artificial Sequence
  derived and/or modified sequence
gtggatccgctgactgcagagaccctacctggcactctaagttggtgcgtcagcattttaggttgaaatgaatgaaaaatcaatcaggatgactgcagtggtagcgtgcacaactctaacctagtttgttcataattttcaactattcaccgtagacccaagcagtatgtaagatgtgaagaagattctttgggctataaagatgaagagtctacttcttctggtgctgatttcaatctgctgggctgatcatctttcagacaactatactctggatcatgacagagctattcacatccaagcagaaaatggcccccatctacttgtggaagcagagcaagccaaggtgttttcacacagaggtggcaatgttacactgccatgtaaattttatcgagaccctacagcatttggctcaggaatccataaaatccgaattaagtggaccaagctaacttcggattacctcaaggaagtggatgtttttgtttccatgggataccacaaaaaaacctatggaggctaccagggtagagtgtttctgaagggaggcagtgatagtgatgcttctctggtcatcacagacctcactctggaagattatgggagatataagtgtgaggtgattgaaggattagaagatgatactgttgtggtagcactggacttacaaggtgtggtattcccttactttccacgactggggcgctacaatctcaattttcacgaggcgcagcaggcgtgtctggaccaggatgctgtgatcgcctccttcgaccagctgtacgacgcctggcgg

SEQ ID NO: 121901 - DNA, 989 bp, Artificial Sequence
  derived and/or modified sequence
ggtagcaggaattgttcaaagctgccgtcttcggctcttaaaggcagctacagtaactttctgaacagattgggttaaatatttttacagacccattctatgatgataaggcggtaataagttgtgcagtgcaacactccaaagggttccaaatctcacaagcctctttgtatgtgatgctctcgcagtgaagaagattctttgggctataaagatgaagagtctacttcttctggtgctgatttcaatctgctgggctgatcatctttcagacaactatactctggatcatgacagagctattcacatccaagcagaaaatggcccccatctacttgtggaagcagagcaagccaaggtgttttcacacagaggtggcaatgttacactgccatgtaaattttatcgagaccctacagcatttggctcaggaatccataaaatccgaattaagtggaccaagctaacttcggattacctcaaggaagtggatgtttttgtttccatgggataccacaaaaaaacctatggaggctaccagggtagagtgtttctgaagggaggcagtgatagtgatgcttctctggtcatcacagacctcactctggaagattatgggagatataagtgtgaggtgattgaaggattagaagatgatactgttgtggtagcactggacttacaaggtgtggtattcccttactttccacgactggggcgctacaatctcaattttcacgaggcgcagcaggcgtgtctggaccaggatgctgtgatcgcctccttcgaccagctgtacgacgcctggcggggcgggctggactggtgcaatgccggctggctcagtgatggctctgtgcaatatcccatcacaaagcccagagagccctgtggggggcagaacacagtgcccggagtcaggaactacggattttgggataaagataaaagcagatatgatgttttctgttttacatccaatttcaatg

SEQ ID NO: 121902 - DNA, 560 bp, Artificial Sequence
  derived and/or modified sequence
ccgaactcctggatttcaggacaagcgccccttctctgattcctgtaaacaagcagagagcacatcacaactctgtgaagaagattctttgggctataaagatgaagagtctacttcttctggtgctgatttcaatctgctgggctgatcatctttcagacaactatactctggatcatgacagagctattcacatccaagcagaaaatggcccccatctacttgtggaagcagagcaagccaaggtgttttcacacagaggtggcaatgttacactgccatgtaaattttatcgagaccctacagcatttggctcaggaatccataaaatccgaattaagtggaccaagctaacttcggattacctcaaggaagtggatgtttttgtttccatgggataccacaaaaaaacctatggaggctaccagggtagagtgtttctgaagggaggcagtgatagtgatgcttctctggtcatcacagacctcactctggaagattatgggagatataagtgtgaggtgattgaaggattagaagatgatactgttgtggtagca

SEQ ID NO: 121903 - DNA, 1065 bp, Artificial Sequence
  derived and/or modified sequence
atgaagagcctgctgctgctggtgctgatcagcatctgctgggccgaccacctgagtgacaactacaccctggaccatgaccgggccatccacatccaggctgaaaatggcccccacctgctggtggaggccgagcaggccaaggtgttcagccaccggggcggcaatgtgaccctgccctgcaagttctacagagaccccacagccttcggcagcggcatccacaagatccgcatcaagtggaccaagctgaccagtgactacctgaaggaggtggatgtgtttgtgtccatgggctaccacaagaagacctatggaggctaccagggccgggtcttcctgaagggcggcagtgacagtgatgccagcctggtgatcacagacctgaccctggaggactatggccgctacaagtgtgaggtgattgagggcctggaggatgacacagtggtggtggccctggacctgcagggcgtggtgttcccctacttcccccggctgggccgctacaacctgaacttccacgaggcccagcaggcctgcctggaccaggatgctgtgattgccagctttgaccagctgtatgatgcctggaggggcggcctggactggtgcaatgccggctggctgagtgatggctctgtgcagtaccccatcaccaagccccgggagccctgtggcggccagaacacagtgcctggggtgaggaactacggcttctgggacaaggacaagagccgctatgatgtgttctgcttcaccagcaacttcaacggccgcttctactacctgatccaccccaccaagctgacctatgatgaagctgtgcaggcctgcctgaatgatggagcccagatcgccaaggtgggccagatctttgctgcctggaagatcctgggctatgacagatgtgatgctggctggctggctgatggctctgtgcgctaccccatcagccggccccggcggcgctgcagccccacagaggccgctgtgcgctttgtgggcttcccagacaagaagcacaagctgtatggagtgtactgcttccgggcctacaactag

SEQ ID NO: 121904 - DNA, 549 bp, Artificial Sequence
  derived and/or modified sequence
atgaagagcctgctgctgctggtgctgatcagcatctgctgggccgaccacctgagtgacaactacaccctggaccatgaccgggccatccacatccaggagaatggcccccacctgctggtggaggccgagcaggccaaggtgttcagccacagaggaggaaatgtgaccctgccctgcaagttctacagagaccccacagcctttggaagtggcatccacaagatccgcatcaagtggaccaagctgaccagtgactacctgaaggaggtggatgtgtttgtgtccatgggctaccacaagaagacctacggcggctaccagggccgggtcttcctgaagggcggcagtgacagtgatgccagcctggtgatcacagacctgaccctggaggactatggccgctacaagtgtgaggtgattgagggcctggaggatgacacagtggtggtggccctggacctgcagggcgtggtgttcccctacttcccccggctgggccgctacaacctgaacttccacgaggcccagcaggcctgcctggactag

SEQ ID NO: 121905 - DNA, 477 bp, Artificial Sequence
  derived and/or modified sequence
atgaagagcctgctgctgctggtgctgatcagcatctgctgggccgaccacctgagtgacaactacaccctggaccatgaccgggccatccacatccaggctgaaaatggcccccacctgctggtggaggccgagcaggccaaggtgttcagccaccggggcggcaatgtgaccctgccctgcaagttctacagagaccccacagccttcggcagcggcatccacaagatccgcatcaagtggaccaagctgaccagtgactacctgaaggaggtggatgtgtttgtgtccatgggctaccacaagaagacctatggaggctaccagggccgggtcttcctgaagggcggcagtgacagtgatgccagcctggtgatcacagacctgaccctggaggactatggccgctacaagtgtgaggtgattgagggcctggaggatgacacagtggtggtggccctggacctgcagggctag

SEQ ID NO: 121906 - DNA, 600 bp, Artificial Sequence
  derived and/or modified sequence
atgaagagcctgctgctgctggtgctgatcagcatctgctgggccgaccacctgagtgacaactacaccctggaccatgaccgggccatccacatccaggctgaaaatggcccccacctgctggtggaggccgagcaggccaaggtgttcagccaccggggcggcaatgtgaccctgccctgcaagttctacagagaccccacagccttcggcagcggcatccacaagatccgcatcaagtggaccaagctgaccagtgactacctgaaggaggtggatgtgtttgtgtccatgggctaccacaagaagacctatggaggctaccagggccgggtcttcctgaagggcggcagtgacagtgatgccagcctggtgatcacagacctgaccctggaggactatggccgctacaagtgtgaggtgattgagggcctggaggatgacacagtggtggtggccctggacctgcagggcgtggtgttcccctacttcccccggctgggccgctacaacctgaacttccacgaggcccagcaggcctgcctggaccaggatgctgtgattgccagctttgaccagctgtatgatgcctggaggtag

SEQ ID NO: 121907 - DNA, 777 bp, Artificial Sequence
  derived and/or modified sequence
atgaagagcctgctgctgctggtgctgatcagcatctgctgggccgaccacctgagtgacaactacaccctggaccatgaccgggccatccacatccaggctgaaaatggcccccacctgctggtggaggccgagcaggccaaggtgttcagccaccggggcggcaatgtgaccctgccctgcaagttctacagagaccccacagccttcggcagcggcatccacaagatccgcatcaagtggaccaagctgaccagtgactacctgaaggaggtggatgtgtttgtgtccatgggctaccacaagaagacctatggaggctaccagggccgggtcttcctgaagggcggcagtgacagtgatgccagcctggtgatcacagacctgaccctggaggactatggccgctacaagtgtgaggtgattgagggcctggaggatgacacagtggtggtggccctggacctgcagggcgtggtgttcccctacttcccccggctgggccgctacaacctgaacttccacgaggcccagcaggcctgcctggaccaggatgctgtgattgccagctttgaccagctgtatgatgcctggaggggcggcctggactggtgcaatgccggctggctgagtgatggctctgtgcagtaccccatcaccaagccccgggagccctgtggcggccagaacacagtgcctggggtgaggaactacggcttctgggacaaggacaagagccgctatgatgtgttctgcttcaccagcaacttcaactag

SEQ ID NO: 121908 - DNA, 462 bp, Artificial Sequence
  derived and/or modified sequence
atgaagagcctgctgctgctggtgctgatcagcatctgctgggccgaccacctgagtgacaactacaccctggaccatgaccgggccatccacatccaggctgaaaatggcccccacctgctggtggaggccgagcaggccaaggtgttcagccaccggggcggcaatgtgaccctgccctgcaagttctacagagaccccacagccttcggcagcggcatccacaagatccgcatcaagtggaccaagctgaccagtgactacctgaaggaggtggatgtgtttgtgtccatgggctaccacaagaagacctatggaggctaccagggccgggtcttcctgaagggcggcagtgacagtgatgccagcctggtgatcacagacctgaccctggaggactatggccgctacaagtgtgaggtgattgagggcctggaggatgacacagtggtggtggcctag

SEQ ID NO: 121909 - DNA, 1065 bp, Artificial Sequence
  derived and/or modified sequence
atgaagagcctgctgctgctggtgctgatcagcatctgctgggccgatcatctgtcagacaactacaccttagaccatgatcgcgcgatacatatacaggccgagaacggccctcacctcctagtcgaggccgagcaggccaaagtgttctcacaccgaggcggcaacgtgaccttgccctgtaaattctaccgtgatccgaccgcgttcggcagtgggatccacaagatccgcatcaaatggactaaactcacttccgactacctgaaagaggtagacgtgttcgtttccatgggctatcacaagaagacgtatgggggctaccaaggcagggtgtttctgaagggaggcagtgactctgacgcctcacttgtcatcacagacctcacactggaagattacggtagatataagtgcgaagtcatcgaggggctcgaagatgacactgtagtcgtagcactggaccttcaaggagtggtgttcccttatttcccgaggctgggccggtataacctcaacttccatgaagcccaacaggcctgcttagatcaagatgccgttatcgctagttttgaccagctgtatgacgcttggaggggaggactggactggtgtaacgcaggatggttatctgacggctccgttcagtatcccataacgaagcctagagagccttgcggaggacagaatacagtccccggggtgaggaactacggattctgggataaagataagtcacggtatgacgtcttttgcttcacttctaactttaatggaaggttttactatttaatccatcctaccaaactcacatatgatgaagccgttcaagcttgccttaacgatggtgcccagatagcaaaagtaggacagatttttgccgcttggaagatcctcggatacgatcggtgcgacgcaggctggcttgctgacgggagtgttaggtaccccattagccggccgagaagacgctgtagtcccaccgaagcagccgtaaggtttgttggcttccctgacaaaaagcataaactgtacggagtgtactgctttagggcgtacaattag

SEQ ID NO: 121910 - DNA, 549 bp, Artificial Sequence
  derived and/or modified sequence
atgaagagcctgctgctgctggtgctgatcagcatctgctgggccgatcatctgtctgataactacacactggaccacgacagagcaatccacatccaggaaaacggcccacatctactcgtcgaggccgagcaggccaaggtttttagccatcgaggaggaaatgtgacccttccatgcaaattttaccgcgatcccacagcgttcgggtccggcatacataaaatcaggattaagtggacaaagttaacatcagactatctgaaagaggttgacgtctttgtaagcatgggttaccacaaaaagacctacggtgggtaccagggcagagttttcctgaaaggcggtagcgacagcgacgcgagcttggtgattaccgatttgactctggaggattatggtaggtacaagtgcgaagtgatcgaaggcctggaggatgacacagtggtcgttgctttggacctccagggggtagtttttccctactttccgcgcctgggcaggtacaacctcaatttccacgaagcccagcaggcgtgcctggattag

SEQ ID NO: 121911 - DNA, 477 bp, Artificial Sequence
  derived and/or modified sequence
atgaagagcctgctgctgctggtgctgatcagcatctgctgggccgaccatctgtctgataactacacccttgatcatgatagagccattcacatccaagcagagaatggaccccatctgctggtggaggctgaacaagctaaagtcttcagccaccggggaggaaacgtgactctgccctgtaaattctaccgcgaccccaccgcgttcggtagtggcatccacaaaatacggatcaaatggacaaagttaacgtctgactacctgaaggaagtagacgtcttcgtttccatgggctaccacaagaagacttacggagggtaccagggcagggtgttcttaaagggggggtcggactctgacgctagcctggtgattaccgatctcaccctggaagattacggaagatataaatgcgaagtaattgaggggctcgaagacgataccgtggtggttgcactggacctgcaggggtag

SEQ ID NO: 121912 - DNA, 600 bp, Artificial Sequence
  derived and/or modified sequence
atgaagagcctgctgctgctggtgctgatcagcatctgctgggccgaccatctgagcgacaattatactttggatcacgaccgggccatccatatacaagccgagaacggcccacacctcctagtggaggctgagcaggcaaaagtgttttcccatagaggcggtaatgtgacactgccttgcaaattttaccgagaccctaccgcattcggatctggcattcataagattaggatcaaatggacgaagctcacctctgattacttgaaggaagtggatgtgtttgtgtctatgggataccacaaaaagacttacggtggatatcaggggcgagtgtttcttaagggaggctctgactcagatgcgagcctggtgatcaccgatctgacgttagaagattacggacgctataaatgtgaggtcattgagggtctggaggacgacaccgttgtggtggcgctcgatctccagggggtggtcttcccatatttccctaggttgggtcggtacaatttgaatttccatgaagcccagcaggcctgtctggaccaggacgcggtgattgccagctttgatcagctgtacgatgcttggcgatag

SEQ ID NO: 121913 - DNA, 777 bp, Artificial Sequence
  derived and/or modified sequence
atgaagagcctgctgctgctggtgctgatcagcatctgctgggccgaccacctgagtgataattatacactcgatcacgaccgggcaatccatattcaggccgaaaacggacctcatcttctggtcgaggctgaacaggcaaaagtgtttagccaccggggtggcaacgtgactctgccctgcaagttctaccgcgacccaactgctttcgggagtggaattcacaagattcgcattaaatggacaaagttgacatctgattacttgaaggaggttgatgttttcgtgtccatgggatatcacaagaagacctatggcggataccaaggccgtgtgttcctgaagggagggtccgattccgacgcatccctggtcattactgatttgaccctggaggactatggaagatataagtgtgaagtcatcgaagggctagaggacgacaccgtggtggtagctctggacttgcagggggtagtgtttccgtattttcctagactggggagatacaatctgaactttcacgaagctcagcaagcatgcctggatcaggacgcagttattgcttcatttgatcagttgtacgacgcttggagagggggattggattggtgtaacgccggttggctatcagacggcagcgtgcagtatcctatcaccaaaccacgagagccctgcggcggccaaaatacagtgcccggagtgcgaaactatggcttttgggacaaagacaagagcaggtatgatgttttctgtttcacttcgaacttcaactag

SEQ ID NO: 121914 - DNA, 462 bp, Artificial Sequence
  derived and/or modified sequence
atgaagagcctgctgctgctggtgctgatcagcatctgctgggccgatcaccttagcgataactacactttagatcatgaccgggcgatccacattcaggccgagaatggaccccacctgctggtagaagctgaacaggctaaggtctttagccaccggggcgggaacgtgactctgccctgcaagttttatcgggacccgaccgcatttggctccgggatccataagatcagaattaagtggaccaaattgacctctgattacctcaaggaagtggatgtttttgttagtatgggctaccataagaaaacttatgggggctaccaaggccgtgtgtttctcaaagggggcagcgatagtgacgccagcctcgtcattacagatctgactctcgaggattatggcaggtataaatgtgaggtcatagaggggctggaagatgatactgtggtggtggcttag

SEQ ID NO: 121915 - DNA, 1065 bp, Artificial Sequence
  derived and/or modified sequence
atgaagagcttgctgctcctcgtactcatctcgatatgctgggccgatcacctgagcgataattatactctggaccatgacagagctatccacatccaggcggagaacggaccccacctgctcgtggaagccgaacaagcaaaggtgttttcacaccggggaggcaacgtgaccttgccctgtaagttctaccgtgaccctaccgcttttggaagtgggattcataaaataaggataaaatggacaaaactcaccagtgactacctcaaggaagtggacgtgtttgtgtctatgggataccacaaaaaaacctatgggggataccagggcagagttttcctcaaaggcggaagcgattcggatgccagcctggtcattacagatctgaccctggaagattacggaaggtataagtgtgaggttattgagggtctggaagacgacacggtggtggttgccctcgacctccagggtgtagtgttcccatactttccccgactgggcaggtataatttgaacttccatgaagcccagcaggcctgtcttgaccaggacgcagtcattgcctcttttgatcagctgtatgacgcctggcggggagggctggattggtgcaacgccggttggctctctgacgggagcgtgcaataccctatcacgaagcccagggagccctgtgggggtcagaataccgtgccaggcgtgcgcaattacggcttttgggataaggacaagtctcgctatgatgttttctgtttcacatcaaatttcaacgggagattttattatctgattcaccctactaaactaacatacgatgaagccgtgcaggcgtgcctcaatgatggcgctcagattgcaaaagtggggcaaatttttgccgcttggaagatacttggttatgatagatgtgacgctggttggctggcagacggcagcgtgagatatcctatcagcaggcctaggcggaggtgcagcccaactgaggctgccgtgaggttcgttggcttcccagataagaaacataagttatatggggtttactgcttccgggcttacaactag

SEQ ID NO: 121916 - DNA, 549 bp, Artificial Sequence
  derived and/or modified sequence
atgaaatccttgctactgctggtcctcatttcaatttgttgggcagatcacctcagcgacaattatacactagaccatgatcgggcaatccacatccaggagaacggcccacacctgctagtggaagctgagcaggcaaaagtgttcagccacagagggggaaatgtgacgctcccctgcaagttttatagagatccaaccgccttcggctccggcattcataagatccggatcaaatggaccaagttaacaagcgattacctaaaggaagttgatgtgtttgtgtccatggggtatcataagaagacctatgggggataccaaggtcgggtgttcttgaaaggtggatctgattccgacgcttctctcgtgatcaccgacctgaccctggaagactatggccgttataaatgtgaagtgatcgaggggctggaggatgatacagtcgtggtagccctggatcttcagggggtagtgtttccctactttcctcgactgggtagatacaatctgaatttccacgaagcccagcaggcctgcctggactag

SEQ ID NO: 121917 - DNA, 477 bp, Artificial Sequence
  derived and/or modified sequence
atgaaaagtcttcttctccttgtacttatctcaatttgctgggctgatcatttgtccgacaattacaccctagaccacgacagagcgattcatatacaagcagagaatggaccacatctccttgtggaggccgagcaggcaaaagtattctctcaccgcggtggcaacgttacactgccctgcaagttttatcgcgatccaacagccttcgggagcgggatccacaagatccgtatcaagtggactaagttgacatccgattatctgaaggaagtggatgtctttgtctcaatgggttatcacaagaagacttatgggggttatcagggaagagtgttcttgaaaggtggctccgactcagatgcttcactggtgattaccgacctcaccctagaagattacggacgttacaagtgtgaggtaattgaaggacttgaggatgatactgtcgtggtggctttggatctgcaggggtag

SEQ ID NO: 121918 - DNA, 600 bp, Artificial Sequence
  derived and/or modified sequence
atgaagagcctgcttctcctggtgctgataagtatctgctgggctgaccatctgtccgataactacacactggatcatgatcgagcaattcacatccaggccgagaatggacctcacttgcttgtggaggctgaacaggccaaggtcttctcccatcggggtggcaacgtcacattaccctgcaaattctatagagatcccacagctttcgggagcgggatccataaaatccgcattaagtggacgaagctgactagcgattacctgaaggaggtggatgtgtttgtgagcatgggctaccataagaagacttacgggggatatcagggacgtgttttcctaaaggggggatcagatagcgacgcatctctcgtcatcacagacttaacattagaggattacgggaggtataaatgtgaggtaatcgaggggttggaagatgataccgtggtcgtcgcgctagatctccaaggcgtggtgttcccttactttccaaggctgggacgatacaaccttaacttccacgaagctcagcaggcttgcctggaccaggatgctgtaattgccagtttcgaccagctgtacgacgcctggaggtag

SEQ ID NO: 121919 - DNA, 777 bp, Artificial Sequence
  derived and/or modified sequence
atgaaaagtctgctgctgctggttctgatctcaatatgctgggcggatcatctctcggacaactacaccctggaccacgatagggccatacacatccaagctgagaacggccctcacctcctcgttgaagccgagcaggccaaggtctttagccaccggggaggcaatgtgacactcccatgcaaattctatagggatcccacagcgttcggctcaggcattcataagattcgtattaaatggaccaagctgacttcggattacctaaaagaggtcgacgtcttcgttagcatgggctaccacaaaaaaacgtacgggggatatcaaggcagggtgttcctcaaagggggaagcgactccgatgcttcactggtgatcactgatcttactctcgaggattacgggagatataaatgtgaagtcattgaaggactggaagatgacactgtggtggtggctctggacctacagggagtagtctttccctatttccctcggctggggcgatataacttgaacttccacgaggcccaacaggcctgtcttgaccaagacgcagtcatcgccagttttgatcagctctacgacgcatggagaggcggtctggactggtgtaacgccggatggctgagcgacggcagcgtgcagtacccaatcacgaagccccgtgagccttgcgggggtcagaataccgttcccggtgtgagaaattatggtttttgggataaagacaagagtagatacgacgttttctgctttaccagcaacttcaattag

SEQ ID NO: 121920 - DNA, 462 bp, Artificial Sequence
  derived and/or modified sequence
atgaagtctcttttattattggtgctgatcagcatctgttgggccgaccaccttagtgataattacaccttggaccatgaccgcgctatccatattcaagctgaaaatggccctcacctgctggttgaggccgagcaagcgaaagtcttttcccacagagggggaaatgttacccttccgtgcaaattctacagggaccctactgcctttggttccggcattcacaaaataaggatcaagtggaccaaattgacttccgattatttgaaggaagtggatgtgtttgtgagcatgggctaccacaagaaaacttacggaggatatcaggggcgagtgttccttaaaggaggttcggatagcgatgcttcattagtgatcaccgacctgacacttgaggactacggcaggtacaagtgcgaagtgattgagggcttggaggacgacacagtggtggtggcgtag

SEQ ID NO: 121921 - DNA, 1065 bp, Artificial Sequence
  derived and/or modified sequence
atgaagagcctgctgctgctggtgctgatcagcatctgctgggccgaccacctgagcgacaactacaccctggaccacgacagagccatccacatccaggccgagaacggcccccacctgctggtggaggccgagcaggccaaggtgttcagccacagaggcggcaacgtgaccctgccctgcaagttctacagagaccccaccgccttcggcagcggcatccacaagatcagaatcaagtggaccaagctgaccagcgactacctgaaggaggtggacgtgttcgtgagcatgggctaccacaagaagacctacggcggctaccagggcagagtgttcctgaagggcggcagcgacagcgacgccagcctggtgatcaccgacctgaccctggaggactacggcagatacaagtgcgaggtgatcgagggcctggaggacgacaccgtggtggtggccctggacctgcagggcgtggtgttcccctacttccccagactgggcagatacaacctgaacttccacgaggcccagcaggcctgcctggaccaggacgccgtgatcgccagcttcgaccagctgtacgacgcctggagaggcggcctggactggtgcaacgccggctggctgagcgacggcagcgtgcagtaccccatcaccaagcccagagagccctgcggcggccagaacaccgtgcccggcgtgagaaactacggcttctgggacaaggacaagagcagatacgacgtgttctgcttcaccagcaacttcaacggcagattctactacctgatccaccccaccaagctgacctacgacgaggccgtgcaggcctgcctgaacgacggcgcccagatcgccaaggtgggccagatcttcgccgcctggaagatcctgggctacgacagatgcgacgccggctggctggccgacggcagcgtgagataccccatcagcagacccagaagaagatgcagccccaccgaggccgccgtgagattcgtgggcttccccgacaagaagcacaagctgtacggcgtgtactgcttcagagcctacaactag

SEQ ID NO: 121922 - DNA, 549 bp, Artificial Sequence
  derived and/or modified sequence
atgaagagcctgctgctgctggtgctgatcagcatctgctgggccgaccacctgagcgacaactacaccctggaccacgacagagccatccacatccaggagaacggcccccacctgctggtggaggccgagcaggccaaggtgttcagccacagaggcggcaacgtgaccctgccctgcaagttctacagagaccccaccgccttcggcagcggcatccacaagatcagaatcaagtggaccaagctgaccagcgactacctgaaggaggtggacgtgttcgtgagcatgggctaccacaagaagacctacggcggctaccagggcagagtgttcctgaagggcggcagcgacagcgacgccagcctggtgatcaccgacctgaccctggaggactacggcagatacaagtgcgaggtgatcgagggcctggaggacgacaccgtggtggtggccctggacctgcagggcgtggtgttcccctacttccccagactgggcagatacaacctgaacttccacgaggcccagcaggcctgcctggactag

SEQ ID NO: 121923 - DNA, 477 bp, Artificial Sequence
  derived and/or modified sequence
atgaagagcctgctgctgctggtgctgatcagcatctgctgggccgaccacctgagcgacaactacaccctggaccacgacagagccatccacatccaggccgagaacggcccccacctgctggtggaggccgagcaggccaaggtgttcagccacagaggcggcaacgtgaccctgccctgcaagttctacagagaccccaccgccttcggcagcggcatccacaagatcagaatcaagtggaccaagctgaccagcgactacctgaaggaggtggacgtgttcgtgagcatgggctaccacaagaagacctacggcggctaccagggcagagtgttcctgaagggcggcagcgacagcgacgccagcctggtgatcaccgacctgaccctggaggactacggcagatacaagtgcgaggtgatcgagggcctggaggacgacaccgtggtggtggccctggacctgcagggctag

SEQ ID NO: 121924 - DNA, 600 bp, Artificial Sequence
  derived and/or modified sequence
atgaagagcctgctgctgctggtgctgatcagcatctgctgggccgaccacctgagcgacaactacaccctggaccacgacagagccatccacatccaggccgagaacggcccccacctgctggtggaggccgagcaggccaaggtgttcagccacagaggcggcaacgtgaccctgccctgcaagttctacagagaccccaccgccttcggcagcggcatccacaagatcagaatcaagtggaccaagctgaccagcgactacctgaaggaggtggacgtgttcgtgagcatgggctaccacaagaagacctacggcggctaccagggcagagtgttcctgaagggcggcagcgacagcgacgccagcctggtgatcaccgacctgaccctggaggactacggcagatacaagtgcgaggtgatcgagggcctggaggacgacaccgtggtggtggccctggacctgcagggcgtggtgttcccctacttccccagactgggcagatacaacctgaacttccacgaggcccagcaggcctgcctggaccaggacgccgtgatcgccagcttcgaccagctgtacgacgcctggagatag

SEQ ID NO: 121925 - DNA, 777 bp, Artificial Sequence
  derived and/or modified sequence
atgaagagcctgctgctgctggtgctgatcagcatctgctgggccgaccacctgagcgacaactacaccctggaccacgacagagccatccacatccaggccgagaacggcccccacctgctggtggaggccgagcaggccaaggtgttcagccacagaggcggcaacgtgaccctgccctgcaagttctacagagaccccaccgccttcggcagcggcatccacaagatcagaatcaagtggaccaagctgaccagcgactacctgaaggaggtggacgtgttcgtgagcatgggctaccacaagaagacctacggcggctaccagggcagagtgttcctgaagggcggcagcgacagcgacgccagcctggtgatcaccgacctgaccctggaggactacggcagatacaagtgcgaggtgatcgagggcctggaggacgacaccgtggtggtggccctggacctgcagggcgtggtgttcccctacttccccagactgggcagatacaacctgaacttccacgaggcccagcaggcctgcctggaccaggacgccgtgatcgccagcttcgaccagctgtacgacgcctggagaggcggcctggactggtgcaacgccggctggctgagcgacggcagcgtgcagtaccccatcaccaagcccagagagccctgcggcggccagaacaccgtgcccggcgtgagaaactacggcttctgggacaaggacaagagcagatacgacgtgttctgcttcaccagcaacttcaactag

SEQ ID NO: 121926 - DNA, 462 bp, Artificial Sequence
  derived and/or modified sequence
atgaagagcctgctgctgctggtgctgatcagcatctgctgggccgaccacctgagcgacaactacaccctggaccacgacagagccatccacatccaggccgagaacggcccccacctgctggtggaggccgagcaggccaaggtgttcagccacagaggcggcaacgtgaccctgccctgcaagttctacagagaccccaccgccttcggcagcggcatccacaagatcagaatcaagtggaccaagctgaccagcgactacctgaaggaggtggacgtgttcgtgagcatgggctaccacaagaagacctacggcggctaccagggcagagtgttcctgaagggcggcagcgacagcgacgccagcctggtgatcaccgacctgaccctggaggactacggcagatacaagtgcgaggtgatcgagggcctggaggacgacaccgtggtggtggcctag

SEQ ID NO: 121927 - DNA, 591 bp, Artificial Sequence
  derived and/or modified sequence
atgactctacaatgcaccaaatccgccgggccttggaaaatggtagtgtgggacgaagacggattccagggccggcggcacgagttcacagccgagtgcccatcagtgctcgagcttggatttgagactgtccgtagcctcaaggtgctcagcggcgcctgggtcggatttgagcacgcggggttccaggggcaacaatacatactcgagcgtggtgagtacccatcctgggacgcgtgggggggaaataccgcctatccggcagagcggctgacaagcttcaggcctgccgcgtgtgccaatcatcgcgattctcgcctaaccatctttgagcaggaaaacttcctagggaaaaaaggcgagttatccgatgattacccttcactgcaggccatggggtgggaagggaatgaggttggaagtttccacgtgcacagcggcgcctgggtgtgttctcagttcccgggatacagagggttccagtatgttctcgagtgtgatcaccatagcggcgattacaagcattttagagagtggggatcacatgcacccactttccaagtgcagtcaattcgccgtattcaacaatag

SEQ ID NO: 121928 - DNA, 591 bp, Artificial Sequence
  derived and/or modified sequence
atgaccctgcagtgcaccaagtctgctggcccctggaagatggtggtgtgggatgaagatggcttccagggcagaagacatgagttcaccgctgagtgccccagcgtgctggagctgggctttgaaacagtgcgcagcctgaaggtgctgagcggggcctgggtgggctttgaacatgctggcttccagggccagcagtacatcctggagcggggggagtaccccagctgggatgcctggggcggcaacacagcctacccagctgagcggctgaccagcttccggcctgctgcctgtgccaaccaccgggacagccggctgaccatctttgagcaggagaacttcctgggcaagaagggggagctgagtgatgactaccccagcctgcaggccatgggctgggagggcaatgaggtgggcagcttccacgtgcacagcggggcctgggtgtgcagccagtttcctggctaccggggcttccagtatgtgctggagtgtgaccaccacagcggggactacaagcacttccgggagtggggcagccacgcccccaccttccaggtgcagagcatccgccgcatccagcagtag

SEQ ID NO: 121929 - DNA, 591 bp, Artificial Sequence
  derived and/or modified sequence
atgaccctgcagtgcaccaagagcgccggcccctggaagatggtggtttgggatgaagatggttttcagggtcgtcggcatgagtttacagccgagtgtccctcggttcttgagctcgggtttgagacagtcaggtcattgaaagtgctgtctggcgcttgggtcgggtttgaacacgcaggttttcaggggcagcagtacattttggaacgcggtgaatatccttcctgggatgcctggggaggcaataccgcctaccccgctgagcggctgacttctttccggcctgctgcatgtgctaaccaccgggacagcagattgaccatcttcgaacaggagaacttcctgggtaagaagggcgagttgagcgacgattacccatcccttcaggctatgggatgggagggcaacgaagtcggctccttccatgtgcacagcggcgcatgggtgtgcagtcagttcccaggttaccgaggctttcaatacgtcttggagtgcgatcaccatagtggggactacaaacactttagagaatggggaagtcacgcccctactttccaggttcagagcattagaaggatccagcagtag

SEQ ID NO: 121930 - DNA, 591 bp, Artificial Sequence
  derived and/or modified sequence
atgaccctgcagtgcaccaagagcgccggaccctggaaaatggtcgtctgggatgaggatggcttccaaggcagacgccacgagtttactgcggagtgtccgtcagttcttgaactcgggtttgaaacggttcgctctctgaaagtgctttccggggcttgggtcggcttcgagcacgccggattccagggccaacagtatattctggagcggggagagtatccatcttgggacgcttggggtgggaacacagcgtaccctgctgaaagattgacatcattcagaccggcagcctgtgcaaatcaccgtgactctcgcctgaccatctttgaacaggaaaattttctgggaaagaagggagagctgtccgacgactacccctctcttcaagctatgggttgggaagggaacgaagtcggctcattccacgtccatagcggagcatgggtttgtagtcagttcccgggataccgaggattccagtatgtgctggagtgtgatcaccattctggcgactacaaacattttagagagtgggggagtcacgctccaaccttccaggtgcagtctattcgtcgaatacagcagtag

SEQ ID NO: 121931 - DNA, 591 bp, Artificial Sequence
  derived and/or modified sequence
atgaccctgcagtgcaccaagagcgccggcccctggaagatggtggtgtgggacgaggacggcttccagggcagaagacacgagttcaccgccgagtgccccagcgtgctggagctgggcttcgagaccgtgagaagcctgaaggtgctgagcggcgcctgggtgggcttcgagcacgccggcttccagggccagcagtacatcctggagagaggcgagtaccccagctgggacgcctggggcggcaacaccgcctaccccgccgagagactgaccagcttcagacccgccgcctgcgccaaccacagagacagcagactgaccatcttcgagcaggagaacttcctgggcaagaagggcgagctgagcgacgactaccccagcctgcaggccatgggctgggagggcaacgaggtgggcagcttccacgtgcacagcggcgcctgggtgtgcagccagttccccggctacagaggcttccagtacgtgctggagtgcgaccaccacagcggcgactacaagcacttcagagagtggggcagccacgcccccaccttccaggtgcagagcatcagaagaatccagcagtag

SEQ ID NO: 121932 - protein, 252 aa, Artificial Sequence
  derived and/or modified sequence
MSQAAKASASATVAVNPGPDTKGKGAPPAGTSPSPGTTLAPTTVPITSAKAAELPPGNYRLVVFELENFQGRRAEFSGECSNLADRGFDRVRSIIVSAGPWVAFEQSNFRGEMFILEKGEYPRWNTWSSSYRSDRLMSFRPIKMDAQEHKISLFEGANFKGNTIEIQGDDAPSLWVYGFSDRVGSVKVSSGTWVGYQYPGYRGYQYLLEPGDFRHWNEWGAFQPQMQSLRRLRDKQWHLEGSFPVLATEPPK

SEQ ID NO: 121933 - DNA, 759 bp, Artificial Sequence
  derived and/or modified sequence
atgtcacaggcggctaaagcctccgccagcgccactgtggcagtcaacccaggtccggatactaaggggaagggagcaccccccgctgggacaagtccgtccccagggaccaccctcgctccaacgacagtcccaatcacctctgccaaagcagcagagctccctccgggcaattatcgactggtggtttttgaattggaaaacttccagggacggcgcgccgagttcagtggcgaatgctccaaccttgccgacagggggttcgatagagtccgtagtataattgtctctgcaggcccctgggtcgctttcgaacagtctaacttccgcggtgagatgttcattcttgaaaagggggagtatcctcgctggaacacttggagcagcagctacaggagtgacaggctcatgtcattcagacccattaagatggacgcacaggagcacaagatctccctgttcgaaggcgctaacttcaagggaaatacgatagagatacaaggcgatgatgctcctagtctctgggtttacggtttctccgatcgggtcggctccgtcaaagtcagctcgggtacctgggtgggctatcagtatccgggctaccggggatatcaatatctgctcgagccgggcgattttaggcactggaatgaatggggagcgtttcagcctcaaatgcagagcctgcgcagactgagggacaagcagtggcacctcgaggggagctttccagtcttagccaccgagccccccaaatag

SEQ ID NO: 121934 - DNA, 759 bp, Artificial Sequence
  derived and/or modified sequence
atgagccaggccgccaaggccagcgccagcgccaccgtggccgtgaaccctggccctgacaccaagggcaagggggcccctcctgctggcaccagccccagccctggcaccaccctggcccccaccaccgtgcccatcaccagcgccaaggctgctgagctgcccccaggcaactaccgcctggtggtgtttgagctggagaacttccagggccggcgggcagagttctctggagaatgtagcaacctggccgaccggggctttgacagagtgcgcagcatcatcgtgtctgctggcccctgggtggcctttgagcagagcaacttccggggggagatgttcatcctggagaagggggagtacccccgctggaacacctggagcagcagctacagaagtgaccggctgatgtccttccggcccatcaagatggatgcccaggagcacaagatcagcctgtttgagggcgccaacttcaagggcaacaccatcgagatccagggagatgatgcccccagcctgtgggtgtatggcttcagtgacagagtgggctctgtgaaggtgagcagcggcacctgggtgggctaccagtacccaggctaccggggctaccagtacctgctggagcccggggacttccgccactggaatgagtggggcgccttccagccccagatgcagagcctgcggcggctgcgggacaagcagtggcacctggagggcagcttccctgtgctggccacagagccccccaagtag

SEQ ID NO: 121935 - DNA, 759 bp, Artificial Sequence
  derived and/or modified sequence
atgagccaggccgccaaggccagcgccagcgccaccgtggccgtgaatccagggcctgacacaaaagggaaaggtgctccgccggctggcacttctccttcaccaggaacaacattggcacctactacagtgcctatcacctcggccaaagccgctgagttgccccccggcaactatcgacttgtcgtgttcgagctggagaactttcagggacgcagggctgagttttctggagagtgttctaatctggccgatcgtggctttgatagggttcgctccattatcgtgtctgctggaccttgggtagcttttgaacaatcaaatttcaggggagaaatgttcatcctggagaaaggggaatatccgagatggaacacatggtcaagttcctataggagtgaccgcttaatgagctttcgcccaattaaaatggacgcccaggaacataaaatcagcctgttcgaaggggccaattttaagggcaacacgattgaaatccagggggatgacgcgccttctctatgggtttatggcttttccgatcgcgtgggatccgtgaaggtgtctagtggtacatgggtagggtatcaataccccggctatcgcggataccagtatctgctggagcccggcgatttccgacattggaacgaatggggggccttccagcctcagatgcagtctttgagaaggttgagagataaacagtggcatcttgagggttccttccctgtcttagccacagaacctccgaaatag

SEQ ID NO: 121936 - DNA, 759 bp, Artificial Sequence
  derived and/or modified sequence
atgtcccaggcagccaaggcatccgcctctgcaacggtggcggtgaatccgggacctgacaccaaaggaaaaggggctccacctgccggaacgtccccttcaccgggtaccacactcgcacccaccacagtccctataacaagtgccaaagccgctgagctcccacctgggaattacaggctggtcgtgtttgagcttgagaatttccagggacgacgcgctgagtttagcggagaatgttcgaacctggctgatagaggcttcgaccgggtcaggtccattatcgtgtcagcaggaccatgggtagccttcgaacagtctaatttcaggggggagatgttcattttggaaaaaggcgaataccccagatggaatacttggagcagcagttacagatctgatagactgatgtcttttcgccctatcaaaatggacgctcaggagcacaaaattagcctcttcgagggcgcaaactttaaggggaacacaatcgagatccagggagatgacgcacccagtctttgggtgtacggcttttccgatcgggtgggcagcgtcaaggtgtcttctggtacttgggttgggtaccagtatcccggttaccggggataccagtatctgctggagccgggtgactttcgtcattggaacgaatggggggcattccagccccaaatgcagtcccttcggcgtcttcgggacaagcagtggcacctcgaaggcagctttcccgtgctagccaccgagccacctaaatag

SEQ ID NO: 121937 - DNA, 1102 bp, Artificial Sequence
  derived and/or modified sequence
acagactatagggcctgatgtctgccagactataaaatggggggtcggactctagtcacccatagcacctgcccgcctgcctgtcctccagcaggaagtagcaagtccccagacttttgcaggcgggaaccatgtctcaggctgcaaaggcctcggcctcggccacagtggcggtgaacccagggcctgacaccaaggggaagggggccccacctgcaggaacatcccctagtcccggcactaccctggccccaacaaccgtgcctattaccagcgccaaggcggcggaactgcctcctgggaactacaggctggtggtcttcgaactggaaaacttccagggccgtcgagcagaattctcgggggagtgctcaaatctggcagaccgtggcttcgaccgtgtgcgcagcatcattgtctccgcgggaccctgggtcgcctttgagcagtccaacttccgcggggagatgttcatcctggagaagggcgagtaccctcgctggaacacatggtcgagcagctaccgcagtgatcggctcatgtccttccggcccatcaaaatggatgcccaggagcacaaaatctccctgtttgaaggggccaacttcaagggcaacaccatagagatccagggggacgacgcacccagtctctgggtctacggcttcagtgaccgcgtgggcagcgtgaaggtctccagtggaacatgggttggctatcagtatcctggctaccgcgggtaccagtacctcctagagcctggtgacttccggcactggaatgagtggggagccttccagccacagatgcagtccctgcgtcgcctgcgtgacaagcagtggcacctcgaggggtccttccctgtcctggccacagagccccccaagtgagtccacacctcactctgctaccttgccccaacccttcttcatgttcaattatttcccccatttttcccaggcaaataaaattccctaaagccaaaatttctcctggatctgtaaacagatgtgtgccttgaggtcccccatagttactgggatgtgacttcctcgctcttaataattacaacgataataaaagcagcaaacactgaaaagtt

SEQ ID NO: 121938 - DNA, 759 bp, Artificial Sequence
  derived and/or modified sequence
atgagccaggccgccaaggccagcgccagcgccaccgtggccgtgaaccccggccccgacaccaagggcaagggcgccccccccgccggcaccagccccagccccggcaccaccctggcccccaccaccgtgcccatcaccagcgccaaggccgccgagctgccccccggcaactacagactggtggtgttcgagctggagaacttccagggcagaagagccgagttcagcggcgagtgcagcaacctggccgacagaggcttcgacagagtgagaagcatcatcgtgagcgccggcccctgggtggccttcgagcagagcaacttcagaggcgagatgttcatcctggagaagggcgagtaccccagatggaacacctggagcagcagctacagaagcgacagactgatgagcttcagacccatcaagatggacgcccaggagcacaagatcagcctgttcgagggcgccaacttcaagggcaacaccatcgagatccagggcgacgacgcccccagcctgtgggtgtacggcttcagcgacagagtgggcagcgtgaaggtgagcagcggcacctgggtgggctaccagtaccccggctacagaggctaccagtacctgctggagcccggcgacttcagacactggaacgagtggggcgccttccagccccagatgcagagcctgagaagactgagagacaagcagtggcacctggagggcagcttccccgtgctggccaccgagccccccaagtag

SEQ ID NO: 121939 - protein, 314 aa, Artificial Sequence
  derived and/or modified sequence
MSRVPAFLSAAEVEEHLRSSSLLIPPLETALANFSSGPEGGVMQPVRTVVPVTKHRGYLGVMPAYSAAEDALTTKLVTFYEDRGITSVVPSHQATVLLFEPSNGTLLAVMDGNVITAKRTAAVSAIATKFLKPPSSEVLCILGAGVQAYSHYEIFTEQFSFKEVRIWNRTKENAEKFADTVQGEVRVCSSVQEAVAGADVIITVTLATEPILFGEWVKPGAHINAVGASRPDWRELDDELMKEAVLYVDSQEAALKESGDVLLSGAEIFAELGEVIKGVKPAHCEKTTVFKSLGMAVEDTVAAKLIYDSWSSGK

SEQ ID NO: 121940 - protein, 272 aa, Artificial Sequence
  derived and/or modified sequence
MQPVRTVVPVTKHRGYLGVMPAYSAAEDALTTKLVTFYEDRGITSVVPSHQATVLLFEPSNGTLLAVMDGNVITAKRTAAVSAIATKFLKPPSSEVLCILGAGVQAYSHYEIFTEQFSFKEVRIWNRTKENAEKFADTVQGEVRVCSSVQEAVAGADVIITVTLATEPILFGEWVKPGAHINAVGASRPDWRELDDELMKEAVLYVDSQEAALKESGDVLLSGAEIFAELGEVIKGVKPAHCEKTTVFKSLGMAVEDTVAAKLIYDSWSSGK

SEQ ID NO: 121941 - DNA, 945 bp, Artificial Sequence
  derived and/or modified sequence
atgagtcgggttccagcatttctgtccgcggcagaagtggaggagcatctacggagttcttccctccttatcccacccctcgagacagccctggctaatttttccagcggccccgaaggcggtgttatgcaaccggttcggacagtagttccggttaccaaacatcgtgggtatcttggcgtgatgccagcctactctgctgccgaggacgccctgaccacgaagctggtgaccttttatgaagaccggggtattacaagtgtggtccccagccatcaggccactgtgcttctgtttgagcctagtaacggaacccttctggcagtgatggatggaaacgtgataaccgccaagagaacagctgccgtatccgccatcgcaaccaagttcctgaaaccaccttctagcgaagtcctgtgcatcctgggtgcgggagtacaggcatactcccactatgaaatcttcactgagcagttctccttcaaggaggttaggatttggaaccggacaaaagaaaacgccgaaaagttcgcggacactgtgcagggtgaggtcagagtgtgcagttccgtccaggaggccgtcgcgggtgccgatgtcatcatcactgtgacgttggcgaccgaacctattttatttggcgagtgggtgaagcccggcgctcatatcaacgcagtcggagcaagccgccccgactggcgcgagcttgacgatgaattgatgaaagaggcagttctgtatgtggactcacaggaggcagccctcaaggagtctggcgatgtgttgcttagtggagccgaaatattcgccgaactgggagaagtaattaagggtgtgaagcctgctcactgtgagaaaacaacagtgtttaaatccctggggatggctgtggaagacacagtagccgcaaaacttatttatgatagttggagctcaggaaaatag

SEQ ID NO: 121942 - DNA, 819 bp, Artificial Sequence
  derived and/or modified sequence
atgcagcctgtgaggacagttgtgcccgtcactaaacaccgcggatacctcggagtgatgcctgcgtacagcgccgccgaggatgccctgactaccaagctcgtcacattctacgaagatcgtggcatcacttctgttgtgccctctcaccaagcaacggtgcttctgtttgaaccatctaacggaaccctgctggcggttatggacggaaatgttattaccgccaagcggacagcggccgtcagcgcaattgctactaaattcctcaagccacccagtagcgaagtcttgtgtatcctgggtgccggggtacaggcttatagccactacgaaatttttactgagcagttcagttttaaggaagtgcgaatctggaatcgaaccaaggaaaatgctgaaaaatttgctgatacagtccaaggagaggtgagagtttgtagctctgttcaagaagccgtggctggggcagatgtgatcatcaccgtgaccttggccacggaaccaatattgttcggcgaatgggttaagccaggagcccacattaatgcagtaggagccagtcgccccgactggagagagctggacgacgagcttatgaaagaggctgtcctttatgtcgactctcaggaggctgccctcaaggagtcaggggatgttctcctgtccggggctgagattttcgccgagctgggcgaggtgatcaaaggtgttaaacccgctcattgcgaaaaaactaccgttttcaagtctttaggcatggccgtggaagatacagtggccgctaaattgatttacgattcctggagttctggaaagtag

SEQ ID NO: 121943 - DNA, 945 bp, Artificial Sequence
  derived and/or modified sequence
atgagtcgggtgccagcgttcttgagtgcagccgaagtggaggagcaccttagaagttcgagccttctcatcccgcctctcgagacagccttggctaatttcagctctggtccagagggcggcgtgatgcagcccgttaggactgtcgtgcccgtgactaagcaccgaggctacttgggggtgatgccggcctactcagcggctgaagatgcattaaccaccaaactcgtcacgttctacgaagaccggggaattacctctgttgttccgtcacatcaagccactgttctgttatttgagccatccaatgggacgctgcttgctgttatggatgggaatgttataacagccaagagaaccgccgcagtcagtgctattgcaacaaaattcctgaaacctccttccagcgaggtcttgtgtatcctgggggcaggtgttcaggcctactcccactatgagatctttactgaacagttctcctttaaagaggtacgtatatggaaccgtacaaaggagaatgccgaaaagtttgccgacactgtgcagggcgaagtgagagtgtgctcgagcgtgcaggaagcggtggccggtgccgacgtgatcattactgtgaccctggcaactgagcctatcctcttcggcgagtgggtgaaacccggtgcacatatcaatgccgttggcgcatcacgacccgattggcgggagctggatgatgaattgatgaaggaggcagttctgtatgtagactcacaagaggctgcgctgaaagagagcggcgatgtcctgctttcaggtgcagaaattttcgccgagctgggagaggtcatcaaaggcgtgaaacctgcccactgcgagaaaacaacggtttttaaatcgcttggcatggccgttgaagataccgtggccgcaaagttaatttacgactcgtggtcaagcggcaaatag

SEQ ID NO: 121944 - DNA, 945 bp, Artificial Sequence
  derived and/or modified sequence
atgtctagagtgcctgcttttttgtccgctgcggaggtggaagagcacctgcgcagctccagcctactcattcctcctctcgagaccgctcttgctaacttctcttccggaccagagggtggcgtgatgcagcctgtgcgcaccgtggtgcctgtgaccaagcacagagggtaccttggggtgatgcccgcatatagcgccgccgaagatgcacttactacgaagctggttaccttctatgaagatcgcgggattacatcagtggtgccatcccaccaagccactgtcctcttgttcgagccaagtaatgggactctgctggctgtgatggatggcaacgtaatcacggctaagaggaccgccgcggtctctgccatcgcaacgaaattcctgaaaccaccctctagtgaagtactgtgtatcctcggggcaggtgtgcaagcatactctcactacgaaattttcaccgagcagttctccttcaaggaagtccggatatggaataggactaaagagaatgccgagaagtttgccgatacggtccagggagaggtccgggtctgttcctcagtgcaggaggccgtggcgggtgcagacgtcatcataaccgtgaccttggcaaccgagcccatactcttcggagaatgggtcaagcctggcgcccatatcaatgcggtaggagcttccaggcctgactggagagagttagatgacgaactgatgaaggaagcggtgctgtatgtggattcacaggaggctgcacttaaagagagtggcgacgtcttactgtctggcgctgagatcttcgcagagttgggagaggttattaaaggtgttaaacctgctcattgtgaaaagacaacagtttttaagtcccttggcatggctgtagaggacactgttgcagcaaaactgatttatgattcttggtcctctggcaagtag

SEQ ID NO: 121945 - DNA, 945 bp, Artificial Sequence
  derived and/or modified sequence
atgagccgggtgcctgccttcctgtctgctgctgaggtggaggagcacctgcggagcagcagcctgctgatcccccccctggagacagccctggccaacttcagcagcggccctgagggcggcgtgatgcagcctgtgaggacagtggtgcctgtgaccaagcaccggggctacctgggcgtgatgcctgcctacagcgctgctgaagatgccctgaccaccaagctggtgaccttctatgaagatcggggcatcacctctgtggtgcccagccaccaggccaccgtgctgctgtttgagcccagcaatggcaccctgctggccgtgatggatggaaatgtcatcacagccaagaggacagctgctgtgtctgccatcgccaccaagttcctgaagccacccagcagcgaggtgctgtgcatcctgggcgctggggtgcaggcctacagccactatgagatcttcacagagcagttctccttcaaggaggtgcgcatctggaacagaaccaaggaaaatgctgagaagtttgctgacacagtgcagggcgaggtgcgggtgtgcagctctgtgcaggaggccgtggccggggctgatgtgatcatcaccgtgaccctggccacagagcccatcctgtttggagagtgggtgaagccaggggcccacatcaatgctgtgggcgccagcaggccagactggagggagctggatgatgagctgatgaaggaggccgtgctgtatgtggacagccaggaggccgccctgaaggagagcggagatgtgctgctgagcggggctgagatctttgctgagctgggggaggtgatcaagggcgtgaagccagcccactgtgagaagaccaccgtcttcaagagcctgggcatggctgtggaggacacagtggccgccaagctgatctatgacagctggagcagcggcaagtag

SEQ ID NO: 121946 - DNA, 819 bp, Artificial Sequence
  derived and/or modified sequence
atgcagcctgtgaggacagtggtgcctgtgaccaagcaccggggctacctgggcgtgatgcctgcctacagcgctgctgaagatgccctgaccaccaagctggtgaccttctatgaagatcggggcatcacctctgtggtgcccagccaccaggccaccgtgctgctgtttgagcccagcaatggcaccctgctggccgtgatggatggaaatgtcatcacagccaagaggacagctgctgtgtctgccatcgccaccaagttcctgaagccacccagcagcgaggtgctgtgcatcctgggcgctggggtgcaggcctacagccactatgagatcttcacagagcagttctccttcaaggaggtgcgcatctggaacagaaccaaggaaaatgctgagaagtttgctgacacagtgcagggcgaggtgcgggtgtgcagctctgtgcaggaggccgtggccggggctgatgtgatcatcaccgtgaccctggccacagagcccatcctgtttggagagtgggtgaagccaggggcccacatcaatgctgtgggcgccagcaggccagactggagggagctggatgatgagctgatgaaggaggccgtgctgtatgtggacagccaggaggccgccctgaaggagagcggagatgtgctgctgagcggggctgagatctttgctgagctgggggaggtgatcaagggcgtgaagccagcccactgtgagaagaccaccgtcttcaagagcctgggcatggctgtggaggacacagtggccgccaagctgatctatgacagctggagcagcggcaagtag

SEQ ID NO: 121947 - DNA, 945 bp, Artificial Sequence
  derived and/or modified sequence
atgagccgggtgcccgccttcctgagcgccgccgaggtggaggagcatcttagatcaagttcactgttgatcccccccctagagacagccctggcaaacttcagctctgggccagagggtggcgtcatgcaaccagttcggacggttgtgccagttaccaaacatcgcggatatctgggcgttatgccagcttactccgcagcagaagacgctctgactactaagcttgtgaccttctacgaagatcggggtatcacgtcggtagtgccttcacaccaggcaacagtgctgctgttcgaaccctccaatggcaccttgctggccgtgatggacggaaatgtcataaccgccaaaaggacagctgccgtatcggcgattgctacaaaatttctcaaacctccgagctcagaagtgctgtgtattctaggcgcaggagtgcaggcttactcccattatgaaatcttcaccgaacagttcagctttaaggaggttcggatctggaatcggaccaaggagaatgccgaaaagttcgccgacaccgtgcagggcgaggtacgagtatgttcctcggtccaagaagcagtagcgggggcggatgtcattattactgtgacactggcaaccgagcccattctttttggggagtgggtcaagcccggcgcacacatcaacgccgtgggtgcttcacggcccgactggcgcgagctcgatgatgagctgatgaaggaagccgtgctatatgtggattctcaagaagctgctcttaaagagtcgggcgatgtactgctcagcggagcagaaatcttcgccgaactcggcgaggttataaaaggtgtaaaacctgcccattgcgagaagacaacagtgttcaagagtctgggcatggctgttgaggatactgtagccgcgaagttaatctacgacagctggtcttctgggaaatag

SEQ ID NO: 121948 - DNA, 819 bp, Artificial Sequence
  derived and/or modified sequence
atgcagcccgtgcggaccgtggtgcccgtgaccaagcaccggggctacttgggtgtcatgccagcgtactccgctgcagaggatgctctgactaccaagcttgtcacattttatgaagatagggggattacgtcagtggtcccctctcaccaggcaaccgtcttattatttgaaccatctaatggcactttgttagccgtgatggacggaaatgtgatcactgctaaacgcaccgccgcagtatccgctattgcgaccaaatttctgaagccaccttcatccgaggtgctgtgtattctaggcgcaggggtgcaggcctacagtcattatgagattttcactgaacagtttagctttaaagaggttagaatttggaatcgtaccaaagagaatgctgaaaaatttgccgacacagtccagggggaggtcagggtatgcagcagcgtacaggaggcagttgcaggggctgacgtgatcattacggtcactttggcaacagagcctatactatttggtgaatgggtcaagcctggcgcccatattaatgccgtgggcgcaagccggcctgactggcgagagttggacgatgaactgatgaaggaggcagtactgtacgttgactcacaggaggccgctctgaaagagagtggggatgtacttctgtccggggctgagatctttgccgagttgggcgaggtgatcaaaggcgtaaaacctgcccactgcgagaagacaacggtgttcaagagcctcggcatggccgtggaggataccgtggcagccaagctcatctatgatagttggagctcaggcaaatag

SEQ ID NO: 121949 - DNA, 945 bp, Artificial Sequence
  derived and/or modified sequence
atgagccgggtgcccgccttcctgagcgccgccgaggtggaggagcacctgaggtctagctccctcctgatcccaccgcttgaaacagccctggctaacttcagcagcggccctgaggggggggtaatgcaaccagttcgtaccgtcgttccggtgacgaagcaccgcggatacttgggcgtcatgcctgcttactctgctgcagaagatgcacttacaaccaaattagttacattttacgaagatcggggaatcacaagtgttgtcccttcccaccaggccactgtattattgtttgaaccctccaacggaacgctgctggccgtcatggacggcaatgtaattacagccaagcggacagccgccgtgagcgccattgccaccaaattcctgaaacccccttctagcgaggtgctttgtattctcggggccggcgtccaggcctacagccactacgagatcttcacagagcagtttagttttaaggaggttcgcatctggaataggacaaaagaaaacgccgagaaatttgctgataccgttcagggggaggtgcgggtgtgctcttcagttcaggaggccgtcgccggcgccgacgtgatcattacagttaccctggcaaccgagcctatcctgtttggcgagtgggtgaagcccggggcacatatcaatgccgtgggagcatcccggccagactggcgagagcttgacgacgaactcatgaaagaagcagtgttgtacgtggactcccaggaagccgcactgaaagaaagcggcgacgttttgctaagcggggccgagatctttgcggagctcggagaagtgatcaagggcgtgaagcccgcccattgtgaaaagacaaccgttttcaaaagcctgggcatggccgtggaggatactgtggccgcaaagctgatatacgatagctggagctcgggcaagtag

SEQ ID NO: 121950 - DNA, 945 bp, Artificial Sequence
  derived and/or modified sequence
atgagccgggtgcccgccttcctgagcgccgccgaggtggaggagcatcttcgctcttcctctttattgatcccacctctggaaaccgccctggctaactttagcagcggccctgagggcggcgtgatgcagccagtgcgtactgtcgtacccgtcaccaagcatcgcggatatctcggggtcatgcccgcatactcagccgcagaggatgccctcacaactaagcttgtgacattctacgaggaccgcgggatcacttctgtggttccctctcatcaagccaccgtgctgttgttcgagcccagtaatgggacactcctcgcagtgatggacggtaatgtcatcacggctaagagaaccgctgcagtgtccgcaatcgcgaccaaatttctgaagccgcctagtagtgaggtactgtgcattctcggtgccggcgtgcaggcctactcccattatgagatcttcaccgagcaatttagtttcaaggaagtgcgaatctggaatagaacgaaggagaacgccgaaaaattcgcggataccgtgcagggggaggttcgcgtctgttcatctgttcaggaagccgtggccggtgccgacgtcatcataaccgtcaccctagctaccgaacccatactctttggcgagtgggtcaagcccggcgctcatattaatgccgtgggggcttctcgccccgattggagagagttagatgatgagctcatgaaagaagccgtcttgtacgtcgatagccaggaagcagccctcaaggagagtggggacgtgttgcttagcggtgcagagatattcgctgagctgggggaggtcatcaagggggtgaagcctgctcattgcgagaaaactaccgtttttaagtccctgggtatggcagtggaagatactgtggctgctaagttaatctatgattcatggagcagcggcaaatag

SEQ ID NO: 121951 - DNA, 945 bp, Artificial Sequence
  derived and/or modified sequence
atgtccagagtgccggcattcctgtcagcagcagaagtagaggaacacctgagatcaagctccctattgattcccccactcgaaacagctttagctaacttcagttccgggcctgaaggtggggtcatgcaaccggtacgcactgtggtcccagtgactaagcaccgaggctacctcggggtcatgcctgcatattctgcggcagaggacgcgttgactaccaaattggtcaccttttacgaggatagaggcattacctcggttgtgccctcacatcaggcgaccgtgctgctcttcgaacccagcaatgggactcttctggccgttatggatggcaatgtgatcaccgcaaaacgcaccgccgctgtatctgcaatcgctacaaagtttttaaaaccaccgagctcggaggtactgtgcatactgggtgccggagtccaggcctattcacattatgaaatctttactgagcaatttagcttcaaggaggtgcggatatggaataggactaaagagaatgccgaaaagttcgctgatacagtacagggcgaagtgcgtgtgtgttcttccgtccaggaagcggtggcgggagccgatgtgatcatcactgtcacactggccactgagcctattttgttcggagagtgggtgaaaccaggtgcacatattaacgccgtcggcgcttcacggcctgactggcgtgaactcgatgacgagctgatgaaagaagccgtcctgtatgtggattcacaggaggcagccctgaaggagtccggtgacgtgctgctgtcgggggcagaaattttcgctgagctgggggaagtcatcaagggagtgaaacctgcgcattgcgagaagaccactgtgtttaagtccctcggaatggcggtcgaggacactgtagccgctaaactgatctatgacagctggagctccggtaaatag

SEQ ID NO: 121952 - DNA, 819 bp, Artificial Sequence
  derived and/or modified sequence
atgcaaccagtaaggactgtcgttcccgttacgaagcatcgtggttaccttggagtgatgcctgcctactccgccgctgaggatgctctgacaacgaagctggttaccttctatgaagacagaggaattactagcgtcgtgccgagtcaccaggccaccgttctgctttttgagccgtccaacggcacgctcttggcggtcatggacggaaatgtcataacggcaaaaaggactgccgcagtgagcgcaatcgcgaccaagttcttgaagcccccatcaagcgaagtgctatgcatcctcggcgcaggggtccaggcctactcccactacgaaatattcactgagcagttttcatttaaagaagtgcggatctggaataggacaaaggagaacgctgagaagtttgccgataccgtacagggggaggtccgagtatgcagctctgtgcaagaggctgtcgcaggggctgatgttatcatcaccgtgactcttgcgaccgaacctatactgtttggagagtgggtgaaacccggtgcccatattaatgccgtaggcgctagtcggcctgattggcgtgagcttgatgatgaactgatgaaggaggccgtgctgtacgtcgactctcaggaagccgcactcaaggagtctggcgatgtcctgctgtcaggcgcagaaatctttgccgaactcggtgaggtgattaaaggcgtaaagccagctcactgcgagaaaacaacagtttttaagagcctcggtatggcagtggaagacactgtcgcggctaaactgatttacgactcctggtctagcgggaagtag

SEQ ID NO: 121953 - DNA, 945 bp, Artificial Sequence
  derived and/or modified sequence
atgagtcgagtcccagctttcctgagtgctgccgaagttgaggaacatctgcggtcctccagcctattaatcccccctctcgagacagctctcgccaatttcagtagtggacccgagggcggagtaatgcagccagtgcgcacggtggtgcccgtgacaaagcataggggctatttgggcgttatgcccgcttatagcgcagcagaagatgcactgacgacaaaacttgtgacgttttatgaggatcgcggaatcacttctgtcgtcccatcacaccaggctaccgtgttgctgtttgaaccctcgaacggaactctcctagcagtgatggatggcaatgttataacagcgaaacgcacagccgctgtcagcgccatcgccacaaagtttctgaaaccaccaagctcagaggtgttgtgcatcctgggcgctggagtccaggcctactcccactacgaaatattcaccgagcagttttccttcaaagaggtccgaatttggaaccgaactaaggagaatgctgagaagtttgccgacaccgtccagggtgaagttagagtgtgcagcagcgtgcaagaagcggtggccggagcagacgtgatcattacggtcacactcgcgactgagcccattctgttcggcgaatgggtcaagcccggtgcccacataaatgccgtcggagcttcacgccctgactggagggagctggatgacgaactcatgaaggaggctgtgctgtatgtagactcacaggaggccgcactcaaggagagcggcgatgtgctcctgtcaggggctgagattttcgcagaactcggggaagtgataaagggcgtcaaacccgcacactgtgaaaaaactacagtgtttaagtccctgggaatggccgttgaggacactgtagcagcaaaacttatctacgacagttggtccagtgggaagtag

SEQ ID NO: 121954 - DNA, 945 bp, Artificial Sequence
  derived and/or modified sequence
atgtctcgtgtgccagccttcctttcagctgcagaagtcgaggagcatctgagatcatctagccttttaatcccccctctagagactgcccttgccaatttctcaagcgggcctgagggtggggttatgcagcccgtaagaacagtggttcctgtgacaaagcaccgagggtaccttggagtgatgcccgcatatagcgcagccgaggacgcactgactacaaaacttgtgacattctacgaggaccgaggtattaccagcgttgtccctagccaccaggctacggtgctactcttcgaaccctccaatggtacactgctggcagtgatggatggaaacgttatcacagctaaacgaaccgcagccgtgtctgccatcgccactaagtttctaaaaccccctagcagcgaagtgctttgtatactgggtgccggtgtgcaggcctattctcactacgaaatttttactgaacagttttctttcaaggaggtgcggatctggaatcgcacaaaggaaaacgcagaaaagtttgcagatactgtgcaaggtgaggtgcgggtgtgctcatctgtacaggaagccgtcgctggcgcagacgtaattattacggtgacgctggccactgagcctatactatttggggagtgggtgaagcctggcgctcacattaacgctgtgggcgcatcacggcctgattggcgcgagctggatgatgagctcatgaaggaggcagtgttgtatgttgactctcaggaggccgctctcaaggagtctggggacgttctgctgagcggagcagaaatttttgcagagcttggcgaagtaataaaaggagtcaagcctgcccattgcgagaaaacgacagtttttaagtcccttggtatggcggtggaagatacagtcgccgcaaagctgatctacgactcttggtcctcaggcaaatag

SEQ ID NO: 121955 - DNA, 1471 bp, Artificial Sequence
  derived and/or modified sequence
cttgtctgccactatgtgagatatacctttcaccttctgccgtgattgtgaggcctcctcagccacgtggaactgtaaaaactcctggaagaaaagatcctgcaatttggctttttgtgagatggaaaagattacaccttgccctgcaaacttcccccctttaaaggcgaaggtttgttagagcagcgggcgcgctcataaagggcacagccgagggtacgtggatcgcggtgcggagactgaggttagaaggcacaggtggcgagatgagccgggtaccagcgttcctgagcgcggccgaggtggaggaacacctccgcagctccagcctcctcatcccgcctctagagacggccctggccaacttctccagcggtcccgaaggaggggtcatgcagcccgtgcgcaccgtggtgccggtgaccaagcacaggggctacctgggggtcatgcccgcctacagtgctgcagaggatgcactgaccaccaagttggtcaccttctacgaggaccgcggcatcacctcggtcgtcccttcccaccaggctactgtgctactctttgagcccagcaatggcaccctgctggcggtcatggatggaaatgtcataactgcaaagagaacagctgcagtttctgccattgccaccaagtttctgaaacctcccagcagtgaagtgctgtgcatccttggggctggggtccaggcctacagccattatgagatcttcacagagcagttctcctttaaggaggtgaggatatggaaccgcaccaaagaaaatgcagagaagtttgcagacacagtgcaaggagaggtacgggtctgttcttcggtccaggaggctgtggcaggtgcagatgtgatcatcacagtcaccctggcaacagagcccattttgtttggtgaatgggtgaagccaggggctcacatcaatgctgttggagccagcagacctgactggagagaactggatgatgagctcatgaaagaagctgtgctgtacgtggattcccaggaggctgccctgaaggagtctggagatgtcctgctgtcaggggccgagatctttgctgagctgggagaagtgattaagggagtgaaaccagcccactgtgagaagaccaccgtgttcaagtctttgggaatggcagtggaagacacagttgcagccaaactcatctatgattcctggtcatctggtaaataaaacaaaggaacttgatgttgagatggatgcttgaggaatattgctgctggttctcataatttctagagtaaatgagggagtccagtccccagtgaactctccttttgtgcttatcatgttttaccttaaatgctgagatcctcatttatgtttgtagttggaaagcaaagctaggtagccatttcttctgttctaccaagttataatagcattcatttccctttatatttccctgaaataaagcacattccaattgtgca

SEQ ID NO: 121956 - DNA, 1273 bp, Artificial Sequence
  derived and/or modified sequence
ataaagggcacagccgagggtacgtggatcgcggtgcggagactgaggttagaaggcacaggtggcgagatgagccgggtaccagcgttcctgagcgcggccgaggtggaggaacacctccgcagctccagcctcctcatcccgcctctagagacggccctggccaacttctccagcggtcccgaaggaggggtcatgcagcccgtgcgcaccgtggtgccggtgaccaagcacaggggctacctgggggtcatgcccgcctacagtgctgcagaggatgcactgaccaccaagttggtcaccttctacgaggaccgcggcatcacctcggtcgtcccttcccaccaggctactgtgctactctttgagcccagcaatggcaccctgctggcggtcatggatggaaatgtcataactgcaaagagaacagctgcagtttctgccattgccaccaagtttctgaaacctcccagcagtgaagtgctgtgcatccttggggctggggtccaggcctacagccattatgagatcttcacagagcagttctcctttaaggaggtgaggatatggaaccgcaccaaagaaaatgcagagaagtttgcagacacagtgcaaggagaggtacgggtctgttcttcggtccaggaggctgtggcaggtgcagatgtgatcatcacagtcaccctggcaacagagcccattttgtttggtgaatgggtgaagccaggggctcacatcaatgctgttggagccagcagacctgactggagagaactggatgatgagctcatgaaagaagctgtgctgtacgtggattcccaggaggctgccctgaaggagtctggagatgtcctgctgtcaggggccgagatctttgctgagctgggagaagtgattaagggagtgaaaccagcccactgtgagaagaccaccgtgttcaagtctttgggaatggcagtggaagacacagttgcagccaaactcatctatgattcctggtcatctggtaaataaaacaaaggaacttgatgttgagatggatgcttgaggaatattgctgctggttctcataatttctagagtaaatgagggagtccagtccccagtgaactctccttttgtgcttatcatgttttaccttaaatgctgagatcctcatttatgtttgtagttggaaagcaaagctaggtagccatttcttctgttctaccaagttataatagcattcatttccctttatatttccctgaaataaagcacattccaattgtgc

SEQ ID NO: 121957 - DNA, 1400 bp, Artificial Sequence
  derived and/or modified sequence
gtaaaaactcctggaagaaaagatcctgcaatttggctttttgtgagatggaaaagattacaccttgccctgcaaacttcccccctttaaaggcgaaggtttgttagagcagcgggcgcgctcataaagggcacagccgagggtacgtggatcgcggtgcggagactgaggttagaaggcacaggtggcgagatgagccgggtaccagcgttcctgagcgcggccgaggtggaggaacacctccgcagctccagcctcctcatcccgcctctagagacggccctggccaacttctccagcggtcccgaaggaggggtcatgcagcccgtgcgcaccgtggtgccggtgaccaagcacaggggctacctgggggtcatgcccgcctacagtgctgcagaggatgcactgaccaccaagttggtcaccttctacgaggaccgcggcatcacctcggtcgtcccttcccaccaggctactgtgctactctttgagcccagcaatggcaccctgctggcggtcatggatggaaatgtcataactgcaaagagaacagctgcagtttctgccattgccaccaagtttctgaaacctcccagcagtgaagtgctgtgcatccttggggctggggtccaggcctacagccattatgagatcttcacagagcagttctcctttaaggaggtgaggatatggaaccgcaccaaagaaaatgcagagaagtttgcagacacagtgcaaggagaggtacgggtctgttcttcggtccaggaggctgtggcaggtgcagatgtgatcatcacagtcaccctggcaacagagcccattttgtttggtgaatgggtgaagccaggggctcacatcaatgctgttggagccagcagacctgactggagagaactggatgatgagctcatgaaagaagctgtgctgtacgtggattcccaggaggctgccctgaaggagtctggagatgtcctgctgtcaggggccgagatctttgctgagctgggagaagtgattaagggagtgaaaccagcccactgtgagaagaccaccgtgttcaagtctttgggaatggcagtggaagacacagttgcagccaaactcatctatgattcctggtcatctggtaaataaaacaaaggaacttgatgttgagatggatgcttgaggaatattgctgctggttctcataatttctagagtaaatgagggagtccagtccccagtgaactctccttttgtgcttatcatgttttaccttaaatgctgagatcctcatttatgtttgtagttggaaagcaaagctaggtagccatttcttctgttctaccaagttataatagcattcatttccctttatatttccctgaaataaagcacattccaattgtgcagtg

SEQ ID NO: 121958 - DNA, 945 bp, Artificial Sequence
  derived and/or modified sequence
atgagcagagtgcccgccttcctgagcgccgccgaggtggaggagcacctgagaagcagcagcctgctgatcccccccctggagaccgccctggccaacttcagcagcggccccgagggcggcgtgatgcagcccgtgagaaccgtggtgcccgtgaccaagcacagaggctacctgggcgtgatgcccgcctacagcgccgccgaggacgccctgaccaccaagctggtgaccttctacgaggacagaggcatcaccagcgtggtgcccagccaccaggccaccgtgctgctgttcgagcccagcaacggcaccctgctggccgtgatggacggcaacgtgatcaccgccaagagaaccgccgccgtgagcgccatcgccaccaagttcctgaagccccccagcagcgaggtgctgtgcatcctgggcgccggcgtgcaggcctacagccactacgagatcttcaccgagcagttcagcttcaaggaggtgagaatctggaacagaaccaaggagaacgccgagaagttcgccgacaccgtgcagggcgaggtgagagtgtgcagcagcgtgcaggaggccgtggccggcgccgacgtgatcatcaccgtgaccctggccaccgagcccatcctgttcggcgagtgggtgaagcccggcgcccacatcaacgccgtgggcgccagcagacccgactggagagagctggacgacgagctgatgaaggaggccgtgctgtacgtggacagccaggaggccgccctgaaggagagcggcgacgtgctgctgagcggcgccgagatcttcgccgagctgggcgaggtgatcaagggcgtgaagcccgcccactgcgagaagaccaccgtgttcaagagcctgggcatggccgtggaggacaccgtggccgccaagctgatctacgacagctggagcagcggcaagtag

SEQ ID NO: 121959 - DNA, 819 bp, Artificial Sequence
  derived and/or modified sequence
atgcagcccgtgagaaccgtggtgcccgtgaccaagcacagaggctacctgggcgtgatgcccgcctacagcgccgccgaggacgccctgaccaccaagctggtgaccttctacgaggacagaggcatcaccagcgtggtgcccagccaccaggccaccgtgctgctgttcgagcccagcaacggcaccctgctggccgtgatggacggcaacgtgatcaccgccaagagaaccgccgccgtgagcgccatcgccaccaagttcctgaagccccccagcagcgaggtgctgtgcatcctgggcgccggcgtgcaggcctacagccactacgagatcttcaccgagcagttcagcttcaaggaggtgagaatctggaacagaaccaaggagaacgccgagaagttcgccgacaccgtgcagggcgaggtgagagtgtgcagcagcgtgcaggaggccgtggccggcgccgacgtgatcatcaccgtgaccctggccaccgagcccatcctgttcggcgagtgggtgaagcccggcgcccacatcaacgccgtgggcgccagcagacccgactggagagagctggacgacgagctgatgaaggaggccgtgctgtacgtggacagccaggaggccgccctgaaggagagcggcgacgtgctgctgagcggcgccgagatcttcgccgagctgggcgaggtgatcaagggcgtgaagcccgcccactgcgagaagaccaccgtgttcaagagcctgggcatggccgtggaggacaccgtggccgccaagctgatctacgacagctggagcagcggcaagtag

SEQ ID NO: 121960 - protein, 185 aa, Artificial Sequence
  derived and/or modified sequence
MRLLILTCLVAVALARPKLPLRYPERLQNPSESSEPIPLESREEYMNGMNRQRNILREKQTDEIKDTRNESTQNCVVAEPEKMESSISSSSEEMSLSKCAEQFCRLNEYNQLQLQAAHAQEQIRRMNENSHVQVPFQQLNQLAAYPYAVWYYPQIMQYVPFPPFSDISNPTAHENYEKNNVMLQW

SEQ ID NO: 121961 - DNA, 558 bp, Artificial Sequence
  derived and/or modified sequence
atgagactcctgatcctgacgtgtctggtcgccgtggccttagcgaggccaaagctcccgttgaggtaccccgagcggctacagaatccaagcgaaagtagcgagccaattccccttgaatctagagaggaatatatgaatggcatgaaccgacagcggaatattttgagggagaaacaaaccgacgaaatcaaggatacgcgcaacgagtcaacccagaattgcgtagtagctgaacccgagaaaatggagtcttcgatctcgtcatccagcgaggagatgtccttgagcaaatgcgccgaacagttttgtcgcctcaatgaatacaatcagctgcaactccaagccgcacatgctcaggagcaaatacgcagaatgaatgaaaactcgcacgtccaggtccctttccaacaactcaaccagctcgccgcttacccatacgctgtttggtactatcctcagattatgcaatacgttcccttccctccattttccgatatttctaatcccactgcccacgagaattatgagaagaacaatgtgatgttacagtggtag

SEQ ID NO: 121962 - DNA, 558 bp, Artificial Sequence
  derived and/or modified sequence
atgagattactgatcctgacttgcctggtagcagtcgctctcgcgcgccctaaactgccactccgctacccggaacggttgcaaaacccctctgaaagcagtgaacctatccctctagaatcgagggaggaatatatgaacggcatgaatcgtcagagaaacatcctgcgcgaaaaacagacagacgagatcaaagatacccgaaatgagagcacccaaaactgcgtggtagccgagcctgagaagatggagtccagtatctccagcagctccgaagaaatgagcctatctaagtgtgccgaacagttttgtcggctgaacgagtataaccaattgcagctccaggcagcccacgcccaagaacaaatcagaagaatgaatgagaactctcatgtgcaagtgccttttcagcaactgaatcagctggccgcctacccctatgccgtctggtattatccccagattatgcaatatgtgccttttcctcccttcagcgacatatctaacccaactgctcacgaaaactacgagaagaataatgtgatgcttcagtggtag

SEQ ID NO: 121963 - DNA, 558 bp, Artificial Sequence
  derived and/or modified sequence
atgagacttttgatactgacctgcctcgttgcagttgcactggctcgtcctaagctccctctccgctaccctgaacggctccagaatccatccgaaagttccgaacccatcccactggaaagcagggaggaatatatgaatggcatgaatagacagagaaacatcttgagggagaagcagacagacgagatcaaggataccagaaatgagtccacccagaactgtgtggtggctgagcctgagaaaatggaaagcagcataagctcttcgtccgaggaaatgagtctaagcaaatgcgctgaacagttctgtagactgaacgagtacaatcagctgcagctccaggccgcacacgcccaagaacagatcaggcgcatgaatgagaactcacacgtccaagttccctttcagcaactcaaccagttggcagcttatccgtacgcagtatggtattatccacagatcatgcaatacgttccattccccccattcagcgacattagtaacccgactgcccacgaaaattatgagaagaataatgtgatgcttcagtggtag

SEQ ID NO: 121964 - DNA, 982 bp, Artificial Sequence
  derived and/or modified sequence
tcaacacaacttgcttctctccagacttgggcttaaggctctgataaccatgaggcttctcattctcacctgtcttgtggctgttgctcttgccaggcctaaacttcctcttagatacccagaacgccttcagaatccatcagagagcagtgagcctataccattagaatcaagagaggaatacatgaatggtatgaacaggcagagaaacattctgagagaaaaacagactgatgaaatcaaggatactaggaatgagtctactcagaactgtgttgtggcagagcctgagaagatggaatccagcatcagttcatcgagtgaggaaatgtctctcagtaagtgtgcggaacagttttgtagactgaacgaatacaaccaacttcagctgcaagctgcccatgcccaggagcaaattcgcagaatgaatgaaaacagccatgtccaagtgcctttccagcagctcaaccaacttgctgcctacccctatgctgtttggtactatccacaaatcatgcagtatgttcctttcccaccgttttccgacatctccaatcccactgctcatgaaaattatgaaaaaaataacgtcatgctacagtggtgatatgattgaaaatttcattctctgaatttctcctctcaaggaaaaccatcttatctgaagactggactgttgttttagaatagtaaaatcccatattgaaggaaattgttctttttgagttatctacttaatagcatatcattctttttcttaagctaaattttcctagagagtttattgtctaaatttcagttgtgtcttgccatatggagggcacctaatcagagggtattaaagtgtttactaagttttctagtggacattttgtttaaaaagtctttgaattgccagttctgtaagtgccatcaattaaaatagttttgtgcagtgacagagattttcttttttcttttcaataaattacactttaaggca

SEQ ID NO: 121965 - DNA, 558 bp, Artificial Sequence
  derived and/or modified sequence
atgagactgctgatcctgacctgcctggtggccgtggccctggccagacccaagctgcccctgagataccccgagagactgcagaaccccagcgagagcagcgagcccatccccctggagagcagagaggagtacatgaacggcatgaacagacagagaaacatcctgagagagaagcagaccgacgagatcaaggacaccagaaacgagagcacccagaactgcgtggtggccgagcccgagaagatggagagcagcatcagcagcagcagcgaggagatgagcctgagcaagtgcgccgagcagttctgcagactgaacgagtacaaccagctgcagctgcaggccgcccacgcccaggagcagatcagaagaatgaacgagaacagccacgtgcaggtgcccttccagcagctgaaccagctggccgcctacccctacgccgtgtggtactacccccagatcatgcagtacgtgcccttcccccccttcagcgacatcagcaaccccaccgcccacgagaactacgagaagaacaacgtgatgctgcagtggtag

SEQ ID NO: 121966 - DNA, 558 bp, Artificial Sequence
  derived and/or modified sequence
atgcgcttattaattctcacatgcctggtcgccgttgccctcgcacgcccgaaacttcctctgaggtaccctgagcggttgcagaatccctctgagtcatctgaacccataccattagaatcccgcgaggagtacatgaatggcatgaacagacagagaaatatactgagagaaaaacagactgatgaaatcaaagataccagaaacgaatccactcaaaactgcgtcgtggccgagccagagaaaatggaatcgagtatatcctcttcttctgaagaaatgagtctcagtaagtgcgccgagcaattttgtaggctcaacgagtataatcagctccagctgcaggccgcgcatgcacaggagcaaattcggcgcatgaacgagaatagtcatgtccaggtcccctttcagcagctgaaccaactcgctgcatatccttatgctgtatggtactatccgcagatcatgcagtacgtccccttccccccctttagcgacatctctaatcctactgcacacgagaactatgagaaaaacaacgttatgctgcagtggtag

SEQ ID NO: 121967 - DNA, 558 bp, Artificial Sequence
  derived and/or modified sequence
atgaggctgctgatcctgacctgcctggtggccgtggccctggcccggcccaagctgcccctgcgctacccagagcggctgcagaaccccagcgagagcagcgagcccatccccctggagagccgggaggagtacatgaatggcatgaaccggcagaggaacatcctgcgggagaagcagacagatgagatcaaggacaccagaaatgaaagcacccagaactgtgtggtggccgagcctgagaagatggagagcagcatcagcagcagcagcgaggagatgagcctgagcaaatgtgccgagcagttctgccgcctgaatgagtacaaccagctgcagctgcaggccgcccacgcccaggagcagatccggaggatgaatgaaaacagccacgtgcaggtgcccttccagcagctgaaccagctggccgcctacccctatgctgtgtggtactacccccagatcatgcagtatgtgcccttcccccccttcagtgacatcagcaaccccacagcccacgagaactatgagaagaacaacgtgatgctgcagtggtag

SEQ ID NO: 121968 - DNA, 558 bp, Artificial Sequence
  derived and/or modified sequence
atgcggctgctgatcctgacctgcctggtggccgtggccctggccaggcccaagctgcccttaaggtatcccgaaaggctgcagaatccatctgaaagctcggagcccatcccattggaaagccgtgaagaatacatgaatggtatgaaccggcagaggaacatcctgcgagagaaacaaacagatgagatcaaggatacaaggaatgagagcactcaaaactgcgtggtcgccgagcccgagaagatggagtcaagcataagcagtagtagcgaggagatgtctctaagtaagtgcgctgaacaattctgcagacttaatgagtataatcagttgcagctgcaggcggcacatgcccaagagcagataagacggatgaatgaaaattcccacgtacaggtgcctttccagcagctcaaccagctcgccgcctacccatacgctgtgtggtattacccccagatcatgcaatatgtgcctttcccaccttttagcgacatatccaacccaaccgctcatgagaactatgagaagaataacgtgatgctgcagtggtag

SEQ ID NO: 121969 - RNA, 558 nt, Artificial Sequence
  derived and/or modified sequence
augagauuacugauccugacuugccugguagcagucgcucucgcgcgcccuaaacugccacuccgcuacccggaacgguugcaaaaccccucugaaagcagugaaccuaucccucuagaaucgagggaggaauauaugaacggcaugaaucgucagagaaacauccugcgcgaaaaacagacagacgagaucaaagauacccgaaaugagagcacccaaaacugcgugguagccgagccugagaagauggaguccaguaucuccagcagcuccgaagaaaugagccuaucuaagugugccgaacaguuuugucggcugaacgaguauaaccaauugcagcuccaggcagcccacgcccaagaacaaaucagaagaaugaaugagaacucucaugugcaagugccuuuucagcaacugaaucagcuggccgccuaccccuaugccgucugguauuauccccagauuaugcaauaugugccuuuuccucccuucagcgacauaucuaacccaacugcucacgaaaacuacgagaagaauaaugugaugcuucagugguag

SEQ ID NO: 121970 - RNA, 558 nt, Artificial Sequence
  derived and/or modified sequence
augagacuuuugauacugaccugccucguugcaguugcacuggcucguccuaagcucccucuccgcuacccugaacggcuccagaauccauccgaaaguuccgaacccaucccacuggaaagcagggaggaauauaugaauggcaugaauagacagagaaacaucuugagggagaagcagacagacgagaucaaggauaccagaaaugaguccacccagaacugugugguggcugagccugagaaaauggaaagcagcauaagcucuucguccgaggaaaugagucuaagcaaaugcgcugaacaguucuguagacugaacgaguacaaucagcugcagcuccaggccgcacacgcccaagaacagaucaggcgcaugaaugagaacucacacguccaaguucccuuucagcaacucaaccaguuggcagcuuauccguacgcaguaugguauuauccacagaucaugcaauacguuccauuccccccauucagcgacauuaguaacccgacugcccacgaaaauuaugagaagaauaaugugaugcuucagugguag

SEQ ID NO: 121971 - protein, 337 aa, Artificial Sequence
  derived and/or modified sequence
MASSSGSKAEFIVGGKYKLVRKIGSGSFGDIYLAINITNGEEVAVKLESQKARHPQLLYESKLYKILQGGVGIPHIRWYGQEKDYNVLVMDLLGPSLEDLFNFCSRRFTMKTVLMLADQMISRIEYVHTKNFIHRDIKPDNFLMGIGRHCNKLFLIDFGLAKKYRDNRTRQHIPYREDKNLTGTARYASINAHLGIEQSRRDDMESLGYVLMYFNRTSLPWQGLKAATKKQKYEKISEKKMSTPVEVLCKGFPAEFAMYLNYCRGLRFEEAPDYMYLRQLFRILFRTLNHQYDYTFDWTMLKQKAAQQAASSSGQGQQAQTPTGKQTDKTKSNMKGF

SEQ ID NO: 121972 - DNA, 1014 bp, Artificial Sequence
  derived and/or modified sequence
atggctagctcctccggctccaaagcagaatttatcgttggcggcaaatataagctggtccggaaaattggcagcggatcctttggcgatatatatctggccatcaacattacgaatggtgaggaggtcgcggtgaagcttgaatctcagaaggcgcgccaccctcagctgctgtatgagtcgaagctgtacaaaattttgcagggaggtgtggggattccccatattagatggtatggccaggagaaggattacaacgtgctggtcatggacctcttgggaccttctctggaggatctcttcaatttttgtagtagaagatttacgatgaagaccgtgttgatgctcgcagatcagatgatttcaaggatcgagtatgtgcataccaagaatttcatccaccgcgacattaagcccgataactttctcatgggcatcggcaggcattgtaataagctgtttcttatcgacttcggactcgcaaagaaatacagggataatagaactagacagcatatcccctatcgcgaagacaagaatttaacgggcaccgcgcgctacgctagtatcaacgcacaccttgggatagagcagtctcgccgagatgacatggaaagtcttggttacgtgctgatgtactttaacagaaccagtcttccatggcaaggcctgaaggcagcaaccaagaaacagaagtatgaaaagattagtgagaaaaagatgagtacccccgtcgaggttctgtgtaagggttttccggccgaattcgccatgtacttaaattactgcaggggcctgcgctttgaggaggccccggactatatgtatttacggcagttgtttcgaatccttttcaggacattgaatcaccagtatgactacaccttcgactggaccatgctcaagcaaaaagccgctcagcaggctgcctccagttcggggcaggggcagcaggctcagacaccaacaggaaagcagactgacaaaactaagagcaatatgaagggattctag

SEQ ID NO: 121973 - DNA, 1014 bp, Artificial Sequence
  derived and/or modified sequence
atggccagcagcagcggcagcaaggccgagttcatcgtgggcggcaagtacaagctggtgaggaagattggcagcggcagctttggagacatctacctggccatcaacatcaccaatggagaggaggtggccgtgaagctggagagccagaaggcccggcacccccagctgctgtatgagagcaagctgtacaagatcctgcagggcggcgtgggcatcccccacatccgctggtacggccaggagaaggactacaacgtgctggtgatggacctgctgggccccagcctggaggacctcttcaacttctgcagccgccgcttcaccatgaagacagtgctgatgctggccgaccagatgatcagccgcatcgagtatgtgcacaccaagaacttcatccaccgggacatcaagccagacaacttcctgatgggcatcggccgccactgcaacaagctgttcctgattgactttggcctggccaagaagtacagagacaacagaacccggcagcacatcccctaccgggaggacaagaacctgaccggcacagcccgctatgccagcatcaatgcccacctgggcatcgagcagagcagaagagatgacatggagagcctgggctacgtgctgatgtacttcaacagaaccagcctgccctggcagggcctgaaggccgccaccaagaagcagaagtatgagaagatcagcgagaagaagatgagcacccctgtggaggtgctgtgcaagggcttccctgctgagtttgccatgtacctgaactactgccggggcctgcgctttgaggaggccccagactacatgtacctgcggcagctgttccgcatcctcttccgcaccctgaaccaccagtatgactacacctttgactggaccatgctgaagcagaaggccgcccagcaggccgccagcagcagcggccagggccagcaggcccagacccccaccgggaagcagacagacaagaccaagagcaacatgaagggcttctag

SEQ ID NO: 121974 - DNA, 1014 bp, Artificial Sequence
  derived and/or modified sequence
atggccagcagcagcggcagcaaggccgagttcatcgtgggcggcaagtacaaacttgtgaggaagattgggtctggcagcttcggcgatatctacttagccataaacattactaatggcgaagaagtggccgttaagctggagagccagaaggccaggcaccctcagctgctctatgaaagtaagttatacaagatcctacaggggggagttggcattcctcacattcggtggtatggccaggagaaggattacaatgtcttagtgatggatctgctggggccctccctggaggatctgttcaacttctgcagtcgcaggttcaccatgaagaccgtgcttatgctggctgatcagatgatctctagaattgagtatgtgcacacaaagaatttcatacatagggatatcaagccagacaacttcctgatgggtatcggtaggcattgcaataagttatttcttattgacttcggcctagcaaaaaagtatcgtgacaatcgtacccgccaacacatcccatatcgcgaggacaaaaatctgactggcaccgctcgatacgcgtcaatcaacgcacatttgggaatcgaacagtccagaagagatgacatggaatctttaggatacgtgctgatgtacttcaaccgtacttctctgccctggcaaggcttgaaagcagcgaccaagaagcagaagtacgagaaaatctctgaaaaaaagatgagcaccccagtcgaagtcctgtgcaaaggattcccagcagaattcgcgatgtatctgaattactgccgtggactgcgttttgaggaagcacccgattacatgtacttgaggcaactttttcgtattctgtttagaaccctcaatcatcaatatgattacaccttcgattggacgatgctgaaacagaaagcggcccagcaggctgcatcatcttctggacagggtcagcaggcgcagacacctacaggcaaacaaacagataaaaccaagtccaacatgaagggcttttag

SEQ ID NO: 121975 - DNA, 1014 bp, Artificial Sequence
  derived and/or modified sequence
atggcgagcagctccgggagtaaagctgagtttattgttggaggtaagtacaagcttgtgcgaaagattggaagtgggtctttcggcgacatctaccttgcaatcaacataactaacggggaggaggtcgctgttaagctggagtcccagaaagcacgccatcctcagctgctgtacgaaagcaagctttataaaatcctacaaggaggcgttggtatccctcatattcgttggtacggacaagaaaaggactacaatgtgctggttatggacttgctcggtccatcccttgaggatctgttcaatttttgtagccgaagattcaccatgaagaccgttctgatgctcgctgaccagatgatttcccgaatcgagtacgttcatactaagaatttcatccaccgcgacatcaagcctgacaattttctgatgggcattggtagacattgcaacaaattattcctaattgactttgggctcgctaaaaagtatagggacaaccgcacccggcaacatatcccttaccgcgaggataaaaatctgacaggcaccgcacgatacgcctccattaacgcacatctgggaatcgagcagtcccgtagagacgacatggagtctctgggctacgtgctcatgtatttcaacagaacctcactgccgtggcaaggtctgaaagctgcaaccaaaaagcaaaagtatgaaaagatctcagaaaaaaaaatgtcgacaccggtcgaggtcctgtgcaaggggtttccagctgaatttgccatgtatcttaactactgcaggggactaagatttgaagaggctcctgattatatgtatctgcgccagctgttccggattttgttccgcaccctgaatcaccagtatgattatacatttgattggacgatgctgaagcagaaagccgcacaacaagctgctagctctagcggccagggccaacaggctcagactcctaccggcaaacaaaccgacaagacgaagagcaacatgaagggattctag

SEQ ID NO: 121976 - DNA, 3065 bp, Artificial Sequence
  derived and/or modified sequence
cctttcccagagtgctctgcgccgtgaagaagcggctcccggggactgggggcattttgtgttggctggagctggagtaacaagatggcgtcgtccgcggagtgacaggggtccctctgggccggagccggcggcagtggtggcagcggtatcgccgccctagctcaccgcgccccttttccagcccgcgacgtcgccgcgcaagcgaggcagcggcggccgccgagaaacaagtggcccagcctggtaaccgccgagaagcccttcacaaactgcggcctggcaaaaagaaacctgactgagcggcggtgatcaggttcccctctgctgattctgggccccgaaccccggtaaaggcctccgtgttccgtttcctgccgccctcctccgtagccttgcctagtgtaggagccccgaggcctccgtcctcttcccagaggtgtcggggcttggccccagcctccatcttcgtctctcaggatggcgagtagcagcggctccaaggctgaattcattgtcggagggaaatataaactggtacggaagatcgggtctggctccttcggggacatctatttggcgatcaacatcaccaacggcgaggaagtggcagtgaagctagaatctcagaaggccaggcatccccagttgctgtacgagagcaagctctataagattcttcaaggtggggttggcatcccccacatacggtggtatggtcaggaaaaagactacaatgtactagtcatggatcttctgggacctagcctcgaagacctcttcaatttctgttcaagaaggttcacaatgaaaactgtacttatgttagctgaccagatgatcagtagaattgaatatgtgcatacaaagaattttatacacagagacattaaaccagataacttcctaatgggtattgggcgtcactgtaataagttattccttattgattttggtttggccaaaaagtacagagacaacaggacaaggcaacacataccatacagagaagataaaaacctcactggcactgcccgatatgctagcatcaatgcacatcttggtattgagcagagtcgccgagatgacatggaatcattaggatatgttttgatgtattttaatagaaccagcctgccatggcaagggctaaaggctgcaacaaagaaacaaaaatatgaaaagattagtgaaaagaagatgtccacgcctgttgaagttttatgtaaggggtttcctgcagaatttgcgatgtacttaaactattgtcgtgggctacgctttgaggaagccccagattacatgtatctgaggcagctattccgcattcttttcaggaccctgaaccatcaatatgactacacatttgattggacaatgttaaagcagaaagcagcacagcaggcagcctcttccagtgggcagggtcagcaggcccaaacccccacaggcaagcaaactgacaaaaccaagagtaacatgaaaggtttctaagcatgaattgaggaacagaagaagcagagcagatgatcggagcagcatttgtttctccccaaatctagaaattttagttcatatgtacactagccagtggttgtggacaaccatttacttggtgtaaagaacttaatttcagtataaactgactctgggcagcattggtgatgctgtatcctgagttgtagcctctgtaattgtgaatattaactgagatagtgaaacatggtgtccggttttctattgcattttttcaagtggaaaagttaactaaatggttgacacacaaaaattggtggagaaattgtgcatatgccaattttttgttaaaaccttttgttttgaactatactgctttgagatctcatttcagaagaacggcatgaacagtcttcagccacagttgtgatggttgttaaatgctcacaattgtgcattcttagggtttttccatccctggggtttgcaagttgttcacttaaaacattcttaaaatggttggcttcttgtctgcaagccagctgatatggtagcaaccaaagattccagtgtttgagcatatgaaagactctgcctgcttaattgtgctagaaataacagcatctaaagtgaagacttaagaaaaacttagtgactactagattatccttaggactctgcattaactctataatgttcttggtattaaaaaaaaagcatatttgtcacagaaatttagttaacatcttacaactgaacatgtatgtatgttgcttagataaatgtaatcactgtaaacatctatatgatctgggattttgtttttattttgaaatgggagcttttttgtttacaagttcattaaaaactaaaaactgtttctgtaaggaaatgagattttttttaaacaacaaaaaatgccttgctgactcactattaaataaaaatctccccaattttttgatagactacttcaagccatttgttacatggtattcctttgcaagtcaatttaggtttcgtgttataacttttcctctttttttaagaaaaatgaaaaaagtaattcttttgtctgaaggggaaaggcattctttcatttttttctttttttttttttttttttatgacttgcaggcacaatatctagtactgcaactgccagaacttggtattgtagctgctgcccgctgactagcagctggactgattttgaataaaaatgaaagcattaaagggtttccctacaaaacatttttctttaaaatacttttgaaatggctataagcagttgactttcacccttggagagcatcacactgtgtgaggttcagtgattgttgaccctccccagcccctcctgcttctttaagttatctgtgtgcgtgcgcttcctctcaatcttctttgcacgctcatttctttttctctgacccatgagaaaggaaaacttactgatgataatttttaaatagtgtaatttattcatttatagcatgtcaggataaattaaaagaacatttgtctggaaatgctgccgggagcctattgtgtaaatgtaggtattttgtaaaataaccttgaaattg

SEQ ID NO: 121977 - DNA, 1014 bp, Artificial Sequence
  derived and/or modified sequence
atggccagcagcagcggcagcaaggccgagttcatcgtgggcggcaagtacaagctggtgagaaagatcggcagcggcagcttcggcgacatctacctggccatcaacatcaccaacggcgaggaggtggccgtgaagctggagagccagaaggccagacacccccagctgctgtacgagagcaagctgtacaagatcctgcagggcggcgtgggcatcccccacatcagatggtacggccaggagaaggactacaacgtgctggtgatggacctgctgggccccagcctggaggacctgttcaacttctgcagcagaagattcaccatgaagaccgtgctgatgctggccgaccagatgatcagcagaatcgagtacgtgcacaccaagaacttcatccacagagacatcaagcccgacaacttcctgatgggcatcggcagacactgcaacaagctgttcctgatcgacttcggcctggccaagaagtacagagacaacagaaccagacagcacatcccctacagagaggacaagaacctgaccggcaccgccagatacgccagcatcaacgcccacctgggcatcgagcagagcagaagagacgacatggagagcctgggctacgtgctgatgtacttcaacagaaccagcctgccctggcagggcctgaaggccgccaccaagaagcagaagtacgagaagatcagcgagaagaagatgagcacccccgtggaggtgctgtgcaagggcttccccgccgagttcgccatgtacctgaactactgcagaggcctgagattcgaggaggcccccgactacatgtacctgagacagctgttcagaatcctgttcagaaccctgaaccaccagtacgactacaccttcgactggaccatgctgaagcagaaggccgcccagcaggccgccagcagcagcggccagggccagcaggcccagacccccaccggcaagcagaccgacaagaccaagagcaacatgaagggcttctag

SEQ ID NO: 121978 - protein, 415 aa, Artificial Sequence [sequence omitted]

SEQ ID NO: 121979 - protein, 358 aa, Artificial Sequence
  derived and/or modified sequence
MMQGGVGIPTIRWCGAEGDYNVMVMELLGPSLEDLFNFCSRKFSLKTVLLLADQMISRIEYIHSKNFIHRDVKPDNFLMGLGKKGNLVYIIDFGLAKKYRDARTHQHIPYRENKNLTGTARYASINTHLGIEQSRRDDLESLGYVLMYFNLGSLPWQGLKAATKRQKYERISEKKMSTPIEVLCKGYPSEFATYLNFCRSLRFDDKPDYSYLRQLFRNLFHRQGFSYDYVFDWNMLKFGASRAADDAERERRDREERLRHSRNPATRGLPSTASGRLRGTQEVAPPTPLTPTSHTANTSPRPVSGMERERKVSMRLHRGAPVNISSSDLTGRQDTSRMSTSQIPGRVASSGLQSVVHR

SEQ ID NO: 121980 - DNA, 1248 bp, Artificial Sequence
  derived and/or modified sequence
atggagttgcgagttgggaaccgatatagacttgggaggaagattgggtccggcagctttggagacatctatttaggtaccgacatcgcagccggcgaagaggttgcaataaaactggagtgcgttaaaacgaagcacccacagctgcatatcgagagcaaaatttacaaaatgatgcagggtggagtgggcattcctaccatcaggtggtgtggcgcggagggcgactacaatgtgatggtcatggaactcttggggccaagtctagaagacctatttaacttttgctcccgcaagttttcactcaagaccgttctgttgctggctgaccaaatgattagcaggatagagtatattcacagcaaaaattttattcaccgggatgtcaagcccgataatttccttatgggactggggaaaaagggtaacctagtatatatcattgatttcggacttgccaaaaaatatagggacgcccgcacccaccaacatattccataccgtgagaacaagaatctgacgggaactgcccggtacgcttccatcaatacccacctgggcattgagcagtcgcggagagacgacctggaaagtctgggctacgtcctgatgtatttcaacctgggcagcttaccatggcaaggccttaaggccgcgaccaaaaggcagaagtacgagagaatttccgagaagaaaatgtctacgcctattgaggtgctctgcaaaggctatccgtctgagttcgctacctacctgaacttctgcaggagcttgcgttttgatgataagccagattacagttatcttcgccagcttttccggaatctgtttcatagacagggtttctcttacgactatgtattcgactggaacatgctgaaatttggagcttcacgagctgccgacgacgccgagagagaacgcagagaccgtgaggaaagactgagacacagtcgcaatcctgccacgcgggggctgccatccacagcaagtggccgcctgcgcggtacccaggaagtggccccgcctactcctctgacgccaacatcccacactgccaacacgtcaccaagaccagtcagcggaatggagcgggagcgcaaggtctcaatgaggctgcaccggggagctcccgtaaacatctcctcgagtgacctcacaggccggcaggacacctcccgaatgtccacttctcagatacctgggcgtgtagccagtagcgggcttcaaagtgttgtgcaccggtag

SEQ ID NO: 121981 - DNA, 1077 bp, Artificial Sequence
  derived and/or modified sequence
atgatgcagggcggcgtgggcatccctaccatcaggtggtgtggggccgagggcgattacaacgtgatggtgatggagctgctcggcccttctttggaagacctgttcaatttttgctctagaaagttctcactcaaaactgtactgttgctggccgatcaaatgataagtagaattgagtacatccacagcaagaacttcatccaccgcgatgttaagcccgacaactttctcatggggctcggcaagaagggaaaccttgtctatatcattgatttcggcctcgcaaagaagtatcgtgacgccagaacacatcaacacatcccctatagggagaataagaatttgactggcacagctagatatgccagtatcaatacacacctgggtatcgagcagtcccggcgggacgatctggaatcccttggctatgttttaatgtattttaacctaggttctctgccatggcagggactaaaagctgctaccaagaggcagaagtacgagagaatcagcgagaaaaagatgtctaccccaattgaggtactctgcaagggctaccctagtgagtttgcgacctatttaaacttctgccgctcattgaggttcgacgataagccagactatagctacctgaggcagttatttcgtaatctctttcacaggcaggggttttcctatgactatgtgttcgattggaatatgctgaagttcggcgcgtcccgtgcggcggatgacgctgaacgggaaaggcgggacagggaggaacggcttcgccattcccgcaatcctgctacaagagggctcccgtcaaccgcttctggtcgattgcgggggacacaggaggtggcgcccccaacgccactcacccctaccagtcacacagccaacaccagccctcgccccgtttcggggatggagcgagagcgcaaggtctctatgcgactgcaccggggcgcccccgtcaatatcagctcttccgacttgactggacgacaagatacctcccggatgtccacatctcagatcccgggcagggtcgcaagctccgggctacagtccgtcgtccaccgatag

SEQ ID NO: 121982 - DNA, 1248 bp, Artificial Sequence
  derived and/or modified sequence
atggagctgcgggtgggcaaccgctaccgcctgggcaggaagattggcagcggcagctttggagacatctacctgggcacagacattgctgctggggaggaggtggccatcaagctggagtgtgtgaagaccaagcacccccagctgcacatcgagagcaagatctacaagatgatgcagggcggcgtgggcatccccaccatccgctggtgtggggctgagggggactacaacgtgatggtgatggagctgctgggccccagcctggaggacctcttcaacttctgcagcaggaagttcagcctgaagacagtgctgctgctggccgaccagatgatcagccgcatcgagtacatccacagcaagaacttcatccacagagatgtgaagccagacaacttcctgatgggcctgggcaagaagggcaacctggtgtacatcatcgactttggcctggccaagaagtacagagatgcccggacccaccagcacatcccctaccgggagaacaagaacctgaccggcacagcccgctatgccagcatcaacacccacctgggcatcgagcagagcagaagagatgacctggagagcctgggctacgtgctgatgtacttcaacctgggcagcctgccctggcagggcctgaaggccgccaccaagaggcagaagtatgagcgcatcagcgagaagaagatgagcacccccatcgaggtgctgtgcaagggctaccccagcgagtttgccacctacctgaacttctgccgcagcctgcgctttgatgacaagccagactacagctacctgcggcagctgttcaggaacctcttccaccggcagggcttctcctatgactatgtgtttgactggaacatgctgaagtttggagccagcagagctgctgatgatgctgagcgggagcggcgggaccgggaggagcggctgcggcacagcagaaatcctgccacccggggcctgcccagcacagccagcggccgcctgcggggcacccaggaggtggccccacccacccccctgacccccaccagccacacagccaacaccagccccaggcctgtgtctggcatggagcgggagaggaaggtgtccatgaggctgcacagaggagcccctgtgaacatcagcagcagtgacctgaccggccggcaggacaccagcaggatgagcaccagccagatccctggccgggtggccagcagcggcctgcagagcgtggtgcacaggtag

SEQ ID NO: 121983 - DNA, 1077 bp, Artificial Sequence
  derived and/or modified sequence
atgatgcagggcggcgtgggcatccccaccatccgctggtgtggggctgagggggactacaacgtgatggtgatggagctgctgggccccagcctggaggacctcttcaacttctgcagcaggaagttcagcctgaagacagtgctgctgctggccgaccagatgatcagcagaattgagtacatccacagcaagaacttcatccacagagatgtgaagccagacaacttcctgatgggcctgggcaagaagggcaacctggtgtacatcatcgactttggcctggccaagaagtacagagatgcccggacccaccagcacatcccctaccgggagaacaagaacctgactggaacagcccgctatgccagcatcaacacccacctgggcatcgagcagagcagaagagatgacctggagagcctgggctacgtgctgatgtacttcaacctgggcagcctgccctggcagggcctgaaggccgccaccaagaggcagaagtatgaaagaatcagcgagaagaagatgagcacccccatcgaggtgctgtgcaagggctaccccagcgagtttgccacctacctgaacttctgccgcagcctgcgctttgatgacaagccagactacagctacctgcggcagctgttcaggaacctcttccaccggcagggcttctcctatgactatgtgtttgactggaacatgctgaagtttggagccagcagagctgctgatgatgctgagcgggagcggcgggaccgggaggagcggctgcggcacagcaggaacccagccacccggggcctgcccagcacagccagcggccgcctgcggggcacccaggaggtggccccacccacccccctgacccccaccagccacacagccaacaccagccccaggcctgtgtctggcatggagcgggagaggaaggtgtccatgaggctgcacagaggagcccctgtgaacatcagcagcagtgacctgaccggccggcaggacaccagcaggatgagcaccagccagatccctggccgggtggccagcagcggcctgcagagcgtggtgcacaggtag

SEQ ID NO: 121984 - DNA, 1248 bp, Artificial Sequence
  derived and/or modified sequence
atggagctgcgggtgggcaaccggtaccggctgggccggaagatcgggagtgggtcttttggcgacatttacttagggacagacatagctgctggcgaagaagtggctattaaactggagtgcgttaagaccaaacacccacaactccatatagagagcaagatttataagatgatgcaggggggcgtcggcattcctaccattcgatggtgtggtgcagagggcgactataatgtgatggttatggaacttctcggcccatctctggaggatctgtttaatttctgctctcgcaagttctcactcaagactgtactccttttagccgatcaaatgattagccgcatcgagtacatacactcgaagaacttcatacaccgggatgtcaaaccagacaattttctgatgggattgggcaagaaaggcaatttagtgtacatcattgattttgggctggctaaaaagtatcgtgatgcaagaactcaccagcacattccctatagggagaacaagaaccttactggaaccgcccggtacgcttcgatcaacacccatctgggcatcgagcaaagtcggagagacgatctggagtccctgggatacgtgttaatgtacttcaaccttggctccctaccatggcagggcctcaaggctgccaccaaacgccaaaagtatgagcggataagtgagaagaaaatgtccacaccgatcgaggttctttgtaagggctaccccagtgaattcgcaacctacctaaatttctgtcggagcctgaggtttgacgataagccagattatagctacctccgccaactctttcgcaacttgttccacagacaaggcttctcttatgattacgtttttgactggaacatgctgaaatttggcgcctcgagagccgccgatgacgccgagagagagaggagggacagggaggagcgtctccgccatagcagaaatccagccacacggggactgccttccaccgcaagtggccgcctccggggcacgcaagaggtggcgcctccaacccccttgacccctacctctcacaccgctaacacaagtccgcgtccagtcagcgggatggaacgcgaaaggaaggtgagtatgcgcctgcacagaggtgcacctgtaaatatcagttcaagcgatctcacaggcagacaggacacatcgaggatgtcgacgtcccagattccaggacgggtcgcctcctctggcctgcagtccgtggtgcaccggtag

SEQ ID NO: 121985 - DNA, 1077 bp, Artificial Sequence
  derived and/or modified sequence
atgatgcagggcggcgtgggcatccccaccatccggtggtgcggcgccgagggcgattataacgtcatggtgatggagcttctcggaccttccttggaagatttgttcaatttttgctctcgcaaattttctctgaagactgtgctcctgctggcagaccagatgatttctcgtatcgagtatatccatagcaaaaatttcatccatcgtgacgtgaagccagataactttttaatgggattgggaaagaagggtaacctggtgtacataattgatttcgggctcgctaagaagtaccgcgatgcccgcacacatcaacacatcccctatcgtgaaaataagaatctcaccgggacagctcgttatgcctcaatcaacacgcatctcggcatcgagcagtcacggcgggacgatctggagtcattgggctacgtgctgatgtattttaatctcggaagcctgccatggcagggtctgaaagcggccactaagcgccagaaatacgagagaatctccgagaaaaagatgtctacccctatcgaggtcttatgcaaggggtacccctcagaattcgccacctatctcaacttctgcagatcactcaggttcgatgataaaccagactacagctacctcaggcaattgttcaggaacctctttcataggcaaggcttctcctacgattacgtctttgattggaacatgctcaagtttggggcctccagggcagcagacgatgccgaacgggaaagacgcgatcgagaagagaggttgcgccattcgcgcaatcctgccacaaggggccttcccagcacagccagtggtcgcctgagaggaactcaggaggtggccccgcccacaccccttacccctacatctcataccgcaaatacttctcccaggcccgtgagcggcatggaaagggagcggaaggtgtctatgagactccacagaggagctccagtgaacatctctagttctgatcttacaggaaggcaggacacctcccggatgagtacgtcacagatccccggcagagtggcatcaagcggcctgcagtccgtggttcaccgatag

SEQ ID NO: 121986 - DNA, 1248 bp, Artificial Sequence
  derived and/or modified sequence
atggaactcagagtcggcaatagatatcgactgggcagaaagatcggatctggcagcttcggagatatttatctcggcacggacatagccgctggcgaggaagtcgctatcaaactcgagtgcgtgaaaacgaagcatccccagctccatatcgaaagcaagatctataagatgatgcagggcggtgtcggcattccaaccattcgatggtgcggagccgaaggggattataatgtgatggttatggaactactgggccctagtttagaggatctgttcaacttctgttcgcggaagttctccctcaagactgtattgctcttggccgatcagatgatttccagaatcgagtatatccactctaaaaattttattcaccgggatgtcaagccggataatttcctgatgggcttgggcaagaagggcaatcttgtgtacatcatcgactttggtctggccaagaaatacagggacgctcgtacccatcagcatattccatatagagagaataaaaatttgaccggcaccgcgagatatgcctccattaatacacacttgggcattgagcagagcaggcgggatgatctcgagtcgctggggtatgtgttaatgtacttcaacttgggctcactgccctggcaagggttgaaggctgcaactaagcggcaaaagtacgagagaatcagtgagaaaaagatgtcaacacctattgaggtcctttgtaagggatatccctccgaatttgcaacgtacttgaacttctgtagatcattgcgttttgacgataagccagactacagctatctgagacagctatttcggaatttgtttcatcggcagggattcagctacgactacgtgttcgactggaacatgcttaagttcggcgcatcgagagctgccgatgacgctgaaagagagagaagggatcgcgaggaacggctccggcattcccgtaatccagccactagagggctgccttctacagcatcaggcaggctgagggggactcaagaggtggcccctcccactccgttaacacctacctcacataccgccaacaccagccctcggcctgtaagcggcatggagagagaacgaaaggtgtctatgcgcctgcacagaggcgctcccgtgaatataagtagtagcgatctgacaggaaggcaggatactagcagaatgtcaacctcccaaatccccggtagagtcgccagctccgggttacagtccgtagttcataggtag

SEQ ID NO: 121987 - DNA, 1077 bp, Artificial Sequence
  derived and/or modified sequence
atgatgcagggcggtgtcgggattcctactattcgatggtgcggtgccgaaggggactacaacgtgatggtgatggaactgctcggtccctccctcgaggaccttttcaacttttgctcaagaaaattttctctgaaaaccgtgctgttgctggccgatcagatgatcagccgcatcgaatatattcatagtaaaaacttcatccaccgggacgttaaacccgacaatttcctgatgggcctgggcaagaaggggaacttagtatacataatcgatttcggactcgctaagaagtaccgagatgctaggacccaccaacacattccttaccgggagaacaaaaatttgaccggtaccgctagatatgcttctatcaatacccatctaggtattgaacagagtcggcgagacgatctggaatccctgggctacgtgctgatgtactttaatcttggatctttgccatggcagggtcttaaagccgcaacgaaacgccaaaagtatgagagaatctctgagaaaaaaatgagtactcccattgaggtactctgcaaagggtaccccagcgagttcgcaacctacctgaacttttgtagaagtttacggtttgatgataagcctgactactcttacttgcgccagctttttcggaacctattccaccggcagggattcagctacgactacgttttcgactggaatatgctcaagtttggggcttcccgggctgctgatgacgctgagcgagagcgtcgcgatcgtgaagagcgtttacgccatagtagaaaccccgctacaaggggcctaccctccactgcaagcggcaggctccgaggcacacaggaagtagcgccaccaacccccttgacccccacgagccacaccgctaatacctctccacgcccagtctctggcatggaacgagaaaggaaagtgagcatgcgtttgcatcgcggagccccagtgaatatctcaagctccgatcttactgggaggcaagacacgtcaagaatgtcaacatcccagatccctggaagagttgcatcatctggactccaaagtgtggtgcaccggtag

SEQ ID NO: 121988 - DNA, 1975 bp, Artificial Sequence
  derived and/or modified sequence
gcgcgatggcggcggctcctttaggcagctgaaaggggatttaggcccggaagatccgagtccatccgcggcggggagagggcaagcgggaccggtaggggccggagcagcggcggcggcgctcggactgtcccatccgccccgtattgaggcgctgggagcggcggggcgacaggaaagcgatggtgaaagcggggccgtgaggggggcggagccgggagccggacccgcagtagcggcagcagcggcgccgcctcccagagttcagacccaggaagcggccgggagggcaggagcgaatcgggccgccgccgccatggagctgagagtcgggaacaggtaccggctgggccggaagatcggcagcggctccttcggagacatctatctcggtacggacattgctgcaggagaagaggttgccatcaagcttgaatgtgtcaaaaccaaacaccctcagctccacattgagagcaaaatctacaagatgatgcagggaggagtgggcatccccaccatcagatggtgcggggcagagggggactacaacgtcatggtgatggagctgctggggccaagcctggaggacctcttcaacttctgctccaggaaattcagcctcaaaaccgtcctgctgcttgctgaccaaatgatcagtcgcatcgaatacattcattcaaagaacttcatccaccgggatgtgaagccagacaacttcctcatgggcctggggaagaagggcaacctggtgtacatcatcgacttcgggctggccaagaagtaccgggatgcacgcacccaccagcacatcccctatcgtgagaacaagaacctcacggggacggcgcggtacgcctccatcaacacgcaccttggaattgaacaatcccgaagagatgacttggagtctctgggctacgtgctaatgtacttcaacctgggctctctcccctggcaggggctgaaggctgccaccaagagacagaaatacgaaaggattagcgagaagaaaatgtccacccccatcgaagtgttgtgtaaaggctacccttccgaatttgccacatacctgaatttctgccgttccttgcgttttgacgacaagcctgactactcgtacctgcggcagcttttccggaatctgttccatcgccagggcttctcctatgactacgtgttcgactggaacatgctcaaatttggtgccagccgggccgccgatgacgccgagcgggagcgcagggaccgagaggagcggctgagacactcgcggaacccggctacccgcggcctcccttccacagcctccggccgcctgcgggggacgcaggaagtggctccccccacacccctcacccctacctcacacacggctaacacctccccccggcccgtctccggcatggagagagagcggaaagtgagtatgcggctgcaccgcggggcccccgtcaacatctcctcgtccgacctcacaggccgacaagatacctctcgcatgtccacctcacagattcctggtcgggtggcttccagtggtcttcagtctgtcgtgcaccgatgagaactctccttattgctgtgaagggcagacaatgcatggctgatctactctgttaccaatggctttactagtgacacgtcccccggtctaggatcgaaatgttaacaccgggagctctccaggccactcacccagcgacgctcgtgggggaaacatactaaacggacagactccaagagctgccaccgctggggctgcactgcggccccccacgtgaactcggttgtaacggggctgggaagaaaagcagagagagaattgcagagaatcagactccttttccagggcctcagctccctccagtggtggccgccctgtactccctgacgattccactgtaactaccaatcttctacttggttaagacagttttgtatcattttgctaaaaattattggcttaaatctgtgt

SEQ ID NO: 121989 - DNA, 1492 bp, Artificial Sequence
  derived and/or modified sequence
acagcgcgatggcggcggctcctttaggcagctgaaaggggatttaggcccggaagatccgagtccatccgcggcggggagagtcgggaacaggtaccggctgggccggaagatcggcagcggctccttcggagacatctatctcggtacggacattgctgcaggagaagaggttgccatcaagcttgaatgtgtcaaaaccaaacaccctcagctccacattgagagcaaaatctacaagatgatgcagggaggagtgggcatccccaccatcagatggtgcggggcagagggggactacaacgtcatggtgatggagctgctggggccaagcctggaggacctcttcaacttctgctccaggaaattcagcctcaaaaccgtcctgctgcttgctgaccaaatgatcagtcgcatcgaatacattcattcaaagaacttcatccaccgggatgtgaagccagacaacttcctcatgggcctggggaagaagggcaacctggtgtacatcatcgacttcgggctggccaagaagtaccgggatgcacgcacccaccagcacatcccctatcgtgagaacaagaacctcacggggacggcgcggtacgcctccatcaacacgcaccttggaattgaacaatcccgaagagatgacttggagtctctgggctacgtgctaatgtacttcaacctgggctctctcccctggcaggggctgaaggctgccaccaagagacagaaatacgaaaggattagcgagaagaaaatgtccacccccatcgaagtgttgtgtaaaggctacccttccgaatttgccacatacctgaatttctgccgttccttgcgttttgacgacaagcctgactactcgtacctgcggcagcttttccggaatctgttccatcgccagggcttctcctatgactacgtgttcgactggaacatgctcaaatttggtgccagccgggccgccgatgacgccgagcgggagcgcagggaccgagaggagcggctgagacactcgcggaacccggctacccgcggcctcccttccacagcctccggccgcctgcgggggacgcaggaagtggctccccccacacccctcacccctacctcacacacggctaacacctccccccggcccgtctccggcatggagagagagcggaaagtgagtatgcggctgcaccgcggggcccccgtcaacatctcctcgtccgacctcacaggccgacaagatacctctcgcatgtccacctcacagattcctggtcgggtggcttccagtggtcttcagtctgtcgtgcaccgatgagaactctccttattgctgtgaagggcagacaatgcatggctgatctactctgttaccaatggctttactagtgacacgtcccccggtctaggatcgaaatgttaacaccgggagctctccaggccactcacccagcgacgctcgtgggggaaacatactaaacggacagactcc

SEQ ID NO: 121990 - DNA, 1248 bp, Artificial Sequence
  derived and/or modified sequence
atggagctgagagtgggcaacagatacagactgggcagaaagatcggcagcggcagcttcggcgacatctacctgggcaccgacatcgccgccggcgaggaggtggccatcaagctggagtgcgtgaagaccaagcacccccagctgcacatcgagagcaagatctacaagatgatgcagggcggcgtgggcatccccaccatcagatggtgcggcgccgagggcgactacaacgtgatggtgatggagctgctgggccccagcctggaggacctgttcaacttctgcagcagaaagttcagcctgaagaccgtgctgctgctggccgaccagatgatcagcagaatcgagtacatccacagcaagaacttcatccacagagacgtgaagcccgacaacttcctgatgggcctgggcaagaagggcaacctggtgtacatcatcgacttcggcctggccaagaagtacagagacgccagaacccaccagcacatcccctacagagagaacaagaacctgaccggcaccgccagatacgccagcatcaacacccacctgggcatcgagcagagcagaagagacgacctggagagcctgggctacgtgctgatgtacttcaacctgggcagcctgccctggcagggcctgaaggccgccaccaagagacagaagtacgagagaatcagcgagaagaagatgagcacccccatcgaggtgctgtgcaagggctaccccagcgagttcgccacctacctgaacttctgcagaagcctgagattcgacgacaagcccgactacagctacctgagacagctgttcagaaacctgttccacagacagggcttcagctacgactacgtgttcgactggaacatgctgaagttcggcgccagcagagccgccgacgacgccgagagagagagaagagacagagaggagagactgagacacagcagaaaccccgccaccagaggcctgcccagcaccgccagcggcagactgagaggcacccaggaggtggccccccccacccccctgacccccaccagccacaccgccaacaccagccccagacccgtgagcggcatggagagagagagaaaggtgagcatgagactgcacagaggcgcccccgtgaacatcagcagcagcgacctgaccggcagacaggacaccagcagaatgagcaccagccagatccccggcagagtggccagcagcggcctgcagagcgtggtgcacagatag

SEQ ID NO: 121991 - DNA, 1077 bp, Artificial Sequence
  derived and/or modified sequence
atgatgcagggcggcgtgggcatccccaccatcagatggtgcggcgccgagggcgactacaacgtgatggtgatggagctgctgggccccagcctggaggacctgttcaacttctgcagcagaaagttcagcctgaagaccgtgctgctgctggccgaccagatgatcagcagaatcgagtacatccacagcaagaacttcatccacagagacgtgaagcccgacaacttcctgatgggcctgggcaagaagggcaacctggtgtacatcatcgacttcggcctggccaagaagtacagagacgccagaacccaccagcacatcccctacagagagaacaagaacctgaccggcaccgccagatacgccagcatcaacacccacctgggcatcgagcagagcagaagagacgacctggagagcctgggctacgtgctgatgtacttcaacctgggcagcctgccctggcagggcctgaaggccgccaccaagagacagaagtacgagagaatcagcgagaagaagatgagcacccccatcgaggtgctgtgcaagggctaccccagcgagttcgccacctacctgaacttctgcagaagcctgagattcgacgacaagcccgactacagctacctgagacagctgttcagaaacctgttccacagacagggcttcagctacgactacgtgttcgactggaacatgctgaagttcggcgccagcagagccgccgacgacgccgagagagagagaagagacagagaggagagactgagacacagcagaaaccccgccaccagaggcctgcccagcaccgccagcggcagactgagaggcacccaggaggtggccccccccacccccctgacccccaccagccacaccgccaacaccagccccagacccgtgagcggcatggagagagagagaaaggtgagcatgagactgcacagaggcgcccccgtgaacatcagcagcagcgacctgaccggcagacaggacaccagcagaatgagcaccagccagatccccggcagagtggccagcagcggcctgcagagcgtggtgcacagatag

SEQ ID NO: 121992 - protein, 350 aa, Artificial Sequence
  derived and/or modified sequence
MPGPAAGSRARVYAEVNSLRSREYWDYEAHVPSWGNQDDYQLVRKLGRGKYSEVFEAINITNNERVVVKILKPVKKKKIKREVKILENLRGGTNIIKLIDTVKDPVSKTPALVFEYINNTDFKQLYQILTDFDIRFYMYELLKALDYCHSKGIMHRDVKPHNVMIDHQQKKLRLIDWGLAEFYHPAQEYNVRVASRYFKGPELLVDYQMYDYSLDMWSLGCMLASMIFRREPFFHGQDNYDQLVRIAKVLGTEELYGYLKKYHIDLDPHFNDILGQHSRKRWENFIHSENRHLVSPEALDLLDKLLRYDHQQRLTAKEAMEHPYFYPVVKEQSQPCADNAVLSSGLTAAR

SEQ ID NO: 121993 - DNA, 1053 bp, Artificial Sequence
  derived and/or modified sequence
atgcctggtcctgcagcgggatcacgggcccgtgtgtacgctgaggtaaactccctcaggagtcgagagtattgggactacgaggctcacgtcccatcctggggaaaccaggatgattatcaactggttagaaaactgggccgcggcaagtacagtgaagtgtttgaagccattaacataaccaacaacgaaagagtggtggtgaaaatcctgaaaccggtaaagaaaaaaaagataaagcgggaagtgaagatccttgagaacctgaggggaggcactaatatcatcaagcttattgatacagtcaaggaccctgtgtcaaagacgcctgctctggtattcgagtacataaacaataccgactttaagcagctgtaccagatcctcactgacttcgatattcggttctatatgtatgagttgttgaaggcactcgactactgtcacagtaaaggcatcatgcaccgagatgttaagccacataatgtcatgatcgaccatcagcaaaagaagctacggctgatcgactgggggttggcagagttctaccaccccgcccaagagtacaatgttagagtggcgagccgttattttaaaggccctgagctactcgtagactaccagatgtacgactactcattagacatgtggtcactcggctgtatgcttgcctctatgatctttagaagggaaccattcttccacggtcaggataattatgatcagctggtgagaatagcaaaggtgctggggaccgaagagctctatggctacctgaagaagtatcacattgatctagatccccactttaacgacatcctaggacagcactctcgcaaaaggtgggagaatttcatccattctgaaaatcgacatttggtgtcgcccgaagccttagacctattagacaagctgctgcgctacgatcaccagcagagattgaccgcgaaagaggccatggaacacccatatttctacccggtggtgaaggagcaaagtcagccatgcgctgacaatgcagtgctgagttcaggtctcaccgccgctagatag

SEQ ID NO: 121994 - DNA, 1053 bp, Artificial Sequence
  derived and/or modified sequence
atgcctggccctgctgctggcagccgggcccgggtgtatgcagaggtgaacagcctgcggagccgggagtactgggactatgaggcccacgtgcccagctggggcaaccaggatgactaccagctggtgaggaagctgggccggggcaagtacagcgaggtgtttgaggccatcaacatcaccaacaatgaaagagtggtggtgaagatcctgaagcctgtgaagaagaagaagatcaagcgggaggtgaagatcctggagaacctgcggggcggcaccaacatcatcaagctgattgacacagtgaaggaccctgtgtccaagaccccagccctggtgtttgagtacatcaacaacacagacttcaagcagctgtaccagatcctgacagactttgacatccgcttctacatgtatgagctgctgaaggccctggactactgccacagcaagggcatcatgcacagagatgtgaagccccacaacgtgatgattgaccaccagcagaagaagctgcggctgattgactggggcctggccgagttctaccacccagcccaggagtacaacgtgcgggtggccagccgctacttcaagggccctgagctgctggtggactaccagatgtatgactacagcctggacatgtggagcctgggctgcatgctggcctccatgatcttcagaagagagcccttcttccacggccaggacaactatgaccagctggtgcgcatcgccaaggtgctgggcacagaggagctgtatggctacctgaagaagtaccacatcgacctggacccccacttcaatgacatcctgggccagcacagcaggaagcgctgggagaacttcatccacagtgaaaatagacacctggtgtccccagaggccctggacctgctggacaagctgctgcgctatgaccaccagcagaggctgacagccaaggaggccatggagcacccctacttctaccctgtggtgaaggagcagagccagccctgtgccgacaatgctgtgctgagcagcggcctgacagctgccaggtag

SEQ ID NO: 121995 - DNA, 1053 bp, Artificial Sequence
  derived and/or modified sequence
atgcccggccccgccgccggcagccgggcccgggtgtacgccgaggtgaactctctgcgctctcgcgaatactgggactacgaggcccacgtacctagttggggcaaccaggacgattaccagctggttaggaaactgggcagaggaaaatactctgaggtgttcgaggctatcaacattactaataacgaacgggtggtagtgaaaatcttgaagcctgtgaagaaaaagaagattaagagagaagtgaaaattcttgaaaacctacggggcggcacgaatataataaagctgattgatacggtaaaagaccctgtgtccaaaacaccggctctagttttcgaatatatcaataacaccgatttcaaacagctctaccagatactgacagattttgatataaggttctacatgtatgagttacttaaagcgctagattactgccattccaaggggatcatgcaccgggacgtcaaaccccataacgttatgatcgatcatcagcagaagaaactaaggctcatagactgggggctggcggagttctaccacccggctcaggagtataacgtgagggtggcttctcgctattttaaggggcctgagcttctcgtcgattaccaaatgtatgattattccctagatatgtggtccttggggtgcatgctagcctcgatgatctttcgccgggaacctttctttcatgggcaagacaactatgatcagctggttcggatagcaaaagtgctggggaccgaagagttatatgggtatctcaaaaagtaccatatcgatttggatccccatttcaacgacatattaggtcaacattcccgaaagaggtgggaaaacttcatccattcagaaaataggcatctcgtcagccctgaagcactcgatctgctggataaattgctcaggtacgatcatcaacagcgacttacggcaaaggaggccatggaacatccttacttttatcctgtggtcaaggagcagagccagccctgcgccgacaacgctgttctgtcttctggattaaccgcagcccgctag

SEQ ID NO: 121996 - DNA, 1053 bp, Artificial Sequence
  derived and/or modified sequence
atgcctggcccagcagcaggtagtagggcacgggtgtatgcggaggtaaatagcctgcgttcgcgagaatattgggactatgaagcacacgtcccatcctgggggaaccaggatgattaccagctggtccgcaaactgggaagggggaaatatagtgaggtgttcgaagcgataaatattaccaacaacgagcgggtcgtggtgaagatcctcaagccagtgaagaaaaagaaaatcaaaagagaggttaagattctggaaaacctcaggggtggaaccaatattataaagttgattgacacggttaaagaccccgtatctaagacacccgcactggtgttcgaatacatcaacaacactgacttcaagcagctgtaccagatcctgaccgacttcgacatacgtttttacatgtacgaactgctgaaagcactggactactgccatagcaagggcattatgcacagggacgtgaagcctcacaatgtgatgattgaccaccagcagaagaaactcaggctaatcgattggggcctggccgagttttatcacccagcccaggaatacaacgtgcgggtggcctcccggtattttaaaggcccagaactgcttgtcgattaccagatgtacgactactcattagatatgtggtcgctggggtgtatgctcgccagcatgattttccggagagaacccttctttcatggacaagacaactatgaccagctggtgagaattgccaaggtcttagggacagaggagctctatgggtacttgaaaaaatatcacatagatctggacccgcattttaatgacattctggggcaacacagtaggaagcgatgggagaactttatccactctgagaaccggcacctcgtgtctcctgaagcccttgatcttctggataaactcttaaggtatgaccaccagcaacggctaacggccaaggaggccatggagcatccatacttctaccctgtggtgaaggagcaaagccagccatgcgccgataatgccgtactgagttccggacttaccgctgcgaggtag

SEQ ID NO: 121997 - DNA, 1659 bp, Artificial Sequence
  derived and/or modified sequence
gcggccgcccgccgccgcgctcctcctcctcctcctccagcgcccggcggcccgctgcctcctccgcccgacgccccgcgtcccccgccgcgccgccgccgccaccctctgcgccccgcgccgccccccggtcccgcccgccatgcccggcccggccgcgggcagcagggcccgggtctacgccgaggtgaacagtctgaggagccgcgagtactgggactacgaggctcacgtcccgagctggggtaatcaagatgattaccaactggttcgaaaacttggtcggggaaaatatagtgaagtatttgaggccattaatatcaccaacaatgagagagtggttgtaaaaatcctgaagccagtgaagaaaaagaagataaaacgagaggttaagattctggagaaccttcgtggtggaacaaatatcattaagctgattgacactgtaaaggaccccgtgtcaaagacaccagctttggtatttgaatatatcaataatacagattttaagcaactctaccagatcctgacagactttgatatccggttttatatgtatgaactacttaaagctctggattactgccacagcaagggaatcatgcacagggatgtgaaacctcacaatgtcatgatagatcaccaacagaaaaagctgcgactgatagattggggtctggcagaattctatcatcctgctcaggagtacaatgttcgtgtagcctcaaggtacttcaagggaccagagctcctcgtggactatcagatgtatgattatagcttggacatgtggagtttgggctgtatgttagcaagcatgatctttcgaagggaaccattcttccatggacaggacaactatgaccagcttgttcgcattgccaaggttctgggtacagaagaactgtatgggtatctgaagaagtatcacatagacctagatccacacttcaacgatatcctgggacaacattcacggaaacgctgggaaaactttatccatagtgagaacagacaccttgtcagccctgaggccctagatcttctggacaaacttctgcgatacgaccatcaacagagactgactgccaaagaggccatggagcacccatacttctaccctgtggtgaaggagcagtcccagccttgtgcagacaatgctgtgctttccagtggtctcacggcagcacgatgaagactggaaagcgacgggtctgttgcggttctcccacttttccataagcagaacaagaaccaaatcaaacgtcttaacgcgtatagagagatcacgttccgtgagcagacacaaaacggtggcaggtttggcgagcacgaactagaccaagcgaagggcagcccaccaccgtatatcaaacctcacttccgaatgtaaaaggctcacttgcctttggcttcctgttgacttcttcccgacccagaaagcatggggaatgtgaagggtatgcagaatgttgttggttactgttgctccccgagcccctcgactcgtcccgtggccgcctgtttttccagcaaaccacgctaactagctgaccacagactccacagtggggggacgggcgcagtatgtggcatggcggcagttacatattattattttaaaagtatatattattgaataaaaggttttaaaagaaa

SEQ ID NO: 121998 - DNA, 1053 bp, Artificial Sequence
  derived and/or modified sequence
atgcccggccccgccgccggcagcagagccagagtgtacgccgaggtgaacagcctgagaagcagagagtactgggactacgaggcccacgtgcccagctggggcaaccaggacgactaccagctggtgagaaagctgggcagaggcaagtacagcgaggtgttcgaggccatcaacatcaccaacaacgagagagtggtggtgaagatcctgaagcccgtgaagaagaagaagatcaagagagaggtgaagatcctggagaacctgagaggcggcaccaacatcatcaagctgatcgacaccgtgaaggaccccgtgagcaagacccccgccctggtgttcgagtacatcaacaacaccgacttcaagcagctgtaccagatcctgaccgacttcgacatcagattctacatgtacgagctgctgaaggccctggactactgccacagcaagggcatcatgcacagagacgtgaagccccacaacgtgatgatcgaccaccagcagaagaagctgagactgatcgactggggcctggccgagttctaccaccccgcccaggagtacaacgtgagagtggccagcagatacttcaagggccccgagctgctggtggactaccagatgtacgactacagcctggacatgtggagcctgggctgcatgctggccagcatgatcttcagaagagagcccttcttccacggccaggacaactacgaccagctggtgagaatcgccaaggtgctgggcaccgaggagctgtacggctacctgaagaagtaccacatcgacctggacccccacttcaacgacatcctgggccagcacagcagaaagagatgggagaacttcatccacagcgagaacagacacctggtgagccccgaggccctggacctgctggacaagctgctgagatacgaccaccagcagagactgaccgccaaggaggccatggagcacccctacttctaccccgtggtgaaggagcagagccagccctgcgccgacaacgccgtgctgagcagcggcctgaccgccgccagatag

SEQ ID NO: 121999 - protein, 2322 aa, Artificial Sequence
  derived and/or modified sequence
MQSGPRPPLPAPGLALALTLTMLARLASAASFFGENHLEVPVATALTDIDLQLQFSTSQPEALLLLAAGPADHLLLQLYSGRLQVRLVLGQEELRLQTPAETLLSDSIPHTVVLTVVEGWATLSVDGFLNASSAVPGAPLEVPYGLFVGGTGTLGLPYLRGTSRPLRGCLHAATLNGRSLLRPLTPDVHEGCAEEFSASDDVALGFSGPHSLAAFPAWGTQDEGTLEFTLTTQSRQAPLAFQAGGRRGDFIYVDIFEGHLRAVVEKGQGTVLLHNSVPVADGQPHEVSVHINAHRLEISVDQYPTHTSNRGVLSYLEPRGSLLLGGLDAEASRHLQEHRLGLTPEATNASLLGCMEDLSVNGQRRGLREALLTRNMAAGCRLEEEEYEDDAYGHYEAFSTLAPEAWPAMELPEPCVPEPGLPPVFANFTQLLTISPLVVAEGGTAWLEWRHVQPTLDLMEAELRKSQVLFSVTRGARHGELELDIPGAQARKMFTLLDVVNRKARFIHDGSEDTSDQLVLEVSVTARVPMPSCLRRGQTYLLPIQVNPVNDPPHIIFPHGSLMVILEHTQKPLGPEVFQAYDPDSACEGLTFQVLGTSSGLPVERRDQPGEPATEFSCRELEAGSLVYVHRGGPAQDLTFRVSDGLQASPPATLKVVAIRPAIQIHRSTGLRLAQGSAMPILPANLSVETNAVGQDVSVLFRVTGALQFGELQKQGAGGVEGAEWWATQAFHQRDVEQGRVRYLSTDPQHHAYDTVENLALEVQVGQEILSNLSFPVTIQRATVWMLRLEPLHTQNTQQETLTTAHLEATLEEAGPSPPTFHYEVVQAPRKGNLQLQGTRLSDGQGFTQDDIQAGRVTYGATARASEAVEDTFRFRVTAPPYFSPLYTFPIHIGGDPDAPVLTNVLLVVPEGGEGVLSADHLFVKSLNSASYLYEVMERPRHGRLAWRGTQDKTTMVTSFTNEDLLRGRLVYQHDDSETTEDDIPFVATRQGESSGDMAWEEVRGVFRVAIQPVNDHAPVQTISRIFHVARGGRRLLTTDDVAFSDADSGFADAQLVLTRKDLLFGSIVAVDEPTRPIYRFTQEDLRKRRVLFVHSGADRGWIQLQVSDGQHQATALLEVQASEPYLRVANGSSLVVPQGGQGTIDTAVLHLDTNLDIRSGDEVHYHVTAGPRWGQLVRAGQPATAFSQQDLLDGAVLYSHNGSLSPRDTMAFSVEAGPVHTDATLQVTIALEGPLAPLKLVRHKKIYVFQGEAAEIRRDQLEAAQEAVPPADIVFSVKSPPSAGYLVMVSRGALADEPPSLDPVQSFSQEAVDTGRVLYLHSRPEAWSDAFSLDVASGLGAPLEGVLVELEVLPAAIPLEAQNFSVPEGGSLTLAPPLLRVSGPYFPTLLGLSLQVLEPPQHGALQKEDGPQARTLSAFSWRMVEEQLIRYVHDGSETLTDSFVLMANASEMDRQSHPVAFTVTVLPVNDQPPILTTNTGLQMWEGATAPIPAEALRSTDGDSGSEDLVYTIEQPSNGRVVLRGAPGTEVRSFTQAQLDGGLVLFSHRGTLDGGFRFRLSDGEHTSPGHFFRVTAQKQVLLSLKGSQTLTVCPGSVQPLSSQTLRASSSAGTDPQLLLYRVVRGPQLGRLFHAQQDSTGEALVNFTQAEVYAGNILYEHEMPPEPFWEAHDTLELQLSSPPARDVAATLAVAVSFEAACPQRPSHLWKNKGLWVPEGQRARITVAALDASNLLASVPSPQRSEHDVLFQVTQFPSRGQLLVSEEPLHAGQPHFLQSQLAAGQLVYAHGGGGTQQDGFHFRAHLQGPAGASVAGPQTSEAFAITVRDVNERPPQPQASVPLRLTRGSRAPISRAQLSVVDPDSAPGEIEYEVQRAPHNGFLSLVGGGLGPVTRFTQADVDSGRLAFVANGSSVAGIFQLSMSDGASPPLPMSLAVDILPSAIEVQLRAPLEVPQALGRSSLSQQQLRVVSDREEPEAAYRLIQGPQYGHLLVGGRPTSAFSQFQIDQGEVVFAFTNFSSSHDHFRVLALARGVNASAVVNVTVRALLHVWAGGPWPQGATLRLDPTVLDAGELANRTGSVPRFRLLEGPRHGRVVRVPRARTEPGGSQLVEQFTQQDLEDGRLGLEVGRPEGRAPGPAGDSLTLELWAQGVPPAVASLDFATEPYNAARPYSVALLSVPEAARTEAGKPESSTPTGEPGPMASSPEPAVAKGGFLSFLEANMFSVIIPMCLVLLLLALILPLLFYLRKRNKTGKHDVQVLTAKPRNGLAGDTETFRKVEPGQAIPLTAVPGQGPPPGGQPDPELLQFCRTPNPALKNGQYWV

SEQ ID NO: 122000 - protein, 327 aa, Artificial Sequence
  derived and/or modified sequence
EQHREEPEAAYRLIQGPQYGHLLVGGRPTSAFSQFQIDQGEVVFAFTNFSSSHDHFRVLALARGVNASAVVNVTVRALLHVWAGGPWPQGATLRLDPTVLDAGELANRTGSVPRFRLLEGPRHGRVVRVPRARTEPGGSQLVEQFTQQDLEDGRLGLEVGRPEGRAPGPAGDSLTLELWAQGVPPAVASLDFATEPYNAARPYSVALLSVPEAARTEAGKPESSTPTGEPGPMASSPEPAVAKGGFLSFLEANMFSVIIPMCLVLLLLALILPLLFYLRKRNKTGKHDVQVLTAKPRNGLAGDTETFRKVEPGQAIPLTAVPGQGPP

SEQ ID NO: 122001 - DNA, 6969 bp, Artificial Sequence
  derived and/or modified sequence
atgcaatctggacctcgcccacccttgccagctcccggcttggccttggccctcacattgaccatgctggcccgcctagcgtcagcagcaagcttcttcggagagaaccacctggaagtgcctgttgccactgccttgaccgacattgacttgcagctgcaattctctacctcccagccagaggctctcctcctcctggcagctggccctgccgaccatttactactgcagctgtattctggaagactccaagtgagacttgtgcttgggcaggaagaactgcgcctgcagaccccagccgagacactgctgtccgattcaattccccacacagtcgtgttaacagtcgtggagggctgggccacactcagcgtcgatggatttctaaatgcctcatccgccgtcccaggggctccgctcgaagtaccttatggtctgttcgttggcggcaccggcactttagggctcccttatctcagaggcaccagtcgccccctgcgcggttgcctgcatgccgcaaccctcaacggccggtcactgctgaggcctttgacccctgacgtgcacgaaggatgtgcggaggagttctcagcaagcgacgacgtggctctgggtttcagcgggccccacagccttgctgctttccccgcctggggcacacaggacgagggaaccctagaatttacactgacgacccagtcaaggcaggctcctctcgcgttccaagccggcgggagacgtggagatttcatatacgtggatattttcgaaggccatctcagggccgtcgtcgaaaagggccaagggaccgtgctgctgcacaatagcgtacccgtggccgacggtcagccacacgaagtttctgtgcacatcaacgctcacaggctggaaattagcgtggatcagtacccaacccacacctcgaatcgaggcgtgctgtcttaccttgagccacgaggctctttgcttcttggtgggctcgacgccgaggcatccagacacttgcaagagcatagacttgggctgactcctgaggccacaaacgcttccttgctgggatgcatggaggacctctcagtgaacggccagcggagggggctgcgtgaggctctcttaactcgcaacatggcggccggctgcaggctcgaggaggaggaatacgaagatgacgcatacgggcactacgaggcattctctaccctcgctcctgaagcttggccagcgatggagctgcccgagccttgcgtgcctgagccaggtctacctccagtgtttgcaaatttcacacagctgttgactataagcccactggtggttgccgagggcggaaccgcatggttagaatggcgccatgtgcaaccaacactcgatctcatggaagccgaactgcgcaagtctcaagtacttttctccgtgactaggggtgctcgtcacggagaattagagctggacatcccgggcgcacaggcccggaagatgtttacccttctcgacgtagtgaaccgcaaagcgcggtttatacatgatggcagtgaagatacttctgatcagctggtgctagaagtgtcagtcaccgcccgcgttcctatgccgtcttgtctccgaagaggtcagacctatctattgcctatacaggtcaatccagtgaacgacccgcctcacatcatctttccacatggatcccttatggtgatattagagcatacccagaaacctctgggccccgaggtattccaggcgtatgaccccgactcagcctgcgaaggattaaccttccaggtgctgggcacttcttctgggctccccgtagagaggagggaccagcccggagagcctgcaacagagtttagctgtagagaacttgaggctgggtctttagtatacgtacaccgtgggggccctgcccaggatcttactttcagggtgtccgacggattacaggcatctccaccagcgacgttgaaggtagtggctattagacccgctatccagattcaccgatccaccggcctgcggcttgctcaggggagcgccatgccaattctcccggctaacctgtctgtggagacaaatgcagtgggtcaggatgtgagtgtgttgtttcgcgtgaccggtgcactgcagtttggggaactccagaaacagggggcgggaggagtggagggcgccgagtggtgggcgacgcaagcatttcaccaacgcgatgtagaacaggggcgagtgcgctacttgtcaactgaccctcagcaccacgcatatgacacggtggagaacctggccttagaagttcaagttggtcaagagatcctaagtaatttatcttttcccgtgacaatccaaagggccacagtgtggatgctgaggcttgagcctttgcatactcagaacacgcagcaggagacactgactacagctcacctcgaagctacactagaagaggcagggcccagccctcccaccttccactatgaagtcgttcaagcacccaggaagggaaatctgcagctgcagggtaccaggcttagcgacggccagggcttcacacaggatgacatacaggctggacgagtgacatatggggccactgcccgcgctagcgaagccgtggaggacacctttcgctttagagtgacggcccccccgtattttagtcccctctatacattccccattcacatcggtggagaccccgacgcacccgtgcttacaaacgtcttactcgtggtccccgagggcggcgagggggtcctgagtgctgaccaccttttcgtaaagtctcttaatagcgcaagctacttgtacgaggtgatggagcgccctcggcacggtcgactcgcctggcgtggcacacaggacaaaacgactatggtgacgagtttcaccaacgaagaccttctcagggggcggttggtgtaccaacacgacgattccgagactacagaagatgatattccatttgtagctaccagacaaggcgaatcatctggcgacatggcctgggaggaggttcgcggggtttttagggttgccatccagcctgtgaatgaccacgccccagtgcagaccatctctaggatttttcacgtggcaagaggcggccgtcgccttctcacaacagatgatgtagcattcagcgatgctgacagcggcttcgccgacgcccagcttgtactgacaagaaaggacctgttgttcggatctatcgtggcagtggacgaacctacccgaccaatatacaggttcacacaggaggacctaagaaagcgtcgggttcttttcgtgcatagtggagctgatcgtggctggattcaattacaagtctcagatgggcaacaccaggccactgctctgctcgaggtacaggcttccgagccttacctaagggtagcaaacggctcttcattggtggtgccacagggaggacagggtactatcgacaccgcggtgttacacctcgatacgaacttagacatcagatctggtgacgaggtgcactaccacgttacggccgggcctcgctggggccaactggtgcgggccggacagcccgcaactgcgttctcccagcaagaccttcttgatggggcagtcctctacagccacaatggttctctgtctcccagagataccatggctttctccgtagaagccggacccgttcacacagatgccaccctgcaagttacgatcgcattggagggccctctggcccccctgaagctggtccgccacaagaagatttacgtttttcagggtgaagcagctgagatacggcgggatcagctcgaggccgcccaagaagccgtaccgccagcagacattgttttctctgtgaaatcccctcccagcgctgggtatttggttatggtgagcaggggcgctctcgctgacgagccgccaagcctggaccccgtccagtctttcagtcaagaagctgtcgatacaggtcgagtactttatctgcacagtaggcctgaggcttggagcgacgctttcagcctagatgttgccagcggactgggggcccctttggagggcgtactcgtggagctggaggttctgcctgccgccatccccctggaagcccagaattttagcgttccagagggagggtcattgactttggctcccccactacttagggtgtccgggccgtatttcccaacactcctcggattaagcctgcaggtcttagagcctccacaacacggagccctgcagaaggaggacggcccacaggcgaggaccctttcagccttctcgtggcggatggtcgaggagcagttgatcagatacgtacacgacgggtccgagaccctgaccgacagcttcgtccttatggccaacgcctccgagatggacaggcaaagccatccagtggcatttaccgtcacagtcctgcctgtcaatgaccagccccccatactaacgaccaatacaggacttcagatgtgggagggagccactgcgccaatccccgccgaggcattgaggtcgaccgacggagacagcggcagcgaggatttagtttatacaattgagcaaccaagcaacggacgggtagtattaaggggggccccaggcaccgaggtcaggtctttcacgcaggcacagctggacggtgggcttgtgctgttttcccaccggggcactttggacggcgggtttcgcttccggctgtctgatggcgagcacaccagccctgggcacttctttagggtgaccgcacagaaacaggttttactttctttgaagggatcacagaccttgacagtgtgtcccgggtctgtccagcccttgtcctcccagacactgagagcaagttccagcgccggcacagaccctcagctcttgctttatagagttgtgcggggccctcaactggggcggctttttcacgcgcaacaggacagcactggtgaggctctggtgaactttacgcaggcggaggtctatgcgggcaatattctgtacgaacacgagatgcctcctgagcccttttgggaggcacacgacacactcgagctccagctctccagccctcctgcacgcgatgtggctgccaccttggcggtcgccgtctccttcgaggcggcttgccctcagcgcccgtcacatctgtggaaaaacaaaggcttatgggtgcccgagggccagagagcaagaattacagtggcggccctcgacgccagcaatctgctggccagtgtccccagccctcagagatccgaacacgatgtactgtttcaggtgacccagttcccatctcggggccagcttctggttagtgaggaaccgcttcatgccggccaaccacactttctccaaagtcagctggccgcgggccagctggtgtacgctcacggaggtggaggaacacagcaggacggctttcactttagagctcacctacaggggcctgccggtgcttccgttgcaggtccgcagaccagcgaggccttcgccattacagtgcgcgatgtgaacgagcggcccccccaaccacaggcttctgtgcccctgaggctcacacgcgggtctcgggccccaattagccgcgcgcaattatcagtcgttgatccagactccgcccccggcgaaattgagtatgaagtgcagcgggcccctcataacggcttcttgtccttagtggggggtggactgggacccgtgacccggttcacacaagctgacgttgacagcggccgactggctttcgtggcaaacggaagtagcgtggcaggcattttccagctgagcatgtccgacggcgcctcacctcctctgcctatgtcgcttgctgtggacatccttcctagcgctattgaagtccagcttcgtgcaccactggaggtcccacaagcccttggtagatccagcctctcccagcagcagctcagggtcgttagcgaccgcgaggagcctgaggccgcttatcggctgatccagggaccccagtatggtcacctgctggttggaggcaggcctaccagcgcattcagccagttccagatcgatcagggcgaagtggtctttgcctttactaacttctcgtcctctcacgatcatttccgggtactggctctggcacgcggcgttaatgcttcagctgtggtgaacgtgactgtgcgcgctctcctgcatgtctgggctggaggcccatggccccagggcgccactctgcgtctggaccccacagtactggacgccggagagttagccaatcgaacaggctcggtcccccgttttcgtcttctcgagggccccagacatgggcgtgtagtcagggttccacgagccagaacggagcccggtggatcccagctggtggagcagtttactcagcaggacctagaggacggccggttaggcttagaagtcggacggcccgaagggcgcgcgccgggccctgcgggggacagccttacactggagctgtgggcccagggagttcctccagccgtggccagcttggacttcgctaccgagccatacaatgccgcaagaccatatagtgtagcgcttctgagcgtacctgaagctgcacgtacggaggcagggaagcccgaaagttcaacaccaacgggggagccaggtccgatggcatccagtccagaaccagcagtcgctaaagggggattcctcagttttttggaagcgaacatgttctccgtgattattcctatgtgcctggttctgctccttctggctctgatactccctctcctgttctacctgcggaaacggaataaaactggaaaacacgacgtgcaagtgttgactgccaaaccccggaatggactggccggtgataccgaaacattccgcaaagtggagccaggtcaggccataccgctgactgccgtccctggccaggggcctcccccgggagggcagcctgacccagagcttttgcagttttgccgcacaccaaacccagccctcaaaaatggccagtactgggtttag

SEQ ID NO: 122002 - DNA, 984 bp, Artificial Sequence
  derived and/or modified sequence
gaacaacaccgggaagagcctgaggccgcttacaggttgatccaggggcctcagtatggccatctgctcgtcggtgggcgtcccacttccgcttttagccaatttcagattgaccagggggaggttgtgttcgccttcaccaattttagctcttctcatgaccatttccgtgttttggcgctggctcgaggggttaacgccagcgccgttgtgaacgttacagtgcgagctttattacacgtctgggcagggggcccctggccacaaggtgctaccctgcgcctggaccccaccgtcttagatgccggagagttagcaaatcgtacagggagtgtgccacgatttcgactgctggagggccccagacacggaagagtagtgagagttccccgggcacgaaccgagcctgggggatcccagcttgtggaacagtttactcaacaggatctggaagacggtagactggggctggaggtgggaagacctgaaggaagagcccctggtccagcgggcgattcccttaccctggaactgtgggctcagggcgtgcctcctgccgtggcatcactggatttcgccacagaaccttacaacgccgctcgaccctatagcgttgccctgctgagcgtgcccgaggcagctcgtacagaagctggaaaacctgagtccagcacccctacaggagaacctggtcctatggctagctcacccgagcctgcggtggccaagggcgggtttctaagtttcctcgaagctaacatgttctcggtaatcattcccatgtgtcttgtcctgttgctcctggccctcatcttgccacttttgttctacctgcggaaaagaaacaagaccggaaagcacgacgttcaggtcctgaccgctaaaccacgaaatggcctggccggagacacagagaccttcaggaaggtggagcccggacaagcaattccacttaccgccgtccccgggcagggcccaccttag

SEQ ID NO: 122003 - DNA, 6969 bp, Artificial Sequence
  derived and/or modified sequence
atgcagagcggccccaggcctcccctgcctgcccctggcctggccctggccctgaccctgaccatgctggcccggctggccagcgctgccagcttctttggagagaaccacctggaggtgcctgtggccacagccctgacagacatcgacctgcagctgcagttcagcaccagccagcctgaggccctgctgctgctggccgccggccctgctgaccacctgctgctgcagctgtacagcggccgcctgcaggtgcggctggtgctgggccaggaggagctgcggctgcagaccccagctgagaccctgctgagtgacagcatcccccacacagtggtgctgactgtggtggagggctgggccaccctgtctgtggatggcttcctgaatgccagcagcgctgtgcctggggcccccctggaggtgccctacggcctgtttgtgggcggcaccggcaccctgggcctgccctacctgcggggcaccagccggcccctgcggggctgcctgcacgccgccaccctgaatggccgcagcctgctgcggcccctgaccccagatgtgcatgagggctgtgccgaggagttcagcgccagtgatgatgtggccctgggcttcagcggcccccacagcctggccgccttccctgcctggggcacccaggatgagggcaccctggagttcaccctgaccacccagagccggcaggcccccctggccttccaggccggcggccggcggggggacttcatctacgtggacatctttgagggccacctgcgggctgtggtggagaagggccagggcaccgtgctgctgcacaacagcgtgcctgtggctgatggccagccccatgaggtgtctgtgcacatcaatgcccaccggctggagatctctgtggaccagtaccccacccacaccagcaacagaggagtgctgagctacctggagccccggggcagcctgctgctgggcggcctggatgctgaggccagccgccacctgcaggagcaccggctgggcctgaccccagaggccaccaatgccagcctgctgggctgcatggaggacctgtctgtgaatggccagaggcggggcctgcgggaggccctgctgaccaggaacatggccgccggctgccgcctggaggaggaggagtatgaagatgatgcctacggccactatgaggccttcagcaccctggcccctgaggcctggccagccatggagctgcctgagccctgtgtgcctgagcccggcctgccccctgtgtttgccaacttcacccagctgctgaccatcagccccctggtggtggccgagggcggcacagcctggctggagtggaggcatgtgcagcccaccctggacctgatggaggccgagctgaggaagagccaggtgctcttctctgtgaccaggggggcccggcacggggagctggagctggacatccctggggcccaggccaggaagatgttcaccctgctggatgtggtgaacaggaaggcccgcttcatccatgatggcagcgaggacaccagtgaccagctggtgctggaggtgtctgtgacagcccgggtgcccatgcccagctgcctgcggcggggccagacctacctgctgcccatccaggtgaaccctgtgaatgaccccccccacatcatcttcccccacggcagcctgatggtgatcctggagcacacccagaagcccctgggccctgaggtgttccaggcctatgaccctgattctgcctgtgagggcctgaccttccaggtgctgggcaccagcagcggcctgcctgtggagcggcgggaccagcctggagagcccgccacagagttcagctgccgggagctggaggccggcagcctggtgtatgtgcaccggggcggccctgcccaggacctgaccttccgggtgtctgatggcctgcaggccagccccccagccaccctgaaggtggtggccatccggcctgccatccagatccacaggagcacaggcctgcggctggcccagggcagcgccatgcccatcctgcctgccaacctgtctgtggagaccaatgctgtgggccaggatgtgtctgtgctcttccgggtgactggagccctgcagtttggagagctgcagaagcagggcgctgggggcgtggagggcgctgagtggtgggccacccaggccttccaccagagagatgtggagcagggccgggtgcgctacctgagcacagacccccagcaccacgcctatgacacagtggagaacctggccctggaggtgcaggtgggccaggagatcctgagcaacctgtccttccctgtgaccatccagagggccaccgtgtggatgctgcggctggagcccctgcacacccagaacacccagcaggagaccctgaccacagcccacctggaggccaccctggaggaggccggccccagcccccccaccttccactatgaggtggtgcaggcccccaggaaaggaaacctgcagctgcagggcacccggctgagtgatggccagggcttcacccaggatgacatccaggccggccgggtgacctatggagccacagcccgggccagcgaggccgtggaggacaccttccgcttccgggtgacagccccaccctacttcagccccctgtacaccttccccatccacatcggcggggaccctgatgcccctgtgctgaccaacgtgctgctggtggtgcctgagggcggggagggcgtgctgtctgctgaccacctgtttgtgaagagcctgaacagcgccagctacctgtatgaggtgatggagcggcccaggcatggccgcctggcctggaggggcacccaggacaagaccaccatggtgaccagcttcaccaatgaagacctgctgcggggccgcctggtgtaccagcatgatgattctgagaccacagaagatgacatcccctttgtggccacccggcagggcgagagcagcggggacatggcctgggaggaggtgcggggcgtcttccgggtggccatccagcctgtgaatgaccacgcccctgtgcagaccatcagccgcatcttccacgtggcccggggcggccggcggctgctgaccacagatgatgtggccttcagtgatgctgacagcggctttgctgatgcccagctggtgctgaccaggaaggacctgctgtttggcagcatcgtggccgtggatgagcccacccggcccatctaccgcttcacccaggaggacctgaggaagagaagagtgctgtttgtgcacagcggggctgaccggggctggatccagctgcaggtgtctgatggccagcaccaggccacagccctgctggaggtgcaggccagcgagccctacctgcgggtggccaacggcagcagcctggtggtgccccagggcggccagggcaccatcgacacagctgtgctgcacctggacaccaacctggacatccgctctggagatgaggtgcactaccacgtgacagctggcccccgctggggccagctggtgcgggccggccagcctgccacagccttcagccagcaggacctgctggatggagctgtgctgtacagccacaacggcagcctgagcccccgggacaccatggccttctctgtggaggccggccctgtgcacacagatgccaccctgcaggtgaccatcgccctggagggccccctggcccccctgaagctggtgcgccacaagaagatctacgtgttccagggcgaggccgctgagatccggcgggaccagctggaggccgcccaggaggccgtgcccccagctgacatcgtgttttctgtgaagagccccccatctgctggctacctggtgatggtgtccagaggagccctggctgatgagccccccagcctggaccctgtgcagagcttcagccaggaggccgtggacaccggccgggtgctgtacctgcacagcaggcctgaggcctggagcgatgccttcagcctggatgtggccagcggcctgggcgcccccctggagggcgtgctggtggagctggaggtgctgcctgctgccatccccctggaggcccagaacttctctgtgcctgagggcggcagcctgaccctggccccacccctgctgcgggtgtctggcccctacttccccaccctgctgggcctgagcctgcaggtgctggagcccccccagcacggggccctgcagaaggaggatggcccccaggcccggaccctgagcgccttctcctggaggatggtggaggagcagctgatccgctacgtgcatgatggcagcgagaccctgacagacagctttgtgctgatggccaatgccagcgagatggaccggcagagccaccctgtggccttcaccgtgacagtgctgcctgtgaatgaccagccccccatcctgaccaccaacacaggcctgcagatgtgggagggcgccacagcccccatcccagctgaggccctgcggagcacagatggagacagcggcagcgaggacctggtgtacaccatcgagcagcccagcaatggccgggtggtgctgcggggggcccctggaacagaggtgcgctccttcacccaggcccagctggatggcggcctggtgctcttcagccaccggggcaccctggatggcggcttccgcttccggctgagtgatggagagcacaccagccctggccacttcttccgggtgacagcccagaagcaggtgctgctgagcctgaagggcagccagaccctgactgtgtgccccggctctgtgcagcccctgagcagccagaccctgcgggccagcagcagcgctggaacagacccccagctgctgctgtacagagtggtgcggggcccccagctgggccgcctcttccacgcccagcaggacagcactggagaggccctggtgaacttcacccaggccgaggtgtatgccggcaacatcctgtatgagcacgagatgcctcctgagcccttctgggaggcccatgacaccctggagctgcagctgagcagccccccagccagagatgtggccgccaccctggccgtggccgtgtcctttgaggccgcctgcccccagaggcccagccacctgtggaagaacaagggcctgtgggtgcctgagggccagagggcccgcatcaccgtggccgccctggatgccagcaacctgctggcctctgtgcccagcccccagaggagtgaacatgatgtgctcttccaggtgacccagttccccagccggggccagctgctggtgtctgaggagcccctgcatgctggccagccccacttcctgcagagccagctggccgccggccagctggtgtatgcccacggcggcggcggcacccagcaggacggcttccacttccgggcccacctgcagggccctgctggggcctctgtggccggcccccagaccagcgaggcctttgccatcaccgtgagagatgtgaatgaaagaccaccccagccccaggcctctgtgcccctgcggctgacccggggcagccgggcccccatcagccgggcccagctgtctgtggtggaccctgattctgcccctggagaaattgaatatgaggtgcagagggccccccacaacggcttcctgagcctggtgggcggcggcctgggccctgtgacccgcttcacccaggctgatgtggacagcggccgcctggcctttgtggccaacggcagctctgtggccggcatcttccagctgtccatgtctgatggagccagcccccccctgcccatgagcctggccgtggacatcctgcccagcgccatcgaggtgcagctgcgggcccccctggaggtgccccaggccctgggccgcagcagcctgagccagcagcagctgcgggtggtgtctgaccgggaggagcctgaggccgcctaccgcctcatccagggcccccagtatggccacctgctggtgggcggccggcccaccagcgccttcagccagttccagattgaccagggcgaggtggtgtttgccttcaccaacttcagcagcagccatgaccacttccgggtgctggccctggcccggggcgtgaatgccagcgctgtggtgaatgtgacagtgcgggccctgctgcacgtgtgggccggcggcccctggccccagggcgccaccctgcggctggaccccaccgtgctggatgctggggagctggccaacagaactggatctgtgccccgcttccggctgctggagggccccaggcatggccgggtggtgcgggtgccccgggccaggacagagcccggcggcagccagctggtggagcagttcacccagcaggacctggaggatggccgcctgggcctggaggtgggccggcctgagggccgggcccctggccctgctggggacagcctgaccctggagctgtgggcccagggcgtgcccccagctgtggccagcctggactttgccacagagccctacaatgctgcccggccctacagcgtggccctgctgtctgtgcctgaggccgccaggacagaggccggcaagccagagagcagcacccccactggagagcccggccccatggccagcagccctgagcctgctgtggccaagggcggcttcctgtccttcctggaggccaacatgttcagcgtcatcatccccatgtgcctggtgctgctgctgctggccctgatcctgcccctgctcttctacctgaggaagaggaacaagacaggcaagcatgatgtgcaggtgctgacagccaagcccagaaatggcctggccggggacacagagaccttcaggaaggtggagcccggccaggccatccccctgacagctgtgcccggccagggccccccacctgggggccagcctgaccctgagctgctgcagttctgcaggacccccaacccagccctgaagaatggccagtactgggtgtag

SEQ ID NO: 122004 - DNA, 984 bp, Artificial Sequence
  derived and/or modified sequence
gagcagcaccgggaggagcctgaggccgcctaccgcctcatccagggcccccagtatggccacctgctggtgggcggccggcccaccagcgccttcagccagttccagattgaccagggcgaggtggtgtttgccttcaccaacttcagcagcagccatgaccacttccgggtgctggccctggcccggggcgtgaatgccagcgctgtggtgaatgtgacagtgcgggccctgctgcacgtgtgggccggcggcccctggccccagggcgccaccctgcggctggaccccaccgtgctggatgctggggagctggccaacagaactggatctgtgccccgcttccggctgctggagggccccaggcatggccgggtggtgcgggtgccccgggccaggacagagcccggcggcagccagctggtggagcagttcacccagcaggacctggaggatggccgcctgggcctggaggtgggccggcctgagggccgggcccctggccctgctggggacagcctgaccctggagctgtgggcccagggcgtgcccccagctgtggccagcctggactttgccacagagccctacaatgctgcccggccctacagcgtggccctgctgtctgtgcctgaggccgccaggacagaggccggcaagccagagagcagcacccccactggagagcccggccccatggccagcagccctgagcctgctgtggccaagggcggcttcctgtccttcctggaggccaacatgttcagcgtcatcatccccatgtgcctggtgctgctgctgctggccctgatcctgcccctgctcttctacctgaggaagaggaacaagacaggcaagcatgatgtgcaggtgctgacagccaagcccagaaatggcctggccggggacacagagaccttcaggaaggtggagcccggccaggccatccccctgacagctgtgcccggccagggccccccatag

SEQ ID NO: 122005 - DNA, 6969 bp, Artificial Sequence
  derived and/or modified sequence
atgcagagcggcccccggccccccctgcccgcccccggcctggccctcgctctgacgttaaccatgctcgcacgcttggcttctgctgccagctttttcggtgaaaaccaccttgaagtaccagtggcaactgccctgacagatatcgacctgcaactgcaattctccacgtcccagcccgaggctctcctcctgctggccgcaggacctgctgaccacctactccttcaactttattctggcaggctgcaagtcagactcgtgctcgggcaggaggagctccgattgcaaacaccggccgagaccctcctcagcgactctatcccgcacacagtggtgctgacagtggtcgaagggtgggcaacacttagcgtggatgggttcttgaatgcttcaagtgcggtgcccggggcccctctcgaggtcccttatggactcttcgtgggaggaaccggtacccttggcttgccatatctgcggggcaccagccgccctctccgcggctgcttgcacgctgcaacacttaacgggaggagtctactgaggcctcttacgccagacgtccacgaagggtgcgcggaggaattttccgcttccgacgacgtggcattaggattttccggcccccacagcctggccgcctttcccgcctggggaacacaagacgagggcactttagagttcaccttaaccacccagtcacgccaggcacctttagctttccaagctggaggcagacgaggggattttatatacgtggatatcttcgaaggacatttaagagccgtggttgaaaaaggtcagggcactgttctgctccacaacagcgtccccgtcgccgacggccaaccacacgaggtgagtgttcatattaacgcccatcgattggagatcagcgtggatcaataccctacacacacaagcaatagaggcgtcttgtcatatctcgagcctagaggctctctgttgcttggtggactcgacgcagaggcttcgcggcatctgcaagagcacaggctgggtctgacaccggaagcaacgaatgctagccttctgggatgtatggaagatctctcagtgaacgggcaaagaagaggcctgcgggaagccctgctcacgcgcaacatggcggccggctgccgcctggaggaggaggaatacgaggatgatgcgtacggtcattatgaagcgttcagcacactggctcccgaggcttggccagcaatggagctgccagagccttgtgttccagaacccgggctgccccctgtcttcgcaaattttacacagctgcttaccatctctccccttgtggtcgctgaggggggtactgcatggctggagtggagacatgtccagcctactctcgatctgatggaggcggagctgaggaaatcacaagtcctgttttccgttacccggggtgctagacacggagaactagagcttgacattcctggggcacaggctcgaaaaatgttcactttgctcgacgtggtgaataggaaggccaggtttattcatgacgggtctgaagacacgtccgaccagctggtgttggaggtctccgtgactgcgagggtgcccatgccgtcttgccttcgtagggggcagacctatctgctccctattcaggtcaatccggtgaatgaccccccacatattatttttccacacggctcactgatggtgattctcgagcatacacagaagcccctgggtcctgaagtgttccaggcctatgacccagattccgcgtgcgagggattgacatttcaggtcctgggaactagttctggtttgcctgttgaacgcagagaccagcctggcgaaccagcaacggagttttcttgtagggagctcgaagcgggctcactggtgtatgtccaccgaggggggccagctcaggacttgacctttagggtgtccgatggcctccaggcatctcctcctgctacactaaaagtcgtcgcgatcagaccggctatccaaattcataggagtactggactcagactcgcccagggctcagccatgccaatcttacctgcgaacctgagcgtggagacaaatgctgtcggccaggatgtctcagtgctcttccgcgtgacgggagccctccagtttggggagctgcagaaacagggagcggggggcgttgaaggcgccgagtggtgggcaacccaggctttccaccagagagatgtggagcaagggcgggtgcgctatctctcgacggacccccagcatcacgcatatgatactgtggagaacttagcactggaagtgcaggtgggtcaggagattttatctaatttatcctttccagtcactatccaacgggctacggtgtggatgttaaggcttgagccattgcacactcaaaacacgcagcaggaaacattgactacagctcatcttgaggcaacacttgaggaagccggaccatctccccccacatttcattatgaggttgtccaggccccacggaagggcaatctacaactccaaggtacaagactctcggatggacagggcttcacccaggatgatatccaggctgggagagtgacctacggcgcaacagcccgcgcgagcgaggccgtcgaggatacgttccgcttccgcgtcaccgccccaccttatttctcacctctctacaccttccctatccacattgggggcgatccggatgcacccgtccttactaacgtccttctggttgtgccagaaggtggtgagggtgtgctgagtgcagatcatttgtttgttaagtccctgaattcagcctcctacctctacgaggtgatggagaggcctaggcatggacgtctggcctggagggggacccaggataaaactaccatggttacctcatttacgaacgaggatctgctgaggggcagactggtgtaccaacatgatgactcagaaaccacagaagacgacataccatttgtcgcgacacgccagggcgaatcctccggcgacatggcctgggaagaggttaggggtgtgtttcgcgttgccattcagcctgtgaatgaccatgcgcctgtgcagacgatctctaggatcttccacgtagcacgcggcggacgccgtcttctgacaacagatgacgtagcattcagtgatgcggatagtggttttgcagatgctcagctagtactgactcggaaagacctgctgtttggcagcatcgtggcagttgacgagccaacacggcccatttaccgattcacccaggaggatctgcggaagagacgggtgctgtttgtccactctggagccgaccgtgggtggatccagctgcaggttagcgacggtcagcatcaggcaactgccctgctagaagtgcaagcctccgagccatatctgcgagtcgccaacgggtcatccctggtggtccctcagggtgggcaagggacaatcgatacagctgtgctgcacctcgatacaaacctggacatcagaagcggagatgaagttcactaccatgtgaccgccggtcctagatggggccaactcgtgagagccggccaaccagccacggctttttctcagcaggacctacttgatggcgcagtgctctactctcacaacggttctctgtcccctcgggacacaatggcgttttctgttgaagcaggtccagttcatactgatgccaccctccaagtgacgattgccctcgagggtccattggcccccctgaagctcgtgcgacacaaaaagatctacgtgttccagggcgaggccgctgaaataagaagagatcagctggaggcggcacaagaggccgttccccctgcggatattgtgttcagcgttaagtcacctccaagtgctggatatctggtgatggtgtctcgcggcgcactggcagatgagcctccatccctggatcctgtccagtcgttctcacaggaagccgtagatactggaagagtcctatacctgcacagccgcccagaagcttggagtgacgcattttcgttggacgtggccagtggactgggggctccgttggagggcgtacttgtcgagctggaagttctccctgctgccatccctctggaggctcagaatttctctgttcccgagggcggcagcttgactctggcccctccactgcttagggtcagcggaccctattttcccacattgctgggcttgtcactccaggtcttagagcccccccagcatggggcactccagaaagaagacggcccacaagcacgcacgctgtccgcattttcttggcgcatggtcgaggaacaacttatccgctacgtccacgacggctcagaaactctaaccgattcttttgtactcatggctaatgcttccgagatggatcgacagtcacatcctgtagccttcacagtgaccgtgctcccggtcaacgaccaaccgcccattctaactaccaacaccggccttcagatgtgggagggcgcaaccgcccctatcccggcagaggcattaaggagtacagatggcgattcaggttctgaggatctcgtgtataccatcgagcagccatcaaatggcagagtggtgcttcggggcgctccaggaacggaagtgcgtagcttcactcaggctcagctggacggtgggctggtcctgttcagccacagaggaaccctggatggcgggttcaggttcaggctcagcgacggagagcacacctctcctggacacttctttagggtgaccgctcagaaacaggtgttgcttagtctaaagggatcacagactctcacagtgtgtccaggctccgttcaacctttatcatcacagactcttagggcatccagctccgccgggacagacccacagctgctcctgtatagggttgttcggggtccgcagcttggacggctgttccatgcccaacaggatagtaccggcgaggcattagtgaactttactcaagctgaggtgtatgccggaaacattctgtacgaacacgaaatgcctccagagcctttctgggaggctcacgacactctagaactgcagctgtcgtctcccccagccagagacgtggcggcaacactggcagtggctgtctcgttcgaggccgcctgcccgcagaggcctagccatctctggaagaacaagggcctgtgggtgcctgaggggcagcgcgccagaataaccgttgccgcgctggatgcgtcaaatctgctggcttccgtgccaagccctcaacggtccgaacacgatgtcctctttcaggtcactcagtttccatcacgcggtcagttgctggtgtccgaggagcccctccacgcaggccagccacattttctgcagagccaactcgcagccgggcagctggtgtatgcacacggcggcggcggcactcagcaggacgggtttcatttcagagcacacttacaaggaccagctggcgcctccgtcgcgggccctcagacctccgaagctttcgctatcaccgtgcgggatgtgaatgagcgcccacctcaacctcaggctagcgtgcccttgcggttgactcggggctcaagggctcccatttcaagagcccaactcagcgttgtggaccccgactccgcgccgggcgagatcgaatatgaggttcaaagagcgcctcataacggctttctatccctcgtgggaggaggcctcgggcccgtcactcgctttacacaggcagatgtggatagcggaaggctggcattcgtcgccaacggttcatccgtcgcgggaatctttcagttgtccatgagcgatggcgcatctccaccattacctatgtctctcgctgtggacattctaccgagcgcaatcgaggtacagctgagggctcccctcgaagtccctcaggccctgggtaggagcagcctcagccagcagcaactgcgggtcgtctcagaccgtgaagagcctgaggcagcctaccgcctgatccagggaccccagtacgggcatctccttgttggcggaagacctacttctgccttttcccaatttcagatcgatcaaggcgaggtggtgttcgcctttaccaacttttcatccagccacgatcactttagggtcctcgcactggccagaggggtgaacgcgtccgccgtcgtgaacgtgacagtacgtgctcttctgcatgtgtgggcgggcggtccctggccccagggcgccaccctccgcttggatccgaccgtcctcgatgcaggagagctggccaacagaacaggtagtgtccctcgattccggttgctggaaggcccaaggcatggccgcgtggtgagggtgccacgggccagaacggaacccggcggctcccaactggtggagcaattcacccagcaggatttagaggacggcaggctcggtctggaggtaggaagaccagaaggtcgggcccctggcccagctggcgactcattgacactcgagttgtgggcccagggcgtgccaccagcagtggcaagtctagatttcgcaactgaaccctataatgctgcccggccctactcagtcgcgcttctcagtgtgcctgaggcagcaaggactgaagccggaaaaccagagtcctccacacccaccggcgaacctgggccaatggcaagctctcctgagccggccgtagccaaaggcgggttcctgtcctttctggaagcgaacatgttctccgtgatcattcccatgtgtctggtgttgctcctgctcgcgctgattttgcctctgcttttttaccttcgcaaaagaaacaagaccgggaaacatgacgttcaagtgttaacggcaaagcctagaaatggtctagcgggcgacacagagaccttccggaaagtggagcctggccaggcgatcccccttaccgccgtaccgggccagggtccccctcccggagggcaaccggatcccgaactgctgcagttttgtaggaccccaaacccagccctgaagaatgggcaatactgggtttag

SEQ ID NO: 122006 - DNA, 984 bp, Artificial Sequence
  derived and/or modified sequence
gagcagcaccgggaggagcccgaggccgcctaccggctgatccagggcccacagtacggccatctgctggttgggggacggcccactagtgctttttcccagtttcagattgaccagggagaagtggtgtttgccttcacgaatttttccagcagtcatgaccacttcagggtcctggctctagcccgcggtgttaatgcctctgctgtagtcaatgtcactgtgcgagcactcctacacgtttgggccggcgggccctggcctcagggggccactctcagactggacccaacggtgctggatgctggagaactggctaacagaaccggttccgtcccacgatttcgtttactggagggaccccggcatggacgggtggtgcgggtccccagagcccgcaccgagcctggcggttcccagttagtggaacagttcacccaacaggaccttgaggatggcaggctcggactggaggtcggccggccagaaggaagggcaccaggacccgccggcgatagcctcacattggagctgtgggcccagggagtgccccccgccgtggccagcctggactttgcaaccgaaccttataacgccgcacggccttatagcgtggccctgctgtccgtgcctgaagccgcccggacagaggctggcaagccagagtcttcaactccaaccggggagcctggaccgatggcaagctctccagagcctgccgtcgccaagggtgggttcctcagtttcctggaggccaacatgtttagcgtaatcattcctatgtgtctggttcttctactgttggcattaatcctccctctgctgttctacctgcgaaaacgtaacaagaccggcaaacatgatgtgcaggtgttaacggcaaaacctagaaacggtctggccggtgatacagaaaccttcaggaaggtggagccaggacaggcgatacccttgaccgccgtgccgggccagggcccaccgtag

SEQ ID NO: 122007 - DNA, 6968 bp, Artificial Sequence
  derived and/or modified sequence
atgcagtccggtccaagaccgcctctgcctgctcctggcttggccctggccctcaccctgaccatgctcgcaaggctggcctctgccgcatccttttttggagagaatcatttggaagtgcccgtggccaccgcccttaccgatatagatctgcagctgcaatttagcacttctcagcccgaggctctcttgctgcttgccgctggtccagccgaccacttgctgctgcagctgtattccggaaggcttcaggtgcgtttagtcttaggacaagaggaacttagattgcagaccccagctgagacactcttgtctgattcaatccctcacacggtggtactgactgtcgtggaagggtgggctacactatccgtcgacggcttcctgaatgccagtagtgccgtccctggcgctccactagaggttccttacggcctgtttgtgggcggaacaggaactttgggtttgccataccttcgagggactagccgaccgctacggggttgcctacatgctgccacactgaacggccgtagtcttttacgccctctcacgcccgatgtgcatgaggggtgtgccgaggagttcagcgccagtgacgacgtggccctggggttttctgggcctcacagcctggccgctttccccgcatggggtacacaggacgagggtaccttagagtttacgttaaccacccagagccggcaggcacctttggctttccaggccggtgggaggcgaggcgatttcatttatgtcgatatattcgagggccatttgagagcagtggtagagaaaggacagggaacagtattgttgcacaactcagtcccagtagccgacgggcagcctcacgaggtctcagtgcacatcaatgcccatcgactcgaaatttctgttgatcaataccccactcacacgtctaacaggggagtgctgtcctacctggagcctcgaggtagtctcctgctagggggtctggatgccgaggcttcgagacatctgcaggagcacaggctaggcctgacccccgaggccaccaatgcatcactcctggggtgtatggaggacctgagtgtaaatggccagaggagaggtctaagggaagcgctcctcacgcgtaatatggctgctggctgccgcctcgaagaggaggagtatgaggacgacgcatacggccactatgaggccttttccacgctggccccagaggcttggcctgcaatggaattacccgagccctgtgtacctgaacccggtctgccccctgttttcgcaaattttactcagttgctgactatctcacccctggtcgtcgctgaggggggtaccgcgtggctggaatggagacacgtccagcctactctggacttgatggaagccgagctccgcaagagtcaggtgctcttctcggtcactaggggggcacggcacggagaattggagctggatatccctggggctcaggccagaaaaatgttcaccctcctcgatgtagttaacagaaaagctagatttatccacgatggaagcgaagacacatccgatcaactcgtgctggaggtatctgtgacggccagagtccccatgccctcctgtctcaggcggggacaaacatatctgctgccgatccaggtaaaccctgtcaatgatccgccacacattattttcccgcacggatccctaatggtaatcctggagcatactcagaagcccctcgggccagaggtgttccaagcctacgatcccgatagcgcatgtgaaggattaaccttccaggttctgggaacgagcagcggactccctgtggagcggcgagaccaacccggagaaccagccaccgaattctcttgccgggaattggaggcaggtagtctcgtgtatgtccaccggggaggccctgcgcaggatctaactttcagagtctctgacggcctgcaagctagccctccagccactcttaaagtggtggccatccgcccagctatccagatccacagatctaccgggcttagactggcccagggatcagccatgcctatcctgccagctaacctgagcgtggaaaccaacgcagtcggtcaagatgtgtctgttcttttccgcgtgacgggtgcactgcagtttggggaactccagaagcagggcgcaggaggagtggagggggcagaatggtgggctacccaagccttccatcaaagagacgtcgagcagggccgagtgaggtacctctccactgacccccagcaccacgcttacgacacagtagagaacctggctctggaggtacaggtggggcaggagatcctcagcaatctttccttcccagtcaccatccaacgtgccacagtgtggatgttaagacttgaaccccttcacactcagaacacacagcaggaaacactaacaaccgcccatttggaagccactttagaggaagccggtccatctcctcctacattccattatgaagtggtgcaggcaccgaggaaggggaacctgcagcttcaaggcactagattaagtgacggccagggcttcacccaggatgatatccaagctggcagggtgacttatggagcaaccgcacgggcttcagaggccgtggaagacaccttccgcttccgcgtgaccgctccaccatacttttcccctctgtatactttcccaattcacatcggtggggatccagacgcccctgtgctcaccaacgtcctgctggttgtgcctgagggcggagagggggtcctgagcgcagaccacctcttcgtgaagtccctgaacagcgcctcttatctctatgaagtgatggaaagacccagacacggtaggctggcttggagagggacacaagataagaccactatggtcacaagtttcacgaacgaggacctcttgaggggtcggctggtctatcaacacgacgactctgaaaccactgaggatgatattccgttcgtcgctactagacagggtgagtcttctggcgatatggcttgggaagaagtgcggggtgtttttcgggtagctattcagcccgttaatgatcatgcgccagtgcaaacaatcagccgtatcttccatgttgcccgtggaggtaggcgactcctcactacggacgacgtggctttctctgatgccgactccggtttcgccgatgcccagctagtgctgaccagaaaagatctactctttggctccatagtcgccgtggatgagccgacgcggcctatttaccgcttcactcaggaggacttgagaaagaggcgtgtgctctttgtgcactccggtgctgatcggggatggatccagttacaggtcagtgacgggcagcaccaggctactgctcttctggaggtgcaagccagcgaaccatacttaagggtggctaacgggtcatccttagtcgttccacaagggggacagggcacaatcgacactgcagtcctgcatttggatacaaatttggacatcagaagcggagacgaagtccactatcatgtaaccgcaggacctcgatggggccagctagttagagccggacagcccgctacagccttttctcaacaggatcttttggacggagctgttctctattcccacaatgggtctctgtcaccccgagataccatggccttttccgtcgaggcaggtcccgtccacaccgacgccaccctacaggttaccatcgcgctggagggcccactcgccccactcaagctggtgaggcataagaagatatacgtgtttcagggcgaagcagccgagataaggcgcgatcagctggaggccgctcaagaagctgtacctccagccgatatcgtgttcagcgtgaaaagtcctcccagcgccggatacctggttatggtctcccgtggggctctggccgacgagcccccttcgcttgaccctgtgcagtcattttcgcaggaggccgtggatactggaagggtcctgtacctacactcacgcccagaagcctggtccgacgcctttagtttggacgttgcaagtggactgggggctcccctcgagggagtccttgtggagcttgaagtcctgccggcagcaattccgctcgaggcacagaatttcagcgtcccagaaggcggatcactcaccctggcgccacctctgctgcgtgtgagcggaccctacttcccaactctgttaggtctctcactccaagtgctcgaacctccccagcacggagctctgcagaaggaggacggccctcaggccaggactctttcggcattcagttggagaatggtggaggagcagctcattcgttacgtgcacgatgggtctgaaaccctgaccgactccttcgtgctaatggccaatgcttcggagatggaccggcaatctcatcccgtggcctttaccgtcacagtcctccctgtcaatgaccagcccccaatactgacaacaaacactggtctgcagatgtgggagggagctacagccccaatccctgccgaggccctgagaagcacagatggcgatagcgggtccgaggatttggtctacacaatcgaacagccctcaaacggtcgagtcgtgctccggggagcaccgggtacagaggtgcggtcttttacccaggcacagttggatggcggactggtgctcttttcacacaggggaaccctggatggtgggtttcgattccggcttagcgacggtgaacacaccagcccaggacactttttccgggtgactgcccagaaacaggtcctgctgtctctcaaggggagccagaccctgaccgtgtgccccggatccgtgcagcctttgtcctcccaaacgctaagggcctcttcatccgccggaacggacccccagctgttgctctatcgggttgtcagggggcctcaattaggacgcctgttccatgcacaacaggatagtaccggcgaggcactggtgaacttcacccaagccgaggtctatgcgggaaatatactgtatgaacacgaaatgcccccagaacccttttgggaagcccacgatacgctggagctccagctgagctccccccctgctcgtgacgtggccgctactttagccgtcgctgtctcttttgaggccgcttgtccccaaaggcccagccatctttggaagaacaaagggctgtgggtacctgaggggcagcgcgctcgtattacagtggcagcgttagacgcatccaaccttctggcttcggtgcccagcccacagcgttcggagcacgacgtactgttccaggtgacgcagttcccctcacgcggtcagctgcttgtgtccgaagaacccttgcacgcgggtcagccccatttcctgcaaagccagttggccgcaggtcagctggtctatgctcatgggggtggcggtacgcaacaggatggtttccatttcagggcccatctacagggtccagccggagcttccgtcgctggaccacagacttccgaagcattcgcaatcacagttcgagacgttaatgagaggccgccacagccccaggcgtcagttcccttgcgtctgactcgagggagccgggcaccaattagccgcgctcagctctctgtagtcgaccctgattcagcacctggagagatcgagtacgaggtgcagcgcgcaccccataatggctttctaagtctcgtcggtggcggactgggccctgtgacaagattcacacaggccgacgttgacagcggcaggctagctttcgtggctaatggctcctctgtcgccggtatcttccagctgtcaatgtctgatggcgcttccccgccactgccaatgagcctggccgtggatattttgcctagcgccattgaggtacagctccgggcaccgctggaagtgccgcaggctctcgggagatcatccctcagccagcagcaactacgggttgtttcagaccgggaggagcctgaggccgcataccgcctgatccaggggcctcagtacggccatcttttggtggggggtcgcccaacatccgcgttctcgcaatttcagatcgatcagggcgaggtggtgttcgccttcacgaatttttccagttcgcacgatcactttcgcgtactagctttggcccgaggagtgaacgcttcggccgtggtaaacgtcaccgtgagagcattgctccacgtctgggcgggtggcccttggccacaaggggctaccctgaggcttgaccccacagtactggacgccggagagctggccaaccgcacagggagtgtgccgagattccgactcctggaggggcctagacacgggcgagtggtgcgggttccccgagcacgcacggaacctgggggttcgcaactggtggaacagttcacgcagcaggatctcgaagacggtagactgggattggaggttggcaggcctgagggcagggcccctggccctgcaggtgacagcctaaccttagaattgtgggctcagggcgtgcccccagctgtggccagtttagactttgcgaccgagccctacaacgccgcacggccttacagtgtggcgctcctaagcgtgcctgaagctgcaagaactgaggctggcaaaccagaaagcagcactcctacaggggagccgggacctatggcctctagcccagagccagcagtggccaaaggcggattcctcagcttcctggaagccaatatgttcagcgtgataatcccaatgtgccttgtcttacttctgctcgccctgattctgccactgctgttctacctgcggaagcgcaacaagaccggcaaacacgacgtgcaagtgctcaccgcaaagcccagaaacggtctcgcaggagatacagaaacatttcgtaaggttgaacccggacaagcgatccccctcaccgcggtaccgggtcagggcccacccccaggcggtcagcccgatccagagttgttacaattctgtaggactcctaaccctgcattgaaaaacgggcaatattgggtata

SEQ ID NO: 122008 - DNA, 984 bp, Artificial Sequence
  derived and/or modified sequence
gagcaacatcgtgaggagccagaggctgcctataggcttattcagggtccacagtacgggcacctcctggtcggtgggagaccaacctccgctttttcgcagtttcaaatagaccagggagaggtcgtgttcgcatttactaatttcagctcttctcacgatcactttcgggtgttagccctggcgaggggagtcaacgccagtgcggtggtcaacgtcaccgtgagagcccttcttcacgtatgggccggaggtccttggccccagggcgcaacactcagactagaccccacagttctggatgccggagaactggctaacagaaccggtagtgtgccacggtttaggctgctcgagggaccgagacatggacgcgtggttcgggtccctcgggctcggaccgagccgggaggctctcagcttgtcgagcagttcacccagcaggacctggaggatggcaggctgggattagaggttggtagacccgagggtagggctccaggaccagcaggggactcgctgacactcgaactttgggcgcaaggcgtgccccctgccgtcgccagcctggattttgcgactgagccttataacgctgcaagaccatactcagtcgctctgctgtctgtaccagaagccgcaagaacggaggccggtaagcccgagagctctacaccaacaggggagccaggacccatggcatcaagcccagaaccggcagtcgcaaagggagggttcctgtcctttctggaggctaacatgttttcagttatcattcctatgtgtctcgttctcttactgttggccctgattctgcccctacttttctacctccgaaagaggaacaagacaggaaaacacgatgtccaggttctgactgccaaaccaaggaacggattggcaggggacaccgaaactttcaggaaagtggagccaggacaggccatacctctaaccgccgtaccgggtcaggggccaccctag

SEQ ID NO: 122009 - DNA, 8290 bp, Artificial Sequence
  derived and/or modified sequence
gcgcccaggagcagagccgcgctcgctccactcagctcccagctcccaggactccgctggctcctcgcaagtcctgccgcccagcccgccgggatgcagtccgggccgcggcccccacttccagcccccggcctggccttggctttgaccctgactatgttggccagacttgcatccgcggcttccttcttcggtgagaaccacctggaggtgcctgtggccacggctctgaccgacatagacctgcagctgcagttctccacgtcccagcccgaagccctccttctcctggcagcaggcccagctgaccacctcctgctgcagctctactctggacgcctgcaggtcagacttgttctgggccaggaggagctgaggctgcagactccagcagagacgctgctgagtgactccatcccccacactgtggtgctgactgtcgtagagggctgggccacgttgtcagtcgatgggtttctgaacgcctcctcagcagtcccaggagcccccctagaggtcccctatgggctctttgttgggggcactgggacccttggcctgccctacctgaggggaaccagccgacccctgaggggttgcctccatgcagccaccctcaatggccgcagcctcctccggcctctgacccccgatgtgcatgagggctgtgctgaagagttttctgccagtgatgatgtggccctgggcttctctgggccccactctctggctgccttccctgcctggggcactcaggacgaaggaaccctagagtttacactcaccacacagagccggcaggcacccttggccttccaggcagggggccggcgtggggacttcatctatgtggacatatttgagggccacctgcgggccgtggtggagaagggccagggtaccgtattgctccacaacagtgtgcctgtggccgatgggcagccccatgaggtcagtgtccacatcaatgctcaccggctggaaatctccgtggaccagtaccctacgcatacttcgaaccgaggagtcctcagctacctggagccacggggcagtctccttctcggggggctggatgcagaggcctctcgtcacctccaggaacaccgcctgggcctgacaccagaggccaccaatgcctccctgctgggctgcatggaagacctcagtgtcaatggccagaggcgggggctgcgggaagctttgctgacgcgcaacatggcagccggctgcaggctggaggaggaggagtatgaggacgatgcctatggacattatgaagctttctccaccctggcccctgaggcttggccagccatggagctgcctgagccatgcgtgcctgagccagggctgcctcctgtctttgccaatttcacccagctgctgactatcagcccactggtggtggccgaggggggcacagcctggcttgagtggaggcatgtgcagcccacgctggacctgatggaggctgagctgcgcaaatcccaggtgctgttcagcgtgacccgaggggcacgccatggcgagctcgagctggacatcccgggagcccaggcacgaaaaatgttcaccctcctggacgtggtgaaccgcaaggcccgcttcatccacgatggctctgaggacacctccgaccagctggtgctggaggtgtcggtgacggctcgggtgcccatgccctcatgccttcggaggggccaaacatacctcctgcccatccaggtcaaccctgtcaatgacccaccccacatcatcttcccacatggcagcctcatggtgatcctggaacacacgcagaagccgctggggcctgaggttttccaggcctatgacccggactctgcctgtgagggcctcaccttccaggtccttggcacctcctctggcctccccgtggagcgccgagaccagcctggggagccggcgaccgagttctcctgccgggagttggaggccggcagcctagtctatgtccaccgcggtggtcctgcacaggacttgacgttccgggtcagcgatggactgcaggccagccccccggccacgctgaaggtggtggccatccggccggccatacagatccaccgcagcacagggttgcgactggcccaaggctctgccatgcccatcttgcccgccaacctgtcggtggagaccaatgccgtggggcaggatgtgagcgtgctgttccgcgtcactggggccctgcagtttggggagctgcagaagcagggggcaggtggggtggagggtgctgagtggtgggccacacaggcgttccaccagcgggatgtggagcagggccgcgtgaggtacctgagcactgacccacagcaccacgcttacgacaccgtggagaacctggccctggaggtgcaggtgggccaggagatcctgagcaatctgtccttcccagtgaccatccagagagccactgtgtggatgctgcggctggagccactgcacactcagaacacccagcaggagaccctcaccacagcccacctggaggccaccctggaggaggcaggcccaagccccccaaccttccattatgaggtggttcaggctcccaggaaaggcaaccttcaactacagggcacaaggctgtcagatggccagggcttcacccaggatgacatacaggctggccgggtgacctatggggccacagcacgtgcctcagaggcagtcgaggacaccttccgtttccgtgtcacagctccaccatatttctccccactctataccttccccatccacattggtggtgacccagatgcgcctgtcctcaccaatgtcctcctcgtggtgcctgagggtggtgagggtgtcctctctgctgaccacctctttgtcaagagtctcaacagtgccagctacctctatgaggtcatggagcggccccgccatgggaggttggcttggcgtgggacacaggacaagaccactatggtgacatccttcaccaatgaagacctgttgcgtggccggctggtctaccagcatgatgactccgagaccacagaagatgatatcccatttgttgctacccgccagggcgagagcagtggtgacatggcctgggaggaggtacggggtgtcttccgagtggccatccagcccgtgaatgaccacgcccctgtgcagaccatcagccggatcttccatgtggcccggggtgggcggcggctgctgactacagacgacgtggccttcagcgatgctgactcgggctttgctgacgcccagctggtgcttacccgcaaggacctcctctttggcagtatcgtggccgtagatgagcccacgcggcccatctaccgcttcacccaggaggacctcaggaagaggcgagtactgttcgtgcactcaggggctgaccgtggctggatccagctgcaggtgtccgacgggcaacaccaggccactgcgctgctggaggtgcaggcctcggaaccctacctccgtgtggccaacggctccagccttgtggtccctcaaggaggccagggcaccatcgacacggccgtgctccacctggacaccaacctcgacatccgcagtggggatgaggtccactaccacgtcacagctggccctcgctggggacagctagtccgggctggtcagccagccacagccttctcccagcaggacctgctggatggggccgttctctatagccacaatggcagcctcagcccccgcgacaccatggccttctccgtggaagcagggccagtgcacacggatgccaccctacaagtgaccattgccctagagggcccactggccccactgaagctggtccggcacaagaagatctacgtcttccagggagaggcagctgagatcagaagggaccagctggaggcagcccaggaggcagtgccacctgcagacatcgtattctcagtgaagagcccaccgagtgccggctacctggtgatggtgtcgcgtggcgccttggcagatgagccacccagcctggaccctgtgcagagcttctcccaggaggcagtggacacaggcagggtcctgtacctgcactcccgccctgaggcctggagcgatgccttctcgctggatgtggcctcaggcctgggtgctcccctcgagggcgtccttgtggagctggaggtgctgcccgctgccatcccactagaggcgcaaaacttcagcgtccctgagggtggcagcctcaccctggcccctccactgctccgtgtctccgggccctacttccccactctcctgggcctcagcctgcaggtgctggagccaccccagcatggagccctgcagaaggaggacggacctcaagccaggaccctcagcgccttctcctggagaatggtggaagagcagctgatccgctacgtgcatgacgggagcgagacactgacagacagttttgtcctgatggctaatgcctccgagatggatcgccagagccatcctgtggccttcactgtcactgtcctgcctgtcaatgaccaaccccccatcctcactacaaacacaggcctgcagatgtgggagggggccactgcgcccatccctgcggaggctctgaggagcacggacggcgactctgggtctgaggatctggtctacaccatcgagcagcccagcaacgggcgggtagtgctgcggggggcgccgggcactgaggtgcgcagcttcacgcaggcccagctggacggcgggctcgtgctgttctcacacagaggaaccctggatggaggcttccgcttccgcctctctgacggcgagcacacttcccccggacacttcttccgagtgacggcccagaagcaagtgctcctctcgctgaagggcagccagacactgactgtctgcccagggtccgtccagccactcagcagtcagaccctcagggccagctccagcgcaggcactgacccccagctcctgctctaccgtgtggtgcggggcccccagctaggccggctgttccacgcccagcaggacagcacaggggaggccctggtgaacttcactcaggcagaggtctacgctgggaatattctgtatgagcatgagatgccccccgagcccttttgggaggcccatgataccctagagctccagctgtcctcgccgcctgcccgggacgtggccgccacccttgctgtggctgtgtcttttgaggctgcctgtccccagcgccccagccacctctggaagaacaaaggtctctgggtccccgagggccagcgggccaggatcaccgtggctgctctggatgcctccaatctcttggccagcgttccatcaccccagcgctcagagcatgatgtgctcttccaggtcacacagttccccagccggggccagctgttggtgtccgaggagcccctccatgctgggcagccccacttcctgcagtcccagctggctgcagggcagctagtgtatgcccacggcggtgggggcacccagcaggatggcttccactttcgtgcccacctccaggggccagcaggggcctccgtggctggaccccaaacctcagaggcctttgccatcacggtgagggatgtaaatgagcggccccctcagccacaggcctctgtcccactccggctcacccgaggctctcgtgcccccatctcccgggcccagctgagtgtggtggacccagactcagctcctggggagattgagtacgaggtccagcgggcaccccacaacggcttcctcagcctggtgggtggtggcctggggcccgtgacccgcttcacgcaagccgatgtggattcagggcggctggccttcgtggccaacgggagcagcgtggcaggcatcttccagctgagcatgtctgatggggccagcccacccctgcccatgtccctggctgtggacatcctaccatccgccatcgaggtgcagctgcgggcacccctggaggtgccccaagctttggggcgctcctcactgagccagcagcagctccgggtggtttcagatcgggaggagccagaggcagcataccgcctcatccagggaccccagtatgggcatctcctggtgggcgggcggcccacctcggccttcagccaattccagatagaccagggcgaggtggtctttgccttcaccaacttctcctcctctcatgaccacttcagagtcctggcactggctaggggtgtcaatgcatcagccgtagtgaacgtcactgtgagggctctgctgcatgtgtgggcaggtgggccatggccccagggtgccaccctgcgcctggaccccaccgtcctagatgctggcgagctggccaaccgcacaggcagtgtgccgcgcttccgcctcctggagggaccccggcatggccgcgtggtccgcgtgccccgagccaggacggagcccgggggcagccagctggtggagcagttcactcagcaggaccttgaggacgggaggctggggctggaggtgggcaggccagaggggagggcccccggccccgcaggtgacagtctcactctggagctgtgggcacagggcgtcccgcctgctgtggcctccctggactttgccactgagccttacaatgctgcccggccctacagcgtggccctgctcagtgtccccgaggccgcccggacggaagcagggaagccagagagcagcacccccacaggcgagccaggccccatggcatccagccctgagcccgctgtggccaagggaggcttcctgagcttccttgaggccaacatgttcagcgtcatcatccccatgtgcctggtacttctgctcctggcgctcatcctgcccctgctcttctacctccgaaaacgcaacaagacgggcaagcatgacgtccaggtcctgactgccaagccccgcaacggcctggctggtgacaccgagacctttcgcaaggtggagccaggccaggccatcccgctcacagctgtgcctggccaggggccccctccaggaggccagcctgacccagagctgctgcagttctgccggacacccaaccctgcccttaagaatggccagtactgggtgtgaggcctggcctgggcccagatgctgatcgggccagggacaggcttgcccatgtcccgggccccattgcttccatgcctggtgctgtctgagtatccccagagcaagagagacctggagacaccaggggtggagggtcctgggagatagtcccaggggtccgggacagagtggagtcaagagctggaacctccctcagctcactccgagcctggagaactgcaggggccaaggtggaggcaggcttaagttcagtcctcctgccctggagctggtttgggctgtcaaaaccagggtaacctcctacatgggtcatgactctgggtcctgggtctgtgaccttgggtaagtcgcgcctgacccaggctgctaagagggcaaggagaaggaagtaccctggggagggaagggacagaggaagctattcctggcttttccactccaacccaggccaccctttgtctctgccccagagttgagaaaaaaacttcctcccctggttttttagggagatggtatcccctggagtagagggcaagaggagagagcgcctccagtctagaaggcataagccaataggataatatattcagggtgcagggtgggtaggttgctctggggatgggtttatttaagggagattgcaaggaagctatttaacatggtgctgagctagccaggactgatggagcccctgggggtgtgggatggaggagggtctgcagccagttcattcccagggccccatcttgatgggccaagggctaaacatgcatgtgtcagtggctttggagcaggttaggctggggctcatcgagggtctcaggccgaggccactgcggtgccagtgcccccctgaggactagggcaggcagctgggggcacttggttccatggagcctggataaacagtgctttggaggctctggacagctgtgtggtgtttgtgtcttaactatgcactgggcccttgtctgcgtcggcttgcatacagagggcccctggggtcggccctccggcctggcctcagccagtgggatggacagggccaggcaggcctctgaacttccacctcctggggcctcccagacctcctgtgcccccacctgtgtgggcaggtgggccagtcttcgggtgatgggaccaaaccccttcagttcagtagagaaaggctaggtcctctacaaagagctgcaagacaaaaattaaaataaatgctccccaccctaga

SEQ ID NO: 122010 - DNA, 981 bp, Artificial Sequence
  derived and/or modified sequence
gagcagcatcgggaggagccagaggcagcataccgcctcatccagggaccccagtatgggcatctcctggtgggcgggcggcccacctcggccttcagccaattccagatagaccagggcgaggtggtctttgccttcaccaacttctcctcctctcatgaccacttcagagtcctggcactggctaggggtgtcaatgcatcagccgtagtgaacgtcactgtgagggctctgctgcatgtgtgggcaggtgggccatggccccagggtgccaccctgcgcctggaccccaccgtcctagatgctggcgagctggccaaccgcacaggcagtgtgccgcgcttccgcctcctggagggaccccggcatggccgcgtggtccgcgtgccccgagccaggacggagcccgggggcagccagctggtggagcagttcactcagcaggaccttgaggacgggaggctggggctggaggtgggcaggccagaggggagggcccccggccccgcaggtgacagtctcactctggagctgtgggcacagggcgtcccgcctgctgtggcctccctggactttgccactgagccttacaatgctgcccggccctacagcgtggccctgctcagtgtccccgaggccgcccggacggaagcagggaagccagagagcagcacccccacaggcgagccaggccccatggcatccagccctgagcccgctgtggccaagggaggcttcctgagcttccttgaggccaacatgttcagcgtcatcatccccatgtgcctggtacttctgctcctggcgctcatcctgcccctgctcttctacctccgaaaacgcaacaagacgggcaagcatgacgtccaggtcctgactgccaagccccgcaacggcctggctggtgacaccgagacctttcgcaaggtggagccaggccaggccatcccgctcacagctgtgcctggccaggggccccct

SEQ ID NO: 122011 - DNA, 6969 bp, Artificial Sequence
  derived and/or modified sequence
atgcagagcggccccagaccccccctgcccgcccccggcctggccctggccctgaccctgaccatgctggccagactggccagcgccgccagcttcttcggcgagaaccacctggaggtgcccgtggccaccgccctgaccgacatcgacctgcagctgcagttcagcaccagccagcccgaggccctgctgctgctggccgccggccccgccgaccacctgctgctgcagctgtacagcggcagactgcaggtgagactggtgctgggccaggaggagctgagactgcagacccccgccgagaccctgctgagcgacagcatcccccacaccgtggtgctgaccgtggtggagggctgggccaccctgagcgtggacggcttcctgaacgccagcagcgccgtgcccggcgcccccctggaggtgccctacggcctgttcgtgggcggcaccggcaccctgggcctgccctacctgagaggcaccagcagacccctgagaggctgcctgcacgccgccaccctgaacggcagaagcctgctgagacccctgacccccgacgtgcacgagggctgcgccgaggagttcagcgccagcgacgacgtggccctgggcttcagcggcccccacagcctggccgccttccccgcctggggcacccaggacgagggcaccctggagttcaccctgaccacccagagcagacaggcccccctggccttccaggccggcggcagaagaggcgacttcatctacgtggacatcttcgagggccacctgagagccgtggtggagaagggccagggcaccgtgctgctgcacaacagcgtgcccgtggccgacggccagccccacgaggtgagcgtgcacatcaacgcccacagactggagatcagcgtggaccagtaccccacccacaccagcaacagaggcgtgctgagctacctggagcccagaggcagcctgctgctgggcggcctggacgccgaggccagcagacacctgcaggagcacagactgggcctgacccccgaggccaccaacgccagcctgctgggctgcatggaggacctgagcgtgaacggccagagaagaggcctgagagaggccctgctgaccagaaacatggccgccggctgcagactggaggaggaggagtacgaggacgacgcctacggccactacgaggccttcagcaccctggcccccgaggcctggcccgccatggagctgcccgagccctgcgtgcccgagcccggcctgccccccgtgttcgccaacttcacccagctgctgaccatcagccccctggtggtggccgagggcggcaccgcctggctggagtggagacacgtgcagcccaccctggacctgatggaggccgagctgagaaagagccaggtgctgttcagcgtgaccagaggcgccagacacggcgagctggagctggacatccccggcgcccaggccagaaagatgttcaccctgctggacgtggtgaacagaaaggccagattcatccacgacggcagcgaggacaccagcgaccagctggtgctggaggtgagcgtgaccgccagagtgcccatgcccagctgcctgagaagaggccagacctacctgctgcccatccaggtgaaccccgtgaacgaccccccccacatcatcttcccccacggcagcctgatggtgatcctggagcacacccagaagcccctgggccccgaggtgttccaggcctacgaccccgacagcgcctgcgagggcctgaccttccaggtgctgggcaccagcagcggcctgcccgtggagagaagagaccagcccggcgagcccgccaccgagttcagctgcagagagctggaggccggcagcctggtgtacgtgcacagaggcggccccgcccaggacctgaccttcagagtgagcgacggcctgcaggccagcccccccgccaccctgaaggtggtggccatcagacccgccatccagatccacagaagcaccggcctgagactggcccagggcagcgccatgcccatcctgcccgccaacctgagcgtggagaccaacgccgtgggccaggacgtgagcgtgctgttcagagtgaccggcgccctgcagttcggcgagctgcagaagcagggcgccggcggcgtggagggcgccgagtggtgggccacccaggccttccaccagagagacgtggagcagggcagagtgagatacctgagcaccgacccccagcaccacgcctacgacaccgtggagaacctggccctggaggtgcaggtgggccaggagatcctgagcaacctgagcttccccgtgaccatccagagagccaccgtgtggatgctgagactggagcccctgcacacccagaacacccagcaggagaccctgaccaccgcccacctggaggccaccctggaggaggccggccccagcccccccaccttccactacgaggtggtgcaggcccccagaaagggcaacctgcagctgcagggcaccagactgagcgacggccagggcttcacccaggacgacatccaggccggcagagtgacctacggcgccaccgccagagccagcgaggccgtggaggacaccttcagattcagagtgaccgcccccccctacttcagccccctgtacaccttccccatccacatcggcggcgaccccgacgcccccgtgctgaccaacgtgctgctggtggtgcccgagggcggcgagggcgtgctgagcgccgaccacctgttcgtgaagagcctgaacagcgccagctacctgtacgaggtgatggagagacccagacacggcagactggcctggagaggcacccaggacaagaccaccatggtgaccagcttcaccaacgaggacctgctgagaggcagactggtgtaccagcacgacgacagcgagaccaccgaggacgacatccccttcgtggccaccagacagggcgagagcagcggcgacatggcctgggaggaggtgagaggcgtgttcagagtggccatccagcccgtgaacgaccacgcccccgtgcagaccatcagcagaatcttccacgtggccagaggcggcagaagactgctgaccaccgacgacgtggccttcagcgacgccgacagcggcttcgccgacgcccagctggtgctgaccagaaaggacctgctgttcggcagcatcgtggccgtggacgagcccaccagacccatctacagattcacccaggaggacctgagaaagagaagagtgctgttcgtgcacagcggcgccgacagaggctggatccagctgcaggtgagcgacggccagcaccaggccaccgccctgctggaggtgcaggccagcgagccctacctgagagtggccaacggcagcagcctggtggtgccccagggcggccagggcaccatcgacaccgccgtgctgcacctggacaccaacctggacatcagaagcggcgacgaggtgcactaccacgtgaccgccggccccagatggggccagctggtgagagccggccagcccgccaccgccttcagccagcaggacctgctggacggcgccgtgctgtacagccacaacggcagcctgagccccagagacaccatggccttcagcgtggaggccggccccgtgcacaccgacgccaccctgcaggtgaccatcgccctggagggccccctggcccccctgaagctggtgagacacaagaagatctacgtgttccagggcgaggccgccgagatcagaagagaccagctggaggccgcccaggaggccgtgccccccgccgacatcgtgttcagcgtgaagagcccccccagcgccggctacctggtgatggtgagcagaggcgccctggccgacgagccccccagcctggaccccgtgcagagcttcagccaggaggccgtggacaccggcagagtgctgtacctgcacagcagacccgaggcctggagcgacgccttcagcctggacgtggccagcggcctgggcgcccccctggagggcgtgctggtggagctggaggtgctgcccgccgccatccccctggaggcccagaacttcagcgtgcccgagggcggcagcctgaccctggccccccccctgctgagagtgagcggcccctacttccccaccctgctgggcctgagcctgcaggtgctggagcccccccagcacggcgccctgcagaaggaggacggcccccaggccagaaccctgagcgccttcagctggagaatggtggaggagcagctgatcagatacgtgcacgacggcagcgagaccctgaccgacagcttcgtgctgatggccaacgccagcgagatggacagacagagccaccccgtggccttcaccgtgaccgtgctgcccgtgaacgaccagccccccatcctgaccaccaacaccggcctgcagatgtgggagggcgccaccgcccccatccccgccgaggccctgagaagcaccgacggcgacagcggcagcgaggacctggtgtacaccatcgagcagcccagcaacggcagagtggtgctgagaggcgcccccggcaccgaggtgagaagcttcacccaggcccagctggacggcggcctggtgctgttcagccacagaggcaccctggacggcggcttcagattcagactgagcgacggcgagcacaccagccccggccacttcttcagagtgaccgcccagaagcaggtgctgctgagcctgaagggcagccagaccctgaccgtgtgccccggcagcgtgcagcccctgagcagccagaccctgagagccagcagcagcgccggcaccgacccccagctgctgctgtacagagtggtgagaggcccccagctgggcagactgttccacgcccagcaggacagcaccggcgaggccctggtgaacttcacccaggccgaggtgtacgccggcaacatcctgtacgagcacgagatgccccccgagcccttctgggaggcccacgacaccctggagctgcagctgagcagcccccccgccagagacgtggccgccaccctggccgtggccgtgagcttcgaggccgcctgcccccagagacccagccacctgtggaagaacaagggcctgtgggtgcccgagggccagagagccagaatcaccgtggccgccctggacgccagcaacctgctggccagcgtgcccagcccccagagaagcgagcacgacgtgctgttccaggtgacccagttccccagcagaggccagctgctggtgagcgaggagcccctgcacgccggccagccccacttcctgcagagccagctggccgccggccagctggtgtacgcccacggcggcggcggcacccagcaggacggcttccacttcagagcccacctgcagggccccgccggcgccagcgtggccggcccccagaccagcgaggccttcgccatcaccgtgagagacgtgaacgagagacccccccagccccaggccagcgtgcccctgagactgaccagaggcagcagagcccccatcagcagagcccagctgagcgtggtggaccccgacagcgcccccggcgagatcgagtacgaggtgcagagagccccccacaacggcttcctgagcctggtgggcggcggcctgggccccgtgaccagattcacccaggccgacgtggacagcggcagactggccttcgtggccaacggcagcagcgtggccggcatcttccagctgagcatgagcgacggcgccagcccccccctgcccatgagcctggccgtggacatcctgcccagcgccatcgaggtgcagctgagagcccccctggaggtgccccaggccctgggcagaagcagcctgagccagcagcagctgagagtggtgagcgacagagaggagcccgaggccgcctacagactgatccagggcccccagtacggccacctgctggtgggcggcagacccaccagcgccttcagccagttccagatcgaccagggcgaggtggtgttcgccttcaccaacttcagcagcagccacgaccacttcagagtgctggccctggccagaggcgtgaacgccagcgccgtggtgaacgtgaccgtgagagccctgctgcacgtgtgggccggcggcccctggccccagggcgccaccctgagactggaccccaccgtgctggacgccggcgagctggccaacagaaccggcagcgtgcccagattcagactgctggagggccccagacacggcagagtggtgagagtgcccagagccagaaccgagcccggcggcagccagctggtggagcagttcacccagcaggacctggaggacggcagactgggcctggaggtgggcagacccgagggcagagcccccggccccgccggcgacagcctgaccctggagctgtgggcccagggcgtgccccccgccgtggccagcctggacttcgccaccgagccctacaacgccgccagaccctacagcgtggccctgctgagcgtgcccgaggccgccagaaccgaggccggcaagcccgagagcagcacccccaccggcgagcccggccccatggccagcagccccgagcccgccgtggccaagggcggcttcctgagcttcctggaggccaacatgttcagcgtgatcatccccatgtgcctggtgctgctgctgctggccctgatcctgcccctgctgttctacctgagaaagagaaacaagaccggcaagcacgacgtgcaggtgctgaccgccaagcccagaaacggcctggccggcgacaccgagaccttcagaaaggtggagcccggccaggccatccccctgaccgccgtgcccggccagggccccccccccggcggccagcccgaccccgagctgctgcagttctgcagaacccccaaccccgccctgaagaacggccagtactgggtgtag

SEQ ID NO: 122012 - DNA, 984 bp, Artificial Sequence
  derived and/or modified sequence
gagcagcacagagaggagcccgaggccgcctacagactgatccagggcccccagtacggccacctgctggtgggcggcagacccaccagcgccttcagccagttccagatcgaccagggcgaggtggtgttcgccttcaccaacttcagcagcagccacgaccacttcagagtgctggccctggccagaggcgtgaacgccagcgccgtggtgaacgtgaccgtgagagccctgctgcacgtgtgggccggcggcccctggccccagggcgccaccctgagactggaccccaccgtgctggacgccggcgagctggccaacagaaccggcagcgtgcccagattcagactgctggagggccccagacacggcagagtggtgagagtgcccagagccagaaccgagcccggcggcagccagctggtggagcagttcacccagcaggacctggaggacggcagactgggcctggaggtgggcagacccgagggcagagcccccggccccgccggcgacagcctgaccctggagctgtgggcccagggcgtgccccccgccgtggccagcctggacttcgccaccgagccctacaacgccgccagaccctacagcgtggccctgctgagcgtgcccgaggccgccagaaccgaggccggcaagcccgagagcagcacccccaccggcgagcccggccccatggccagcagccccgagcccgccgtggccaagggcggcttcctgagcttcctggaggccaacatgttcagcgtgatcatccccatgtgcctggtgctgctgctgctggccctgatcctgcccctgctgttctacctgagaaagagaaacaagaccggcaagcacgacgtgcaggtgctgaccgccaagcccagaaacggcctggccggcgacaccgagaccttcagaaaggtggagcccggccaggccatccccctgaccgccgtgcccggccagggccccccctag

SEQ ID NO: 122013 - protein, 141 aa, Artificial Sequence
  derived and/or modified sequence
MAQYLSTLLLLLATLAVALAWSPKEEDRIIPGGIYNADLNDEWVQRALHFAISEYNKATKDDYYRRPLRVLRARQQTVGGVNYFFDVEVGRTICTKSQPNLDTCAFHEQPELQKKQLCSFEIYEVPWENRRSLVKSRCQES

SEQ ID NO: 122014 - DNA, 426 bp, Artificial Sequence
  derived and/or modified sequence
atggctcaatacctctccacactgctgttgcttctcgcaactctcgccgttgccctcgcctggtccccaaaggaggaggacaggattataccgggaggcatctacaatgctgacttgaatgatgaatgggtgcagcgcgcgctgcactttgccatttcagaatataacaaggcaacaaaggacgactattatcggagacccttacgagtgctgagggccaggcaacagactgtaggaggagtcaactacttttttgatgtcgaggtgggtcgaacaatatgtacaaaatcccagcctaatttggatacatgtgcctttcacgaacagcctgagttgcaaaagaagcagctctgttcctttgagatttacgaggtgccttgggagaataggcgcagcctcgtaaaaagcagatgccaagagagttag

SEQ ID NO: 122015 - DNA, 426 bp, Artificial Sequence
  derived and/or modified sequence
atggcccagtacctgagcaccttgttactgctcttggccaccttagctgtggctttagcatggagcccgaaagaggaagatcggattattccaggagggatctacaacgccgaccttaacgatgagtgggtccagcgggcactccattttgcaatctctgagtacaacaaagcaaccaaagatgactattaccggcgccctctgcgggtccttcgcgcccgccagcagaccgtcggcggtgtgaattatttttttgatgtggaggttgggcggacaatctgtacaaagtcacaaccaaatcttgacacttgcgcttttcacgagcagcctgaactgcagaaaaaacaactgtgtagttttgagatatatgaggtgccatgggagaatcgtcgaagtctcgtcaaatccagatgccaggaatcttag

SEQ ID NO: 122016 - DNA, 426 bp, Artificial Sequence
  derived and/or modified sequence
atggcccagtacctgagcaccctgctgctgctgctggccaccctggccgtggccctggcctggagccccaaggaggaggaccgcatcatccctgggggcatctacaatgctgacctgaatgatgagtgggtgcagagggccctgcactttgccatcagcgagtacaacaaggccaccaaggatgactactacagaagacccctgcgggtgctgcgggcccggcagcagacagtgggcggcgtgaactacttctttgatgtggaggtgggccgcaccatctgcaccaagagccagcccaacctggacacctgtgccttccacgagcagcctgagctgcagaagaagcagctgtgcagctttgagatctatgaggtgccctgggagaacagaagaagcctggtgaagagccgctgccaggagagctag

SEQ ID NO: 122017 - DNA, 426 bp, Artificial Sequence
  derived and/or modified sequence
atggcccagtacctgagcaccctgctgctgctgctggccaccctggccgtggcacttgcttggtcacctaaggaggaggatcgtattatccccggaggcatctataatgctgatctgaacgatgagtgggtccagcgtgcgctgcacttcgccatttctgagtacaataaggccactaaagacgattattataggcgaccccttcgggtgctgcgggcacgccagcagactgtgggcggggtgaattactttttcgacgtagaagtgggaagaacaatatgcaccaaaagccagccaaatctcgatacatgcgccttccatgagcagccagaactgcagaaaaagcaactatgcagctttgagatatacgaagtgccatgggaaaaccggcgctccctggtgaaatcgcgatgtcaggaatcctag

SEQ ID NO: 122018 - DNA, 426 bp, Artificial Sequence
  derived and/or modified sequence
atggcccagtacctgagcaccctgctgctgctgctggccaccctggcagtcgcactagcttggtcccctaaggaagaggatcgcatcattcctggaggcatttacaatgctgatctgaatgatgaatgggtacagagggcgctacacttcgctatctcagaatataacaaggccacaaaggacgattactaccggaggcctctaagagttttgagagcgagacaacagactgttggcggcgtgaattacttttttgacgtggaggtgggccgtactatttgtaccaagagccagcctaacttggacacgtgcgcatttcatgaacaacctgagcttcaaaagaagcagctgtgttcttttgagatttacgaagtgccgtgggaaaatcgcaggagccttgtcaagtctcggtgccaggaatcctag

SEQ ID NO: 122019 - DNA, 426 bp, Artificial Sequence
  derived and/or modified sequence
atggcccagtacctgagcaccctgcttttactgctggctactctagcagtcgcactggcctggtctcccaaagaggaggaccggatcatccccggtgggatttataacgccgacctaaacgatgagtgggttcagagggcactccactttgccatctccgagtacaataaagccactaaagatgattattaccgtagacccctaagagttttgcgcgcaagacagcaaactgtcggaggcgtcaattatttcttcgacgtcgaggttggacgcacgatttgcaccaagagccagcctaatctggacacctgcgcgttccacgaacagcccgagctacaaaagaaacaactctgtagtttcgagatctatgaggtgccctgggagaaccgacggtctctcgtgaaatctcggtgccaggaatcatag

SEQ ID NO: 122020 - DNA, 426 bp, Artificial Sequence
  derived and/or modified sequence
atggcccagtacctcagtaccttactgctccttctggccacactggcggtagccctcgcctggagcccaaaagaagaagataggattattcccggaggaatctacaacgccgatttgaatgacgaatgggtacagcgcgcactccatttcgcaatttctgagtacaataaagccaccaaagatgactactatagacgacccctgagggtgctaagggctcgtcagcaaaccgtggggggagtgaattatttctttgatgtggaggttgggcgtactatttgtaccaaatcacaacccaacctcgatacctgcgccttccacgagcaaccagagcttcaaaaaaagcaactctgcagcttcgagatatacgaagtaccatgggaaaataggagatcactggttaaaagtaggtgtcaggagtcttag

SEQ ID NO: 122021 - DNA, 760 bp, Artificial Sequence
  derived and/or modified sequence
gggctccctgcctcgggctctcaccctcctctcctgcagctccagctttgtgctctgcctctgaggagaccatggcccagtatctgagtaccctgctgctcctgctggccaccctagctgtggccctggcctggagccccaaggaggaggataggataatcccgggtggcatctataacgcagacctcaatgatgagtgggtacagcgtgcccttcacttcgccatcagcgagtataacaaggccaccaaagatgactactacagacgtccgctgcgggtactaagagccaggcaacagaccgttgggggggtgaattacttcttcgacgtagaggtgggccgcaccatatgtaccaagtcccagcccaacttggacacctgtgccttccatgaacagccagaactgcagaagaaacagttgtgctctttcgagatctacgaagttccctgggagaacagaaggtccctggtgaaatccaggtgtcaagaatcctagggatctgtgccaggccattcgcaccagccaccacccactcccaccccctgtagtgctcccacccctggactggtggcccccaccctgcgggaggcctccccatgtgcctgcgccaagagacagacagagaaggctgcaggagtcctttgttgctcagcagggcgctctgccctccctccttccttcttgcttctaatagccctggtacatggtacacacccccccacctcctgcaattaaacagtagcatcgcctccctctga

SEQ ID NO: 122022 - DNA, 655 bp, Artificial Sequence
  derived and/or modified sequence
caggaagtcacatagctttcacagtcaaaggaccagtgtcacctctgtggagacctgggtgactcaagcttgggagcactggggaagagaggcatggctcggggaggctgcactccagctttgtgctctgcctctgaggagaccatggcccagtatctgagtaccctgctgctcctgctggccaccctagctgtggccctggcctggagccccaaggaggaggataggataatcccgggtggcatctataacgcagacctcaatgatgagtgggtacagcgtgcccttcacttcgccatcagcgagtataacaaggccaccaaagatgactactacagacgtccgctgcgggtactaagagccaggcaacagaccgttgggggggtgaattacttcttcgacgtagaggtgggccgcaccatatgtaccaagtcccagcccaacttggacacctgtgccttccatgaacagccagaactgcagaagaaacagttgtgctctttcgagatctacgaagttccctgggagaacagaaggtccctggtgaaatccaggtgtcaagaatcctagggatctgtgccaggccattcgcaccagccaccacccactcccaccccctgtagtgctcccacccctggactggtggcccccaccc

SEQ ID NO: 122023 - DNA, 426 bp, Artificial Sequence
  derived and/or modified sequence
atggcccagtacctgagcaccctgctgctgctgctggccaccctggccgtggccctggcctggagccccaaggaggaggacagaatcatccccggcggcatctacaacgccgacctgaacgacgagtgggtgcagagagccctgcacttcgccatcagcgagtacaacaaggccaccaaggacgactactacagaagacccctgagagtgctgagagccagacagcagaccgtgggcggcgtgaactacttcttcgacgtggaggtgggcagaaccatctgcaccaagagccagcccaacctggacacctgcgccttccacgagcagcccgagctgcagaagaagcagctgtgcagcttcgagatctacgaggtgccctgggagaacagaagaagcctggtgaagagcagatgccaggagagctag

SEQ ID NO: 122024 - protein, 14 aa, Artificial Sequence
  derived and/or modified sequence
SSSKEENRIIPGGI

SEQ ID NO: 122025 - protein, 141 aa, Artificial Sequence
  derived and/or modified sequence
MARPLCTLLLLMATLAGALASSSKEENRIIPGGIYDADLNDEWVQRALHFAISEYNKATEDEYYRRPLQVLRAREQTFGGVNYFFDVEVGRTICTKSQPNLDTCAFHEQPELQKKQLCSFEIYEVPWEDRMSLVNSRCQEA

SEQ ID NO: 122026 - DNA, 426 bp, Artificial Sequence
  derived and/or modified sequence
atggcccgccctctgtgcaccctgctcctgctcatggccaccttagcgggagccctagctagctccagcaaggaagagaataggataattcctggcgggatctatgacgccgacctcaacgacgagtgggtacaaagggcactgcatttcgcgatctcagagtataacaaggccacagaagacgagtattatcggaggcccctgcaggtactgcgagctcgggagcagacctttgggggagtgaattactttttcgacgtcgaggttggccgtaccatatgcacaaaatcacagcctaacctggatacatgcgccttccacgagcaaccagagttgcagaaaaaacagctatgttcttttgagatatacgaagtgccctgggaagaccggatgagcttggtaaacagtcggtgtcaggaggcatag

SEQ ID NO: 122027 - DNA, 426 bp, Artificial Sequence
  derived and/or modified sequence
atggcccggcccctgtgcaccctgctgctgctgatggccaccctggccggggccctggccagcagcagcaaggaggagaaccgcatcatccctgggggcatctatgatgctgacctgaatgatgagtgggtgcagagggccctgcactttgccatcagcgagtacaacaaggccacagaagatgagtactacagaagacccctgcaggtgctgcgggcccgggagcagaccttcggcggcgtgaactacttctttgatgtggaggtgggccgcaccatctgcaccaagagccagcccaacctggacacctgtgccttccacgagcagcctgagctgcagaagaagcagctgtgcagctttgagatctatgaggtgccctgggaggacaggatgagcctggtgaacagccgctgccaggaggcctag

SEQ ID NO: 122028 - DNA, 426 bp, Artificial Sequence
  derived and/or modified sequence
atggcccggcccctgtgcaccctgctgctgctgatggccaccctggcaggagcactggcatcttcaagcaaggaggagaaccggatcatccccggcggtatatatgacgctgatctgaacgacgagtgggttcaacgggccctgcactttgccatttctgagtataacaaagctaccgaagacgagtattaccggaggccccttcaggttctgagggcgcgggagcaaacatttggaggggtaaattacttttttgatgtcgaggtgggtagaaccatctgtacaaaatcccaaccgaacctggatacctgtgctttccacgagcagccagagctccagaaaaaacagttatgcagcttcgagatatacgaagtgccctgggaggatcgcatgtccctggtgaactcccgctgtcaggaggcctag

SEQ ID NO: 122029 - DNA, 426 bp, Artificial Sequence
  derived and/or modified sequence
atggcacggccactgtgcaccctgttactcctgatggcgaccctggccggtgccctggctagctccagcaaggaagaaaatcgcattattccagggggaatttatgacgcagatctcaatgacgagtgggtccaacgtgctctccactttgctatctccgagtataataaggccacagaggacgagtattaccgcagaccacttcaggttcttcgcgcacgtgaacaaactttcggcggagtaaattatttttttgacgtggaagtgggacgcacaatttgcacaaagagccaacctaacttggacacctgtgctttccacgagcagccagaactgcagaaaaagcaattgtgtagcttcgagatatatgaagtgccttgggaagacaggatgtcccttgtcaattctagatgccaagaggcttag

SEQ ID NO: 122030 - DNA, 426 bp, Artificial Sequence
  derived and/or modified sequence
atggccagacccctgtgcaccctgctgctgctgatggccaccctggccggcgccctggccagcagcagcaaggaggagaacagaatcatccccggcggcatctacgacgccgacctgaacgacgagtgggtgcagagagccctgcacttcgccatcagcgagtacaacaaggccaccgaggacgagtactacagaagacccctgcaggtgctgagagccagagagcagaccttcggcggcgtgaactacttcttcgacgtggaggtgggcagaaccatctgcaccaagagccagcccaacctggacacctgcgccttccacgagcagcccgagctgcagaagaagcagctgtgcagcttcgagatctacgaggtgccctgggaggacagaatgagcctggtgaacagcagatgccaggaggcctag

SEQ ID NO: 122031 - DNA, 751 bp, Artificial Sequence
  derived and/or modified sequence
gggctccctgcctcgggctctcaccctcctctcctgcagctccagctttgtgctctgcctctgaggagaccatggcccggcctctgtgtaccctgctactcctgatggctaccctggctggggctctggcctcgagctccaaggaggagaataggataatcccaggtggcatctatgatgcagacctcaatgatgagtgggtacagcgtgcccttcacttcgccatcagcgagtacaacaaggccaccgaagatgagtactacagacgcccgctgcaggtgctgcgagccagggagcagacctttgggggggtgaattacttcttcgacgtagaggtgggccgcaccatatgtaccaagtcccagcccaacttggacacctgtgccttccatgaacagccagaactgcagaagaaacagttgtgctctttcgagatctacgaagttccctgggaggacagaatgtccctggtgaattccaggtgtcaagaagcctaggggtctgtgccaggccagtcacaccgaccaccacccactcccacccactgtagtgctcccacccctggactggtggcccccaccctgcgggaggcctccccatgtgcctgtgccaagagacagacagagaaggctgcaggagtcctttgttgctcagcagggcgctctgccctccctccttccttcttgcttctaatagacctggtacatggtacacacacccccacctcctgcaattaaacagtagcatcgcc

SEQ ID NO: 122032 - protein, 142 aa, Artificial Sequence
  derived and/or modified sequence
MMWPMHTPLLLLTALMVAVAGSASAQSRTLAGGIHATDLNDKSVQCALDFAISEYNKVINKDEYYSRPLQVMAAYQQIVGGVNYYFNVKFGRTTCTKSQPNLDNCPFNDQPKLKEEEFCSFQINEVPWEDKISILNYKCRKV

SEQ ID NO: 122033 - DNA, 429 bp, Artificial Sequence
  derived and/or modified sequence
atgatgtggccaatgcatacccccctgctactgcttactgcattgatggtcgccgtcgcgggaagcgcttctgcccaatcccgaaccctggctggcggcatccacgcgaccgatctgaacgataagtcagtgcagtgcgccctggattttgccattagtgaatacaacaaagtcattaacaaggacgaatactactccaggcccctgcaggtaatggcggcgtatcagcagatagtcgggggggtcaactattatttcaatgtcaagtttggtcgcactacttgcacaaaatcccaaccgaacctcgataattgcccgtttaatgatcagcccaaattgaaagaggaggagttttgtagcttccagatcaatgaggttccttgggaggacaaaataagcatcctcaactacaaatgccgcaaggtgtag

SEQ ID NO: 122034 - DNA, 429 bp, Artificial Sequence
  derived and/or modified sequence
atgatgtggcccatgcacacccccctgctgctgctgacagccctgatggtggccgtggccggcagcgccagcgcccagagcaggaccctggccggcggcatccacgccacagacctgaatgacaagtctgtgcagtgtgccctggactttgccatcagcgagtacaacaaggtgatcaacaaggatgagtactacagccggcccctgcaggtgatggccgcctaccagcagatcgtgggcggcgtgaactactacttcaacgtgaagtttggccgcaccacctgcaccaagagccagcccaacctggacaactgccccttcaatgaccagcccaagctgaaggaggaggagttctgcagcttccagatcaatgaggtgccctgggaggacaagatcagcatcctgaactacaagtgcaggaaggtgtag

SEQ ID NO: 122035 - DNA, 429 bp, Artificial Sequence
  derived and/or modified sequence
atgatgtggcccatgcacacccccctgctgctgctgaccgccctgatggtcgcggtggctggcagtgcctccgcccagtcacggaccctggccgggggcattcacgctacagatttgaatgacaagagtgtgcagtgcgcgctggacttcgccattagcgaatataacaaggttattaataaggacgaatactacagccggcctcttcaggtgatggccgcttaccagcagattgttgggggtgtgaactactacttcaatgtcaaatttggaaggacaacctgtaccaagtctcaaccgaacctggataattgtccgtttaatgaccaaccgaagcttaaggaggaggaattctgcagctttcagataaacgaggttccctgggaagacaagatctccattctcaattacaaatgtaggaaggtttag

SEQ ID NO: 122036 - DNA, 429 bp, Artificial Sequence
  derived and/or modified sequence
atgatgtggcccatgcacactccattgttacttctaaccgctctgatggtggcagtggctggctctgcatccgcacagagcaggactctcgccggaggaatacatgcgacagacttaaatgataaaagtgtacaatgtgctctcgatttcgctatcagtgaatacaataaggtgattaataaagacgagtattatagtcggccactccaggtcatggccgcttaccagcagatcgtgggaggggtgaattattattttaacgtaaaattcgggagaacgacctgcaccaaatctcagcctaatttagataattgcccttttaatgaccagccaaaactgaaggaagaggaattctgtagcttccagatcaacgaagtgccttgggaagacaagatcagtattctgaattacaaatgtaggaaggtatag

SEQ ID NO: 122037 - DNA, 756 bp, Artificial Sequence
  derived and/or modified sequence
gggcttcctgcctcagccttctgctgctttgctctctgggagatccagctccttgctctgtgtcccagtagaacatgatgtggcccatgcacaccccactgctgctgctgactgccttgatggtggccgtggccgggagtgcctcggcccaatctaggaccttggcaggtggcatccatgccacagacctcaatgacaagagtgtgcagtgtgccctggactttgccatcagcgagtacaacaaggtcattaataaggatgagtactacagccgccctctgcaggtgatggctgcctaccagcagatcgtgggtggggtgaactactacttcaatgtgaagttcggtcgaaccacatgcaccaagtcccagcccaacttggacaactgtcccttcaatgaccagccaaaactgaaagaggaagagttctgctctttccagatcaatgaagttccctgggaggataaaatttccattctgaactacaagtgccggaaagtctaggggtctgtgcaaggcctgtcacactgaccacctcctactcccaccccctgtagtgctcccacccctggactggtggcccccaccctgggggaggtctcctcatgcgcctgcaccaggagacagacacagaaggtggcaggaggcctttgttgctcagcaggaggctctgcccttgctccttccttcttgcttctcatagccccagtgtgcagtgcacactctcccacctcctgcaattaaacagtagcattgc

SEQ ID NO: 122038 - DNA, 429 bp, Artificial Sequence
  derived and/or modified sequence
atgatgtggcccatgcacacccccctgctgctgctgaccgccctgatggtggccgtggccggcagcgccagcgcccagagcagaaccctggccggcggcatccacgccaccgacctgaacgacaagagcgtgcagtgcgccctggacttcgccatcagcgagtacaacaaggtgatcaacaaggacgagtactacagcagacccctgcaggtgatggccgcctaccagcagatcgtgggcggcgtgaactactacttcaacgtgaagttcggcagaaccacctgcaccaagagccagcccaacctggacaactgccccttcaacgaccagcccaagctgaaggaggaggagttctgcagcttccagatcaacgaggtgccctgggaggacaagatcagcatcctgaactacaagtgcagaaaggtgtag

SEQ ID NO: 122039 - protein, 349 aa, Artificial Sequence
  derived and/or modified sequence
MTAASMGPVRVAFVVLLALCSRPAVGQNCSGPCRCPDEPAPRCPAGVSLVLDGCGCCRVCAKQLGELCTERDPCDPHKGLFCHFGSPANRKIGVCTAKDGAPCIFGGTVYRSGESFQSSCKYQCTCLDGAVGCMPLCSMDVRLPSPDCPFPRRVKLPGKCCEEWVCDEPKDQTVVGPALAAYRLEDTFGPDPTMIRANCLVQTTEWSACSKTCGMGISTRVTNDNASCRLEKQSRLCMVRPCEADLEENIKKGKKCIRTPKISKPIKFELSGCTSMKTYRAKFCGVCTDGRCCTPHRTTTLPVEFKCPDGEVMKKNMMFIKTCACHYNCPGDNDIFESLYYRKMYGDMA

SEQ ID NO: 122040 - DNA, 1050 bp, Artificial Sequence
  derived and/or modified sequence
atgaccgccgccagcatgggccccgtgagagtggccttcgtggtgctgctggccctgtgcagcagacccgccgtgggccagaactgcagcggcccctgcagatgccccgacgagcccgcccccagatgccccgccggcgtgagcctggtgctggacggctgcggctgctgcagagtgtgcgccaagcagctgggcgagctgtgcaccgagagagacccctgcgacccccacaagggcctgttctgccacttcggcagccccgccaacagaaagatcggcgtgtgcaccgccaaggacggcgccccctgcatcttcggcggcaccgtgtacagaagcggcgagagcttccagagcagctgcaagtaccagtgcacctgcctggacggcgccgtgggctgcatgcccctgtgcagcatggacgtgagactgcccagccccgactgccccttccccagaagagtgaagctgcccggcaagtgctgcgaggagtgggtgtgcgacgagcccaaggaccagaccgtggtgggccccgccctggccgcctacagactggaggacaccttcggccccgaccccaccatgatcagagccaactgcctggtgcagaccaccgagtggagcgcctgcagcaagacctgcggcatgggcatcagcaccagagtgaccaacgacaacgccagctgcagactggagaagcagagcagactgtgcatggtgagaccctgcgaggccgacctggaggagaacatcaagaagggcaagaagtgcatcagaacccccaagatcagcaagcccatcaagttcgagctgagcggctgcaccagcatgaagacctacagagccaagttctgcggcgtgtgcaccgacggcagatgctgcaccccccacagaaccaccaccctgcccgtggagttcaagtgccccgacggcgaggtgatgaagaagaacatgatgttcatcaagacctgcgcctgccactacaactgccccggcgacaacgacatcttcgagagcctgtactacagaaagatgtacggcgacatggcctag

SEQ ID NO: 122041 - DNA, 2339 bp, Artificial Sequence
  derived and/or modified sequence
cacacaacaactcttccccgctgagaggagacagccagtgcgactccaccctccagctcgacggcagccgccccggccgacagccccgagacgacagcccggcgcgtcccggtccccacctccgaccaccgccagcgctccaggccccgccgctccccgctcgccgccaccgcgccctccgctccgcccgcagtgccaaccatgaccgccgccagtatgggccccgtccgcgtcgccttcgtggtcctcctcgccctctgcagccggccggccgtcggccagaactgcagcgggccgtgccggtgcccggacgagccggcgccgcgctgcccggcgggcgtgagcctcgtgctggacggctgcggctgctgccgcgtctgcgccaagcagctgggcgagctgtgcaccgagcgcgacccatgcgacccgcacaagggcctattctgtcacttcggctccccggccaaccgcaagatcggcgtgtgcaccgccaaagatggtgctccctgcatcttcggtggtacggtgtaccgcagcggagagtccttccagagcagctgcaagtaccagtgcacgtgcctggacggggcggtgggctgcatgcccctgtgcagcatggacgttcgtctgcccagccctgactgccccttcccgaggagggtcaagctgcccgggaaatgctgcgaggagtgggtgtgtgacgagcccaaggaccaaaccgtggttgggcctgccctcgcggcttaccgactggaagacacgtttggcccagacccaactatgattagagccaactgcctggtccagaccacagagtggagcgcctgttccaagacctgtgggatgggcatctccacccgggttaccaatgacaacgcctcctgcaggctagagaagcagagccgcctgtgcatggtcaggccttgcgaagctgacctggaagagaacattaagaagggcaaaaagtgcatccgtactcccaaaatctccaagcctatcaagtttgagctttctggctgcaccagcatgaagacataccgagctaaattctgtggagtatgtaccgacggccgatgctgcaccccccacagaaccaccaccctgccggtggagttcaagtgccctgacggcgaggtcatgaagaagaacatgatgttcatcaagacctgtgcctgccattacaactgtcccggagacaatgacatctttgaatcgctgtactacaggaagatgtacggagacatggcatgaagccagagagtgagagacattaactcattagactggaacttgaactgattcacatctcatttttccgtaaaaatgatttcagtagcacaagttatttaaatctgtttttctaactgggggaaaagattcccacccaattcaaaacattgtgccatgtcaaacaaatagtctatcaaccccagacactggtttgaagaatgttaagacttgacagtggaactacattagtacacagcaccagaatgtatattaaggtgtggctttaggagcagtgggagggtaccagcagaaaggttagtatcatcagatagcatcttatacgagtaatatgcctgctatttgaagtgtaattgagaaggaaaattttagcgtgctcactgacctgcctgtagccccagtgacagctaggatgtgcattctccagccatcaagagactgagtcaagttgttccttaagtcagaacagcagactcagctctgacattctgattcgaatgacactgttcaggaatcggaatcctgtcgattagactggacagcttgtggcaagtgaatttgcctgtaacaagccagattttttaaaatttatattgtaaatattgtgtgtgtgtgtgtgtgtgtatatatatatatatgtacagttatctaagttaatttaaagttgtttgtgcctttttatttttgtttttaatgctttgatatttcaatgttagcctcaatttctgaacaccataggtagaatgtaaagcttgtctgatcgttcaaagcatgaaatggatacttatatggaaattctgctcagatagaatgacagtccgtcaaaacagattgtttgcaaaggggaggcatcagtgtccttggcaggctgatttctaggtaggaaatgtggtagcctcacttttaatgaacaaatggcctttattaaaaactgagtgactctatatagctgatcagttttttcacctggaagcatttgtttctactttgatatgactgtttttcggacagtttatttgttgagagtgtgaccaaaagttacatgtttgcacctttctagttgaaaataaagtgtatattttttctataaa

SEQ ID NO: 122042 - DNA, 1050 bp, Artificial Sequence
  derived and/or modified sequence
atgacagcggcctccatggggcccgttagagtggccttcgttgtgctgttagcactgtgcagtaggcccgccgtgggtcagaattgtagcggtccctgccgatgtcctgacgagcctgcaccacgctgccccgcaggagtgagcctcgtgctggatgggtgcggctgctgccgggtctgcgctaaacagctgggcgagctatgcaccgaacgcgacccttgcgacccacacaaggggcttttttgccattttggttctccggccaatcggaagatcggcgtgtgcaccgccaaagatggggccccctgtatttttgggggcacggtgtaccgctctggagaatccttccagtcctcatgtaagtatcagtgtacgtgtttggatggcgcagttgggtgcatgcccttgtgctccatggatgttcgcctcccgagcccagattgtccctttcccaggcgcgtcaaactccccggcaagtgttgtgaagaatgggtctgtgatgagccaaaagatcagacagtcgtcgggcctgcactcgccgcctaccgtctggaggacacgtttggaccagatcctactatgattcgcgccaactgtctggtccagaccacagagtggtctgcatgtagcaaaacctgtggaatgggtataagtaccagagttactaacgataatgccagttgtaggctggagaagcaatctcgcctctgcatggtgcgaccatgtgaagccgacttagaagaaaacatcaagaaggggaaaaaatgtatccggactcctaagatttccaaacccattaaattcgagctgagtggctgcacatccatgaaaacgtaccgggccaagttttgtggcgtgtgcacagacggtagatgttgcactccccacaggacaacaactctgccggttgagtttaagtgccctgacggcgaagtgatgaagaagaacatgatgtttatcaagacctgtgcatgccactataactgccctggagacaacgacatatttgagagtctgtactaccgcaagatgtatggagatatggcctag

SEQ ID NO: 122043 - DNA, 1050 bp, Artificial Sequence
  derived and/or modified sequence
atgacagctgcctccatgggccctgtgcgggtggcctttgtggtgctgctggccctgtgcagcaggcctgctgtgggccagaactgcagcggcccctgccgctgcccagatgagcccgccccccgctgcccagctggggtgtccctggtgctggatggctgcggctgctgccgggtgtgtgccaagcagctgggggagctgtgcacagagcgggacccctgtgacccccacaagggcctcttctgccacttcggcagccctgccaacaggaagattggagtgtgcacagccaaggatggagccccctgcatctttggaggcaccgtgtaccgcagcggggagagcttccagagcagctgcaagtaccagtgcacctgcctggatggagctgtgggctgcatgcccctgtgcagcatggatgtgcggctgcccagcccagactgccccttcccccggcgggtgaagctgcccgggaagtgctgtgaggagtgggtgtgtgatgagcccaaggaccagacagtggtgggccctgccctggccgcctaccgcctggaggacaccttcggccctgaccccaccatgatccgggccaactgcctggtgcagaccacagagtggagcgcctgcagcaagacctgtggcatgggcatcagcaccagggtgaccaatgacaatgccagctgccgcctggagaagcagagccggctgtgcatggtgcggccctgtgaggccgacctggaggagaacatcaagaagggcaagaagtgcatccgcacccccaagatcagcaagcccatcaagtttgagctgagcggctgcacctccatgaagacctaccgggccaagttctgtggggtgtgcacagatggccgctgctgcaccccccacaggaccaccaccctgcctgtggagttcaagtgcccagatggagaggtgatgaagaagaacatgatgttcatcaagacctgtgcctgccactacaactgccctggggacaatgacatctttgagagcctgtactacaggaagatgtatggagacatggcctag

SEQ ID NO: 122044 - DNA, 1050 bp, Artificial Sequence
  derived and/or modified sequence
atgaccgccgccagcatgggccccgtgcgggtggccttcgtggtgctactggccttgtgttcccgccccgcagtgggacaaaattgtagtggcccctgcagatgtccagatgaacccgcacctcgttgtcccgccggcgtctctctcgttctggacggctgcgggtgctgcagggtgtgtgccaaacagctgggagagctgtgcactgagcgggatccatgcgatccccacaaagggcttttttgccactttggcagccccgccaaccgtaagattggcgtctgcaccgccaaggacggggctccgtgcatcttcggaggaaccgtttaccgcagcggagaaagttttcagagcagctgcaagtatcaatgcacatgtctcgatggggcagtcggatgcatgcctctgtgttctatggacgtaaggcttccaagccctgactgcccatttcctaggagagtcaagttgcccgggaaatgctgcgaggagtgggtatgcgacgaaccaaaggatcaaactgtggtgggacccgctctcgccgcttaccgactcgaagacacctttgggcctgatcctactatgatccgcgcaaattgcttggttcagacgaccgagtggtccgcgtgctctaaaacttgtggcatgggaatttccacacgggtgactaacgacaatgcctcctgcagactggaaaagcagagcagactgtgtatggtgcgcccttgtgaagcggacctcgaagagaatatcaaaaaggggaaaaagtgtatccgaacacccaaaatcagcaagcccatcaagttcgagctcagcggatgcacaagcatgaaaacttatagggcgaaattctgtggggtgtgcaccgacggcagatgttgtactccccatcgcactaccactctcccagttgaatttaaatgcccagatggtgaggtgatgaaaaagaacatgatgtttataaagacttgcgcctgccactataactgtccaggggacaacgacatttttgaatccctgtattaccgcaagatgtatggcgatatggcatag

SEQ ID NO: 122045 - DNA, 1050 bp, Artificial Sequence
  derived and/or modified sequence
atgacagcagcttctatggggccagtgcgagttgcttttgtggtcctactcgccctctgtagtaggcccgctgtggggcagaactgcagtgggccttgtaggtgccccgatgaacccgcaccacgctgcccagccggtgtgagtttagtactcgatgggtgcgggtgctgccgggtttgtgcgaaacagctgggggaactgtgcacggagcgagacccatgcgatccccacaaaggacttttctgccacttcggctctcctgctaatcgaaagattggcgtgtgtacggccaaggacggagccccatgtatattcggcggaacagtgtaccggtctggagaatcatttcaatcatcttgtaaatatcagtgtacatgccttgatggtgccgtgggttgtatgccattgtgtagtatggatgtccgcctgccgtccccagactgtcctttccctaggcgcgtgaaacttcctgggaaatgttgcgaggagtgggtgtgcgatgagcctaaggatcaaactgtggtggggcctgcactggccgcatacagactggaagacacctttgggcctgaccctaccatgatcagagccaactgtttagttcagacaactgaatggagcgcctgttccaagacatgcggaatgggcattagtactagggtgaccaacgacaatgcttcctgccggttagaaaaacagtccagactgtgtatggtcagaccgtgcgaagccgatctagaggaaaacattaagaaaggcaagaaatgtatccgtaccccgaagatcagcaaaccaatcaagtttgaactgtccggatgtacttcaatgaaaacatatagggccaaattctgtggcgtatgcacagatgggaggtgttgcaccccccacaggaccaccaccctgcccgtcgagtttaagtgtcctgacggcgaggtgatgaagaagaacatgatgttcattaaaacatgtgcctgtcactacaactgtccaggggataatgacatttttgaaagcctgtattatagaaagatgtatggcgatatggcctag

SEQ ID NO: 122046 - protein, 906 aa, Artificial Sequence
  derived and/or modified sequence
MTAVHAGNINFKWDPKSLEIRTLAVERLLEPLVTQVTTLVNTNSKGPSNKKRGRSKKAHVLAASVEQATENFLEKGDKIAKESQFLKEELVAAVEDVRKQGDLMKAAAGEFADDPCSSVKRGNMVRAARALLSAVTRLLILADMADVYKLLVQLKVVEDGILKLRNAGNEQDLGIQYKALKPEVDKLNIMAAKRQQELKDVGHRDQMAAARGILQKNVPILYTASQACLQHPDVAAYKANRDLIYKQLQQAVTGISNAAQATASDDASQHQGGGGGELAYALNNFDKQIIVDPLSFSEERFRPSLEERLESIISGAALMADSSCTRDDRRERIVAECNAVRQALQDLLSEYMGNAGRKERSDALNSAIDKMTKKTRDLRRQLRKAVMDHVSDSFLETNVPLLVLIEAAKNGNEKEVKEYAQVFREHANKLIEVANLACSISNNEEGVKLVRMSASQLEALCPQVINAALALAAKPQSKLAQENMDLFKEQWEKQVRVLTDAVDDITSIDDFLAVSENHILEDVNKCVIALQEKDVDGLDRTAGAIRGRAARVIHVVTSEMDNYEPGVYTEKVLEATKLLSNTVMPRFTEQVEAAVEALSSDPAQPMDENEFIDASRLVYDGIRDIRKAVLMIRTPEELDDSDFETEDFDVRSRTSVQTEDDQLIAGQSARAIMAQLPQEQKAKIAEQVASFQEEKSKLDAEVSKWDDSGNDIIVLAKQMCMIMMEMTDFTRGKGPLKNTSDVISAAKKIAEAGSRMDKLGRTIADHCPDSACKQDLLAYLQRIALYCHQLNICSKVKAEVQNLGGELVVSGVDSAMSLIQAAKNLMNAVVQTVKASYVASTKYQKSQGMASLNLPAVSWKMKAPEKKPLVKREKQDETQTKIKRASQKKHVNPVQALSEFKAMDSI

SEQ ID NO: 122047 - protein, 803 aa, Artificial Sequence
  derived and/or modified sequence
MKAAAGEFADDPCSSVKRGNMVRAARALLSAVTRLLILADMADVYKLLVQLKVVEDGILKLRNAGNEQDLGIQYKALKPEVDKLNIMAAKRQQELKDVGHRDQMAAARGILQKNVPILYTASQACLQHPDVAAYKANRDLIYKQLQQAVTGISNAAQATASDDASQHQGGGGGELAYALNNFDKQIIVDPLSFSEERFRPSLEERLESIISGAALMADSSCTRDDRRERIVAECNAVRQALQDLLSEYMGNAGRKERSDALNSAIDKMTKKTRDLRRQLRKAVMDHVSDSFLETNVPLLVLIEAAKNGNEKEVKEYAQVFREHANKLIEVANLACSISNNEEGVKLVRMSASQLEALCPQVINAALALAAKPQSKLAQENMDLFKEQWEKQVRVLTDAVDDITSIDDFLAVSENHILEDVNKCVIALQEKDVDGLDRTAGAIRGRAARVIHVVTSEMDNYEPGVYTEKVLEATKLLSNTVMPRFTEQVEAAVEALSSDPAQPMDENEFIDASRLVYDGIRDIRKAVLMIRTPEELDDSDFETEDFDVRSRTSVQTEDDQLIAGQSARAIMAQLPQEQKAKIAEQVASFQEEKSKLDAEVSKWDDSGNDIIVLAKQMCMIMMEMTDFTRGKGPLKNTSDVISAAKKIAEAGSRMDKLGRTIADHCPDSACKQDLLAYLQRIALYCHQLNICSKVKAEVQNLGGELVVSGVDSAMSLIQAAKNLMNAVVQTVKASYVASTKYQKSQGMASLNLPAVSWKMKAPEKKPLVKREKQDETQTKIKRASQKKHVNPVQALSEFKAMDSI

SEQ ID NO: 122048 - protein, 118 aa, Artificial Sequence
  derived and/or modified sequence
MTAVHAGNINFKWDPKSLEIRTLAVERLLEPLVTQVTTLVNTNSKGPSNKKRGRSKKAHVLAASVEQATENFLEKGDKIAKESQFLKEELVAAVEDVRKQGDLMKAAAGEFADDPCSS

SEQ ID NO: 122049 - protein, 139 aa, Artificial Sequence
  derived and/or modified sequence
MTAVHAGNINFKWDPKSLEIRTLAVERLLEPLVTQVTTLVNTNSKGPSNKKRGRSKKAHVLAASVEQATENFLEKGDKIAKESQFLKEELVAAVEDVRKQGDLMKAAAGEFADDPCSSVKRGNMVRAARALLSAVTRLL

SEQ ID NO: 122050 - protein, 215 aa, Artificial Sequence
  derived and/or modified sequence
MTAVHAGNINFKWDPKSLEIRTLAVERLLEPLVTQVTTLVNTNSKGPSNKKRGRSKKAHVLAASVEQATENFLEKGDKIAKESQFLKEELVAAVEDVRKQGDLMKAAAGEFADDPCSSVKRGNMVRAARALLSAVTRLLILADMADVYKLLVQLKVVEDGILKLRNAGNEQDLGIQYKALKPEVDKLNIMAAKRQQELKDVGHRDQMAAARGILQ

SEQ ID NO: 122051 - protein, 101 aa, Artificial Sequence
  derived and/or modified sequence
MTAVHAGNINFKWDPKSLEIRTLAVERLLEPLVTQVTTLVNTNSKGPSNKKRGRSKKAHVLAASVEQATENFLEKGDKIAKESQFLKEELVAAVEDVRKQG

SEQ ID NO: 122052 - protein, 123 aa, Artificial Sequence
  derived and/or modified sequence
MTAVHAGNINFKWDPKSLEIRTLAVERLLEPLVTQVTTLVNTNSKGPSNKKRGRSKKAHVLAASVEQATENFLEKGDKIAKESQFLKEELVAAVEDVRKQGDLMKAAAGEFADDPCSSVKRGN

SEQ ID NO: 122053 - protein, 156 aa, Artificial Sequence
  derived and/or modified sequence
MTAVHAGNINFKWDPKSLEIRTLAVERLLEPLVTQVTTLVNTNSKGPSNKKRGRSKKAHVLAASVEQATENFLEKGDKIAKESQFLKEELVAAVEDVRKQGDLMKAAAGEFADDPCSSVKRGNMVRAARALLSAVTRLLILADMADVYKLLVQLKV

SEQ ID NO: 122054 - protein, 94 aa, Artificial Sequence
  derived and/or modified sequence
MTAVHAGNINFKWDPKSLEIRTLAVERLLEPLVTQVTTLVNTNSKGPSNKKRGRSKKAHVLAASVEQATENFLEKGDKIAKESQFLKEELVAAV

SEQ ID NO: 122055 - protein, 929 aa, Artificial Sequence
  derived and/or modified sequence
MTAVHAGNINFKWDPKSLEIRTLAVERLLEPLVTQVTTLVNTNSKGPSNKKRGRSKKAHVLAASVEQATENFLEKGDKIAKESQFLKEELVAAVEDVRKQGDLMKAAAGEFADDPCSSVKRGNMVRAARALLSAVTRLLILADMADVYKLLVQLKVVEDGILKLRNAGNEQDLGIQYKALKPEVDKLNIMAAKRQQELKDVGHRDQMAAARGILQKNVPILYTASQACLQHPDVAAYKANRDLIYKQLQQAVTGISNAAQATASDDASQHQGGGGGELAYALNNFDKQIIVDPLSFSEERFRPSLEERLESIISGAALMADSSCTRDDRRERIVAECNAVRQALQDLLSEYMGNAGRKERSDALNSAIDKMTKKTRDLRRQLRKAVMDHVSDSFLETNVPLLVLIEAAKNGNEKEVKEYAQVFREHANKLIEVANLACSISNNEEGVKLVRMSASQLEALCPQVINAALALAAKPQSKLAQENMDLFKEQWEKQVRVLTDAVDDITSIDDFLAVSENHILEDVNKCVIALQEKDVDGLDRTAGAIRGRAARVIHVVTSEMDNYEPGVYTEKVLEATKLLSNTVMPRFTEQVEAAVEALSSDPAQPMDENEFIDASRLVYDGIRDIRKAVLMIRTPEELDDSDFETEDFDVRSRTSVQTEDDQLIAGQSARAIMAQLPQEQKAKIAEQVASFQEEKSKLDAEVSKWDDSGNDIIVLAKQMCMIMMEMTDFTRGKGPLKNTSDVISAAKKIAEAGSRMDKLGRTIADHCPDSACKQDLLAYLQRIALYCHQLNICSKVKAEVQNLGGELVVSGNCDTCGALQGLKGWPPPLCATHWVDSAMSLIQAAKNLMNAVVQTVKASYVASTKYQKSQGMASLNLPAVSWKMKAPEKKPLVKREKQDETQTKIKRASQKKHVNPVQALSEFKAMDSI

SEQ ID NO: 122056 - protein, 536 aa, Artificial Sequence
  derived and/or modified sequence
MTKKTRDLRRQLRKAVMDHVSDSFLETNVPLLVLIEAAKNGNEKEVKEYAQVFREHANKLIEVANLACSISNNEEGVKLVRMSASQLEALCPQVINAALALAAKPQSKLAQENMDLFKEQWEKQVRVLTDAVDDITSIDDFLAVSENHILEDVNKCVIALQEKDVDGLDRTAGAIRGRAARVIHVVTSEMDNYEPGVYTEKVLEATKLLSNTVMPRFTEQVEAAVEALSSDPAQPMDENEFIDASRLVYDGIRDIRKAVLMIRTPEELDDSDFETEDFDVRSRTSVQTEDDQLIAGQSARAIMAQLPQEQKAKIAEQVASFQEEKSKLDAEVSKWDDSGNDIIVLAKQMCMIMMEMTDFTRGKGPLKNTSDVISAAKKIAEAGSRMDKLGRTIADHCPDSACKQDLLAYLQRIALYCHQLNICSKVKAEVQNLGGELVVSGVDSAMSLIQAAKNLMNAVVQTVKASYVASTKYQKSQGMASLNLPAVSWKMKAPEKKPLVKREKQDETQTKIKRASQKKHVNPVQALSEFKAMDSI

SEQ ID NO: 122057 - protein, 891 aa, Artificial Sequence
  derived and/or modified sequence
MTAVHAGNINFKWDPKSLEIRTLAVERLLEPLVTQVTTLVNTNSKGPSNKKRGRSKKAHVLAASVEQATENFLEKGDKIAKESQFLKEELVAAVEDVRKQGDLMKAAAGEFADDPCSSVKRGNMVRAARALLSAVTRLLKVVEDGILKLRNAGNEQDLGIQYKALKPEVDKLNIMAAKRQQELKDVGHRDQMAAARGILQKNVPILYTASQACLQHPDVAAYKANRDLIYKQLQQAVTGISNAAQATASDDASQHQGGGGGELAYALNNFDKQIIVDPLSFSEERFRPSLEERLESIISGAALMADSSCTRDDRRERIVAECNAVRQALQDLLSEYMGNAGRKERSDALNSAIDKMTKKTRDLRRQLRKAVMDHVSDSFLETNVPLLVLIEAAKNGNEKEVKEYAQVFREHANKLIEVANLACSISNNEEGVKLVRMSASQLEALCPQVINAALALAAKPQSKLAQENMDLFKEQWEKQVRVLTDAVDDITSIDDFLAVSENHILEDVNKCVIALQEKDVDGLDRTAGAIRGRAARVIHVVTSEMDNYEPGVYTEKVLEATKLLSNTVMPRFTEQVEAAVEALSSDPAQPMDENEFIDASRLVYDGIRDIRKAVLMIRTPEELDDSDFETEDFDVRSRTSVQTEDDQLIAGQSARAIMAQLPQEQKAKIAEQVASFQEEKSKLDAEVSKWDDSGNDIIVLAKQMCMIMMEMTDFTRGKGPLKNTSDVISAAKKIAEAGSRMDKLGRTIADHCPDSACKQDLLAYLQRIALYCHQLNICSKVKAEVQNLGGELVVSGVDSAMSLIQAAKNLMNAVVQTVKASYVASTKYQKSQGMASLNLPAVSWKMKAPEKKPLVKREKQDETQTKIKRASQKKHVNPVQALSEFKAMDSI

SEQ ID NO: 122058 - DNA, 2721 bp, Artificial Sequence
  derived and/or modified sequence
atgactgccgtgcacgctgggaacattaacttcaaatgggatccaaagtctcttgagattcgcacactcgcagttgaacgtttgttggagccgctggtgactcaggtgactactctggtaaataccaactctaagggaccatcaaataaaaaaaggggccggtccaagaaggcacatgtgctggccgcgagtgtggagcaggccactgagaacttcttagagaagggcgacaaaattgccaaagagagtcagttcctgaaagaggagctggtcgccgccgtggaagacgtccgcaaacagggagacctcatgaaggccgcggcgggcgaattcgccgacgatccttgtagttccgtaaagcgggggaatatggtgcgggccgcaagggcacttctctctgccgtcacacggttgttaatcctggctgatatggcggacgtgtacaagttactggtccagttaaaagtggtcgaggatgggatcttgaaacttcggaacgctggcaatgagcaagaccttggtattcaatataaggctctcaagccagaagtagacaaattaaacatcatggccgcgaaaaggcagcaggagctgaaggacgttggacatcgcgatcaaatggctgcagctcgcggtattttgcaaaagaatgtacctatattgtacactgcttcccaggcctgcttacagcatccggatgtcgcagcctataaggctaaccgcgatttaatctacaagcaactacagcaggccgtcacgggaatcagtaacgcagcacaggccacggctagtgacgacgcctcgcaacaccagggagggggaggcggtgagttggcctacgctctgaacaactttgataagcagatcatcgtcgacccactgtccttttcagaggagcgcttccggccatctctggaagagcgtctggagagcatcatttctggggctgccctgatggcggactccagttgcactagggatgataggcgggagaggattgtggccgaatgcaacgctgtcaggcaagccctccaggacttgctttcggagtacatgggaaatgcaggacgcaaagaacggtctgacgcacttaacagtgccattgataaaatgaccaaaaaaaccagagacttgagacggcagttaagaaaggcagttatggaccacgtgtccgatagttttcttgaaacaaatgtgcctctgcttgtacttattgaggcagccaaaaacggaaacgaaaaagaagttaaggagtatgctcaggtgttccgggagcacgccaataaacttatcgaggtggccaaccttgcctgtagcatctccaacaatgaagagggagtgaagctagttaggatgtctgcctcgcagcttgaagcactatgccctcaagtcatcaatgctgccctggctctcgccgccaagccacagtccaagctggctcaagagaatatggacttgttcaaggagcagtgggaaaagcaggtccgtgtcctgaccgatgccgtggacgacattacaagtatagacgatttcctggctgttagcgagaatcatattctcgaggatgtgaataaatgtgtcatcgccctccaggagaaagatgtggacggcctggataggacggccggcgccataagggggagagccgcgcgggtaatccacgtagtgacttccgagatggacaactacgaacctggggtgtataccgagaaagtccttgaagcgacgaaactgttgagtaatactgtcatgcctaggtttactgagcaggtggaggctgccgtggaagccctgtcttctgatcccgcgcagccaatggatgagaatgagtttatcgacgctagccggcttgtctatgacggcatacgagacatacgcaaggctgttctgatgatccgaactcccgaggaactagatgattccgactttgaaacagaggacttcgatgttagatctcggacgtctgttcagaccgaagatgaccagttgatagctggccagtccgccagggcaattatggcccagctgcctcaggagcaaaaggccaagattgccgaacaagtggcatcattccaggaggagaagagtaaactagatgcagaggtcagtaagtgggacgactcagggaacgatatcattgtgctcgcaaaacaaatgtgcatgattatgatggaaatgacagatttcactagaggcaagggccctctgaagaataccagcgatgtgatatctgccgctaagaaaatcgccgaagctggcagtaggatggataagctggggcgaacaatcgctgatcactgccctgactccgcctgcaaacaggatctcctggcttatcttcaaaggatcgctctgtattgccaccagctgaatatttgcagcaaggtgaaagccgaagtgcagaatctcggcggcgagctggttgtgtccggcgtagactctgcgatgtctctcattcaagccgctaagaacttaatgaatgccgtggtgcaaacagtcaaggcctcatatgtcgcaagcaccaagtatcagaagtcacagggaatggcttccctcaatctccccgctgtgtcgtggaagatgaaggcccccgaaaagaaaccattggtgaaaagggagaaacaggatgaaacgcagacaaagatcaagagagccagccaaaaaaagcacgtcaatcctgtccaggcactgtctgaatttaaggcaatggatagcatctag

SEQ ID NO: 122059 - DNA, 2412 bp, Artificial Sequence
  derived and/or modified sequence
atgaaggccgcagcaggtgaatttgcagacgacccctgttcttccgtgaagaggggcaatatggtgcgagcagcaagggctctgctttcagccgtcacacgactgctgatcctggccgatatggctgacgtgtataagctcttagtgcaactcaaagtggttgaagacggtatactgaaattaagaaatgccgggaacgagcaagacttgggcatccaatacaaagcactgaaacctgaagttgataaactgaacattatggccgccaaacgacagcaagagctgaaagacgtgggacacagggaccagatggcagccgcaagaggcattctgcaaaaaaatgttccaatcctgtacaccgcctcccaggcgtgtttgcagcaccccgatgttgctgcttacaaggccaacagggatttgatctataaacaactgcagcaagccgtgaccgggatttctaatgcagctcaagcaaccgccagcgacgatgcgtcgcagcaccagggtggtggggggggcgaactggcgtatgcactcaataacttcgacaagcaaatcatagtcgatccactgagcttcagcgaggagagattccgcccatccctcgaagagcggctggagtcgattatttcaggggcagctctgatggccgattctagctgtacaagggacgaccgccgtgagcggattgttgcagagtgcaacgcagtgcgccaggctctgcaggatctcctgtctgagtatatgggaaacgctggtaggaaagagcgctccgacgccctgaactcggccatagacaagatgaccaaaaagacacgcgatttacggcggcagcttcgcaaggcggtaatggaccacgtaagcgatagcttcctggagaccaatgtgcctctgctggtcctgattgaagcggctaaaaatggcaatgaaaaggaggttaaggaatatgcgcaggtgtttcgcgaacatgctaacaagctcatcgaggtggcgaacttggcttgttccatttccaacaatgaagagggggttaagctggtgagaatgtctgctagtcagctcgaggccctgtgtcctcaggtcattaacgctgcacttgctctcgccgccaagccacagtctaaactcgcccaggaaaatatggatctcttcaaggagcagtgggagaagcaggtgcgagtgctcacagacgccgtggatgatattacttccatcgatgatttcttggctgtatccgagaaccatatcctggaggatgtaaataagtgcgttatagcactgcaagagaaggacgttgacggtctggaccggacagccggagcaattaggggccgagccgccagggtgatacacgtcgttacttctgagatggacaactatgagccaggggtctacactgagaaggtgctagaggccacgaaacttctgagtaatactgtaatgccccgattcacagagcaggtcgaagcggctgtagaggccctcagttctgatcccgcacagcccatggatgaaaatgagtttatcgacgcaagtagactggtgtacgatggcatccgagatatccgtaaagcagtattgatgatccgaactcctgaggaactggatgattccgattttgaaacggaagactttgatgtccggtccagaaccagtgtgcagactgaagatgaccagctgattgcgggacagagcgcaagagcaatcatggcccagctcccacaggagcaaaaggctaagattgcagagcaagttgcctcatttcaggaagaaaagagtaaactcgacgcagaagtctccaaatgggatgactcgggaaacgatatcatcgtccttgccaaacaaatgtgcatgattatgatggaaatgactgattttacccgaggcaagggtcctctcaaaaacacctcagatgtaatttctgctgctaagaagatcgcagaggctggaagtagaatggataaacttggacgcaccatcgcagaccactgccctgacagtgcttgcaaacaggatttattggcctacctgcagcgcatagcactgtattgtcaccagctgaacatttgcagcaaggtcaaggcagaagtgcaaaacctcggaggagaattggtagtctccggcgttgatagcgccatgagtctgatacaagccgccaagaacctgatgaatgctgtcgtccagactgtgaaggcgagctacgtcgcctccactaaataccagaaatctcaggggatggcttcactgaacctcccagcagttagctggaaaatgaaggcccccgaaaagaaacccctcgtgaaacgcgagaaacaggacgagactcagacgaagatcaagcgcgcctctcagaagaaacacgtaaatccagtccaggcactctctgagttcaaggctatggatagcatctag

SEQ ID NO: 122060 - DNA, 2790 bp, Artificial Sequence
  derived and/or modified sequence
atgaccgcagtgcacgctggaaacatcaactttaaatgggacccaaagtcccttgagatccggacactggcggtagaacgtcttttggagcccctggttacccaggtgacgaccctggtcaataccaacagtaaaggaccgtccaataaaaaaagaggacgaagtaaaaaggctcacgtcttggccgcttctgtggagcaggctacagagaactttctggagaagggggacaagatagctaaggagagtcagttcctgaaagaagagctggtggcagctgtggaggatgtcaggaagcagggcgacttgatgaaggcagcagcaggcgagttcgctgacgatccttgttcttccgtcaagaggggaaacatggtgagggccgctagagccctcttatctgccgtaaccagacttcttatcctggcagatatggcagatgtgtacaagttgcttgtacagctcaaggtggtcgaggatggcatcctgaaactgaggaacgccggtaatgagcaggacttgggtattcaatacaaagctttaaagcccgaggttgacaagttaaacatcatggcagcaaaaaggcaacaggagcttaaggacgtgggtcaccgcgaccagatggcagcagccaggggtattctccagaagaacgtacccatattgtacaccgccagtcaggcttgtcttcagcatcccgacgtcgccgcgtacaaggctaatcgagatctgatatataagcagctccagcaggcagtgacaggaatatccaatgctgcccaggcaaccgcgagtgacgatgcatcccagcatcaaggcggtgggggaggtgagttagcctacgccttgaataacttcgacaaacaaataattgtagatcccctatcattctccgaagagcggtttcgaccatcattagaagaaagactggagagcattattagcggagccgcacttatggctgactcaagttgcacaagggacgaccgtcgggaacggatcgttgctgagtgtaatgccgtaaggcaggccctacaggatctgcttagtgaatatatgggaaatgcgggccgcaaggaaagatctgacgccctgaattctgcaatcgataagatgactaaaaagacacgtgacctaaggaggcagctgaggaaggccgtgatggaccacgtttcagattccttcttggagactaatgtgcccctgctcgtgttaatcgaggccgcaaagaacggcaacgaaaaagaagtcaaggaatacgctcaagtttttagggagcatgcaaataaactcatagaagttgccaatctggcctgttccatctcaaacaatgaagaaggggtaaaactggtgagaatgtcagcaagccagctggaagctctctgcccccaggttatcaacgcagcactggcccttgcagcaaagccccagagtaagttggcacaggagaacatggacctgttcaaggagcagtgggaaaaacaagtgagggtcttgactgatgctgtggacgacattaccagcattgacgatttcctggccgtgagtgagaatcatatcctggaagatgttaataaatgtgttattgcactgcaggagaaagacgtggatgggctggacaggacagcaggagccattagaggacgtgccgcccgggtaattcacgtcgtcactagcgagatggataactacgagcctggcgtatacaccgagaaagttctggaggccaccaagcttcttagcaatacagtgatgcccaggtttacagagcaagtggaggctgcagtggaggcgcttagctcagatcctgcccagccaatggatgaaaacgagtttatcgacgcttcccggcttgtgtacgacgggatacgggatattcgcaaggctgtgcttatgataagaaccccggaggagttagatgatagcgatttcgaaaccgaggacttcgacgtcaggagcaggacttcagtgcagacagaagatgaccagcttatagcaggccagagcgccagggcgataatggcacagctgcctcaggaacagaaagcaaaaatcgctgagcaggttgccagctttcaggaagagaaaagtaagctggacgccgaagtgtccaagtgggacgactcaggtaacgatattatcgtcctagccaaacagatgtgtatgatcatgatggaaatgaccgatttcacccgaggaaaggggccccttaagaatacttcagacgttattagcgcagcaaagaagattgctgaggccgggtcccgaatggataagctgggccggacaatcgcagatcactgtcccgactcagcttgtaagcaagatctgctggcatacttacagagaattgcgttgtattgtcaccagttaaatatttgtagtaaggtgaaggcagaggtccagaatcttgggggggaactggtggtaagcggtaactgcgacacatgcggagctcttcaagggctgaaaggctggcctcctcctctttgcgctactcactgggtcgattctgccatgtccttaatccaggcagccaaaaacctaatgaacgccgtggtgcagacagtcaaggcatcctacgttgcaagcacaaagtaccagaagtcacaagggatggcatctctgaatctccctgccgtgtcctggaagatgaaggctcccgaaaagaaacctctggtcaaacgcgagaagcaagacgagacacagaccaagatcaagcgggctagtcaaaagaagcacgtgaacccagtccaagccctatctgaatttaaggccatggattccatctag

SEQ ID NO: 122061 - DNA, 2676 bp, Artificial Sequence
  derived and/or modified sequence
atgacagccgtccacgccggtaatattaacttcaaatgggacccaaagtctctcgagatccggactctggccgtggagcgcctgttagagccactggtcacacaggtgaccactctggttaatactaactccaagggcccctccaacaagaagagaggccgaagtaagaaggcccacgtgctggctgctagtgtagaacaagccactgaaaattttctagagaagggtgataagatcgcaaaagagagtcaatttctgaaggaagagctcgtggccgcagtggaagatgtccgaaaacagggggacttgatgaaagcagccgcaggggaatttgctgacgatccatgttccagcgtcaagagaggaaacatggtgcgtgccgcgcgcgccctcctcagcgcggttacgaggctgctgaaagtggtggaggatgggatccttaagctgcgcaatgcaggcaatgaacaggacctgggcattcagtacaaggccctcaagccagaggtagataagcttaatattatggccgctaagcgccagcaggaactgaaggatgttgggcatagagaccaaatggcagctgccagagggatcctccagaagaacgtgccgatcctgtacactgccagccaggcctgtctgcagcacccggatgttgccgcctacaaagcaaatcgagacctgatctacaaacaactgcagcaggctgtcactggaatctctaatgccgctcaagcaacagcttctgatgatgcgtctcagcatcaaggaggaggcggcggcgaactggcctatgccctcaacaattttgataagcagattattgttgatcctctgtctttttctgaggagaggttcaggcctagcctggaggagagactcgagagcatcatctcaggagccgccttaatggccgactcctcttgcactagagacgacagaagagaaaggatagtggcagaatgcaatgcagtccgtcaggcgctccaggatctgctctcagagtatatgggcaatgcaggccggaaggaaagatcagatgccctgaactcagccatcgataaaatgaccaaaaagactagggacctccggcgtcaactgagaaaggcagtgatggaccatgtgagcgattcatttttggaaactaacgtgcccctgctggtactcattgaagcggccaagaatggcaacgagaaagaggtaaaggagtacgcccaagtcttccgggagcacgccaacaaactgattgaagtggcaaacctggcatgcagtatctcaaacaacgaagagggggttaagctcgttcggatgtccgcgtcacaacttgaagccctgtgtccacaggtaatcaacgctgcactggctctggctgctaagccgcagtctaaactcgctcaggagaatatggatctgttcaaagaacaatgggagaagcaggtccgagttcttactgatgccgttgatgacatcacctccattgatgacttcttagccgtatcagaaaatcacatactcgaggacgtgaataagtgtgtcattgccctgcaggaaaaagatgtggacggcttggacaggacggcaggtgccattagggggcgcgctgcccgggtgattcacgtcgtgacctcagaaatggacaactatgagccaggagtctataccgagaaggtgttagaagcaaccaaattactttccaacacagttatgccccggtttaccgaacaggtggaggctgctgtggaggctctgtctagtgatcctgcccagccaatggatgagaacgaatttattgacgccagtcgtttggtgtacgatggcatcagggatattcgcaaagccgtgctcatgataagaacacctgaagagcttgatgattccgactttgagacagaggattttgatgtgagaagtcgaacctcagtgcaaacagaggatgatcaattgatcgcaggccagtccgcacgcgcgatcatggcccagctgcctcaggaacagaaagcgaaaatcgccgagcaggtggcgagcttccaggaagaaaagtctaagcttgacgccgaagtatccaagtgggatgactccggaaacgacatcattgttctggcaaaacagatgtgcatgatcatgatggagatgaccgattttacaagagggaaaggccctctgaagaatactagcgacgttatctctgccgcaaaaaagatcgctgaggctgggagccgcatggataagctggggcgtaccattgctgatcactgcccggattctgcatgtaagcaagatctgcttgcttaccttcaaaggatcgctctttactgccatcaactgaatatttgttccaaggtcaaggccgaggtgcagaaccttggcggagaacttgtggtttctggtgttgactctgctatgagtctaatccaggcagctaaaaatctgatgaatgcggtagtgcagactgtaaaggcctcttacgtggcgtccaccaagtaccagaaatctcagggcatggcaagtctgaacctgccagctgtgtcgtggaagatgaaggcaccagagaaaaaaccactggttaagagggagaagcaagatgaaacccagacaaagatcaaacgagcttcacagaagaaacacgtgaatccagtgcaagcgctgtctgaattcaaagccatggactctatttag

SEQ ID NO: 122062 - DNA, 2721 bp, Artificial Sequence
  derived and/or modified sequence
atgacagctgtgcacgccggcaacatcaacttcaagtgggaccccaagagcctggagatccgcaccctggccgtggagcggctgctggagcccctggtgacccaggtgaccaccctggtgaacaccaacagcaagggccccagcaacaagaagaggggccgcagcaagaaggcccacgtgctggccgcctctgtggagcaggccacagagaacttcctggagaagggggacaagatcgccaaggagagccagttcctgaaggaggagctggtggccgctgtggaggatgtgaggaagcagggcgacctgatgaaggctgctgctggggagtttgctgatgacccctgcagctctgtgaagaggggcaacatggtgcgggccgcccgggccctgctgtctgctgtgacccggctgctgatcctggccgacatggctgatgtgtacaagctgctggtgcagctgaaggtggtggaggatggcatcctgaagctgagaaatgctggaaatgagcaggacctgggcatccagtacaaggccctgaagccagaggtggacaagctgaacatcatggccgccaagaggcagcaggagctgaaggatgtgggccaccgggaccagatggctgctgcccggggcatcctgcagaagaatgtgcccatcctgtacacagccagccaggcctgcctgcagcacccagatgtggccgcctacaaggccaacagagacctgatctacaagcagctgcagcaggccgtgacaggcatcagcaatgctgcccaggccacagccagtgatgatgccagccagcaccagggcggcggcggcggggagctggcctatgccctgaacaactttgacaagcagatcatcgtggaccccctgtccttcagcgaggagcgcttccggcccagcctggaggagcggctggagagcatcatcagcggggccgccctgatggctgacagcagctgcaccagagatgacagaagagaaagaattgtggccgagtgcaatgctgtgcggcaggccctgcaggacctgctgtctgagtacatgggaaatgccggcaggaaggagaggagtgatgccctgaacagcgccatcgacaagatgaccaagaagacccgggacctgcggcggcagctgaggaaggctgtgatggaccacgtgtctgacagcttcctggagaccaacgtgcccctgctggtgctgattgaagctgccaagaatggaaatgagaaggaggtgaaggagtatgcccaggtgttccgggagcacgccaacaagctgattgaggtggccaacctggcctgcagcatcagcaacaatgaggagggcgtgaagctggtgaggatgtctgccagccagctggaggccctgtgcccccaggtgatcaatgctgccctggccctggccgccaagccccagagcaagctggcccaggagaacatggacctcttcaaggagcagtgggagaagcaggtgcgggtgctgacagatgctgtggatgacatcaccagcattgatgacttcctggccgtgtctgagaaccacatcctggaggatgtgaacaagtgtgtgattgccctgcaggagaaggatgtggatggcctggacagaacagctggggccatccggggccgggccgcccgggtcatccacgtggtgaccagcgagatggacaactatgagcccggggtgtacacagagaaggtgctggaggccaccaagctgctgagcaacacagtgatgccccgcttcacagagcaggtggaggccgctgtggaggccctgagcagtgaccctgcccagcccatggatgaaaatgagttcattgatgccagccggctggtgtatgatggcatccgggacatcaggaaggctgtgctgatgatccgcaccccagaggagctggatgacagcgactttgaaacagaggactttgatgtgcgcagcaggacctctgtgcagacagaagatgaccagctgattgctggccagagcgcccgggccatcatggcccagctgccccaggagcagaaggccaagattgctgagcaggtggccagcttccaggaggagaagagcaagctggatgctgaggtgtccaagtgggatgacagcggaaatgacatcatcgtgctggccaagcagatgtgcatgatcatgatggagatgacagacttcacccggggcaagggccccctgaagaacaccagtgatgtgatctctgctgccaagaagattgctgaggccggcagcaggatggacaagctgggccgcaccatcgctgaccactgcccagacagcgcctgcaagcaggacctgctggcctacctgcagagaattgccctgtactgccaccagctgaacatctgcagcaaggtgaaggccgaggtgcagaacctgggcggggagctggtggtgtctggagtggacagcgccatgagcctcatccaggccgccaagaacctgatgaatgctgtggtgcagacagtgaaggccagctatgtggccagcaccaagtaccagaagagccagggcatggccagcctgaacctgcctgctgtgtcctggaagatgaaggcccctgagaagaagcccctggtgaagcgggagaagcaggatgagacccagaccaagatcaagagggccagccagaagaagcacgtgaaccctgtgcaggccctgtctgagttcaaggccatggacagcatctag

SEQ ID NO: 122063 - DNA, 2412 bp, Artificial Sequence
  derived and/or modified sequence
atgaaggctgctgctggggagtttgctgatgacccctgcagctctgtgaagaggggcaacatggtgcgggccgcccgggccctgctgtctgctgtgacccggctgctgatcctggccgacatggctgatgtgtacaagctgctggtgcagctgaaggtggtggaggatggcatcctgaagctgagaaatgctggaaatgagcaggacctgggcatccagtacaaggccctgaagccagaggtggacaagctgaacatcatggccgccaagaggcagcaggagctgaaggatgtgggccaccgggaccagatggccgccgcccggggcatcctgcagaagaatgtgcccatcctgtacacagccagccaggcctgcctgcagcacccagatgtggccgcctacaaggccaacagagacctgatctacaagcagctgcagcaggccgtgacaggcatcagcaatgctgcccaggccacagccagtgatgatgccagccagcaccagggcggcggcggcggggagctggcctatgccctgaacaactttgacaagcagatcatcgtggaccccctgtccttcagcgaggagcgcttccggcccagcctggaggagcggctggagagcatcatctctggagctgccctgatggctgacagcagctgcaccagagatgaccggcgggagcgcatcgtggctgaatgtaatgctgtgcggcaggccctgcaggacctgctgtctgagtacatgggaaatgccggcaggaaggagaggagtgatgccctgaacagcgccatcgacaagatgaccaagaagacccgggacctgcggcggcagctgaggaaggctgtgatggaccacgtgtctgacagcttcctggagaccaacgtgcccctgctggtgctgattgaggccgccaagaatggaaatgagaaggaggtgaaggagtatgcccaggtgttccgggagcacgccaacaagctgattgaggtggccaacctggcctgcagcatcagcaacaatgaggagggcgtgaagctggtgaggatgtctgccagccagctggaggccctgtgcccccaggtgatcaatgctgccctggccctggccgccaagccccagagcaagctggcccaggagaacatggacctcttcaaggagcagtgggagaagcaggtgcgggtgctgacagatgctgtggatgacatcaccagcattgatgacttcctggccgtgtctgagaaccacatcctggaggatgtgaacaagtgtgtgattgccctgcaggagaaggatgtggatggcctggacagaacagctggggccatccggggccgggccgcccgggtcatccacgtggtgaccagcgagatggacaactatgagcccggggtgtacacagagaaggtgctggaggccaccaagctgctgagcaacacagtgatgccccgcttcacagagcaggtggaggccgctgtggaggccctgagcagtgaccctgcccagcccatggatgaaaatgagttcattgatgccagccggctggtgtatgatggcatccgggacatcaggaaggctgtgctgatgatccgcaccccagaggagctggatgacagcgactttgaaacagaagattttgatgtgcgcagcaggacctctgtgcagacagaagatgaccagctgattgctggccagagcgcccgggccatcatggcccagctgccccaggagcagaaggccaagattgctgagcaggtggccagcttccaggaggagaagagcaagctggatgctgaggtgtccaagtgggatgattctggaaatgacatcatcgtgctggccaagcagatgtgcatgatcatgatggagatgacagacttcacccggggcaagggccccctgaagaacaccagtgatgtgatctctgctgccaagaagattgctgaggccggcagcaggatggacaagctgggccgcaccatcgctgaccactgcccagattctgcctgcaagcaggacctgctggcctacctgcagagaattgccctgtactgccaccagctgaacatctgcagcaaggtgaaggccgaggtgcagaacctgggcggggagctggtggtgtctggagtggacagcgccatgagcctcatccaggccgccaagaacctgatgaatgctgtggtgcagacagtgaaggccagctatgtggccagcaccaagtaccagaagagccagggcatggccagcctgaacctgcctgctgtgtcctggaagatgaaggcccctgagaagaagcccctggtgaagcgggagaagcaggatgagacccagaccaagatcaagagggccagccagaagaagcacgtgaaccctgtgcaggccctgtctgagttcaaggccatggacagcatctag

SEQ ID NO: 122064 - DNA, 2790 bp, Artificial Sequence
  derived and/or modified sequence
atgacagctgtgcacgccggcaacatcaacttcaagtgggaccccaagagcctggagatccgcaccctggccgtggagcggctgctggagcccctggtgacccaggtgaccaccctggtgaacaccaacagcaagggccccagcaacaagaagaggggccgcagcaagaaggcccacgtgctggccgcctctgtggagcaggccacagagaacttcctggagaagggggacaagatcgccaaggagagccagttcctgaaggaggagctggtggccgctgtggaggatgtgaggaagcagggcgacctgatgaaggctgctgctggggagtttgctgatgacccctgcagctctgtgaagaggggcaacatggtgcgggccgcccgggccctgctgtctgctgtgacccggctgctgatcctggccgacatggctgatgtgtacaagctgctggtgcagctgaaggtggtggaggatggcatcctgaagctgagaaatgctggaaatgagcaggacctgggcatccagtacaaggccctgaagccagaggtggacaagctgaacatcatggccgccaagaggcagcaggagctgaaggatgtgggccaccgggaccagatggctgctgcccggggcatcctgcagaagaatgtgcccatcctgtacacagccagccaggcctgcctgcagcacccagatgtggccgcctacaaggccaacagagacctgatctacaagcagctgcagcaggccgtgacaggcatcagcaatgctgcccaggccacagccagtgatgatgccagccagcaccagggcggcggcggcggggagctggcctatgccctgaacaactttgacaagcagatcatcgtggaccccctgtccttcagcgaggagcgcttccggcccagcctggaggagcggctggagagcatcatcagcggggccgccctgatggctgacagcagctgcaccagagatgacagaagagaaagaattgtggccgagtgcaatgctgtgcggcaggccctgcaggacctgctgtctgagtacatgggaaatgccggcaggaaggagaggagtgatgccctgaacagcgccatcgacaagatgaccaagaagacccgggacctgcggcggcagctgaggaaggctgtgatggaccacgtgtctgacagcttcctggagaccaacgtgcccctgctggtgctgattgaagctgccaagaatggaaatgagaaggaggtgaaggagtatgcccaggtgttccgggagcacgccaacaagctgattgaggtggccaacctggcctgcagcatcagcaacaatgaggagggcgtgaagctggtgaggatgtctgccagccagctggaggccctgtgcccccaggtgatcaatgctgccctggccctggccgccaagccccagagcaagctggcccaggagaacatggacctcttcaaggagcagtgggagaagcaggtgcgggtgctgacagatgctgtggatgacatcaccagcattgatgacttcctggccgtgtctgagaaccacatcctggaggatgtgaacaagtgtgtgattgccctgcaggagaaggatgtggatggcctggacagaacagctggggccatccggggccgggccgcccgggtcatccacgtggtgaccagcgagatggacaactatgagcccggggtgtacacagagaaggtgctggaggccaccaagctgctgagcaacacagtgatgccccgcttcacagagcaggtggaggccgctgtggaggccctgagcagtgaccctgcccagcccatggatgaaaatgagttcattgatgccagccggctggtgtatgatggcatccgggacatcaggaaggctgtgctgatgatccgcaccccagaggagctggatgacagcgactttgaaacagaggactttgatgtgcgcagcaggacctctgtgcagacagaagatgaccagctgattgctggccagagcgcccgggccatcatggcccagctgccccaggagcagaaggccaagattgctgagcaggtggccagcttccaggaggagaagagcaagctggatgctgaggtgtccaagtgggatgacagcggaaatgacatcatcgtgctggccaagcagatgtgcatgatcatgatggagatgacagacttcacccggggcaagggccccctgaagaacaccagtgatgtgatctctgctgccaagaagattgctgaggccggcagcaggatggacaagctgggccgcaccatcgctgaccactgcccagacagcgcctgcaagcaggacctgctggcctacctgcagagaattgccctgtactgccaccagctgaacatctgcagcaaggtgaaggccgaggtgcagaacctgggcggggagctggtggtgtctggcaactgtgacacctgtggggccctgcagggcctgaagggctggcccccacccctgtgtgccacccactgggtggacagcgccatgagcctcatccaggccgccaagaacctgatgaatgctgtggtgcagacagtgaaggccagctatgtggccagcaccaagtaccagaagagccagggcatggccagcctgaacctgcctgctgtgtcctggaagatgaaggcccctgagaagaagcccctggtgaagcgggagaagcaggatgagacccagaccaagatcaagagggccagccagaagaagcacgtgaaccctgtgcaggccctgtctgagttcaaggccatggacagcatctag

SEQ ID NO: 122065 - DNA, 2676 bp, Artificial Sequence
  derived and/or modified sequence
atgacagctgtgcacgccggcaacatcaacttcaagtgggaccccaagagcctggagatccgcaccctggccgtggagcggctgctggagcccctggtgacccaggtgaccaccctggtgaacaccaacagcaagggccccagcaacaagaagaggggccgcagcaagaaggcccacgtgctggccgcctctgtggagcaggccacagagaacttcctggagaagggggacaagatcgccaaggagagccagttcctgaaggaggagctggtggccgctgtggaggatgtgaggaagcagggcgacctgatgaaggctgctgctggggagtttgctgatgacccctgcagctctgtgaagaggggcaacatggtgcgggccgcccgggccctgctgtctgctgtgacccggctgctgaaggtggtggaggatggcatcctgaagctgagaaatgctggaaatgagcaggacctgggcatccagtacaaggccctgaagccagaggtggacaagctgaacatcatggccgccaagaggcagcaggagctgaaggatgtgggccaccgggaccagatggccgccgcccggggcatcctgcagaagaatgtgcccatcctgtacacagccagccaggcctgcctgcagcacccagatgtggccgcctacaaggccaacagagacctgatctacaagcagctgcagcaggccgtgacaggcatcagcaatgctgcccaggccacagccagtgatgatgccagccagcaccagggcggcggcggcggggagctggcctatgccctgaacaactttgacaagcagatcatcgtggaccccctgtccttcagcgaggagcgcttccggcccagcctggaggagcggctggagagcatcatctctggagctgccctgatggctgacagcagctgcaccagagatgaccggcgggagcgcatcgtggctgaatgtaatgctgtgcggcaggccctgcaggacctgctgtctgagtacatgggaaatgccggcaggaaggagaggagtgatgccctgaacagcgccatcgacaagatgaccaagaagacccgggacctgcggcggcagctgaggaaggctgtgatggaccacgtgtctgacagcttcctggagaccaacgtgcccctgctggtgctgattgaggccgccaagaatggaaatgagaaggaggtgaaggagtatgcccaggtgttccgggagcacgccaacaagctgattgaggtggccaacctggcctgcagcatcagcaacaatgaggagggcgtgaagctggtgaggatgtctgccagccagctggaggccctgtgcccccaggtgatcaatgctgccctggccctggccgccaagccccagagcaagctggcccaggagaacatggacctcttcaaggagcagtgggagaagcaggtgcgggtgctgacagatgctgtggatgacatcaccagcattgatgacttcctggccgtgtctgagaaccacatcctggaggatgtgaacaagtgtgtgattgccctgcaggagaaggatgtggatggcctggacagaacagctggggccatccggggccgggccgcccgggtcatccacgtggtgaccagcgagatggacaactatgagcccggggtgtacacagagaaggtgctggaggccaccaagctgctgagcaacacagtgatgccccgcttcacagagcaggtggaggccgctgtggaggccctgagcagtgaccctgcccagcccatggatgaaaatgagttcattgatgccagccggctggtgtatgatggcatccgggacatcaggaaggctgtgctgatgatccgcaccccagaggagctggatgacagcgactttgaaacagaagattttgatgtgcgcagcaggacctctgtgcagacagaagatgaccagctgattgctggccagagcgcccgggccatcatggcccagctgccccaggagcagaaggccaagattgctgagcaggtggccagcttccaggaggagaagagcaagctggatgctgaggtgtccaagtgggatgattctggaaatgacatcatcgtgctggccaagcagatgtgcatgatcatgatggagatgacagacttcacccggggcaagggccccctgaagaacaccagtgatgtgatctctgctgccaagaagattgctgaggccggcagcaggatggacaagctgggccgcaccatcgctgaccactgcccagattctgcctgcaagcaggacctgctggcctacctgcagagaattgccctgtactgccaccagctgaacatctgcagcaaggtgaaggccgaggtgcagaacctgggcggggagctggtggtgtctggagtggacagcgccatgagcctcatccaggccgccaagaacctgatgaatgctgtggtgcagacagtgaaggccagctatgtggccagcaccaagtaccagaagagccagggcatggccagcctgaacctgcctgctgtgtcctggaagatgaaggcccctgagaagaagcccctggtgaagcgggagaagcaggatgagacccagaccaagatcaagagggccagccagaagaagcacgtgaaccctgtgcaggccctgtctgagttcaaggccatggacagcatctag

SEQ ID NO: 122066 - DNA, 2721 bp, Artificial Sequence
  derived and/or modified sequence
atgaccgccgtgcacgccggcaacatcaacttcaagtgggaccccaaatctttggaaatccgcacactagctgttgagaggctccttgagcctctggtgactcaagtgaccacactcgtgaacactaattctaaagggccatcgaataaaaagcgcggaagatcaaagaaggcccacgtgctggcggctagtgttgaacaggctaccgaaaatttcctcgaaaaaggagataagatcgctaaagagtcacagttcctaaaagaggagctggtcgccgctgtggaagatgtgagaaagcagggtgatctgatgaaggccgccgctggggagtttgcggatgatccttgctccagcgtaaagagagggaatatggtacgggccgctcgcgcactgctgagtgcagttacccgcctcctgattttagccgacatggctgacgtgtataaactcctggtccagcttaaagtggtagaggacgggatcctcaaacttcgaaatgctgggaatgaacaggatctaggcattcagtacaaggcgctcaagcctgaggtcgacaagttgaacataatggccgccaagagacaacaggaactcaaagacgttggtcacagggaccagatggcggcagctcgcggcatacttcagaagaacgtcccaattctgtacacagcgagtcaggcatgcctccagcaccccgacgtggccgcctacaaagccaatcgcgatctgatctacaaacagctgcagcaggccgtcactggtatcagcaatgcggcccaggcgactgcaagtgatgatgcttcccaacaccagggcggtggtggcggagaactggcatatgccctcaataacttcgacaaacagatcatcgtggatccactctccttttccgaagagcgattccgccccagcctcgaggagcgactcgaatcaatcatctcgggcgccgcgttgatggctgactctagctgtacaagggacgatcgccgggagcgtattgtcgccgagtgcaatgcagtaaggcaagctcttcaggacttattaagtgaatacatggggaatgctggaaggaaggagcgttccgacgccctgaattctgctattgacaaaatgaccaagaagacccgggacctgcgccggcagctgcggaaagccgttatggaccatgtgagtgactcatttttggaaacaaatgtgcccctgctggtcctgatcgaggcagcgaagaatggtaatgaaaaagaagtaaaggagtacgcccaggtgttccgagagcacgcaaacaagcttatcgaagttgcgaacttagcctgtagcatatctaacaacgaggaaggcgttaaactggtccggatgtcagcttcacagctagaagccctgtgtcctcaggtcataaatgccgcgctagccctggccgcaaagccccagtcgaagcttgcccaggagaacatggacttatttaaagagcagtgggagaagcaggttcgagttctgactgatgccgtcgacgatataaccagtatcgatgatttcctggccgtaagcgagaaccatattctagaagacgtgaacaagtgcgttattgcattgcaagaaaaagacgtagacggcttggataggacagccggcgctattcgcggaagagctgcccgcgttatacatgtggtcaccagcgagatggacaattacgaacccggtgtatacactgagaaggtgctggaagcaaccaagctgctgtcaaatacagtcatgccccgattcaccgaacaggtggaggccgctgtggaagcgctgagtagcgatcctgcccagccaatggatgagaatgaatttatcgacgcgtctagactcgtgtacgacggcattcgggacatccgcaaagcagttctgatgattagaacccccgaggaactggacgatagcgacttcgagacagaagattttgatgtcagatcccggacatccgtgcaaacggaggacgatcagttgatagccggccagagcgcacgagctatcatggcccaactgccccaggagcagaaagcaaaaattgccgagcaagtggcgtcttttcaggaagagaagtccaaacttgacgccgaagtcagcaagtgggacgattctgggaacgacatcatcgtgctggcaaaacaaatgtgcatgatcatgatggagatgaccgatttcactagaggaaaaggacctctgaaaaacacgtccgacgtcatttctgctgccaagaagatcgcagaagctggctcaagaatggataagctcgggcgcacaatcgccgatcattgtccagatagtgcttgcaagcaggatctgctggcctacctacagagaatcgccctgtattgccatcaactgaatatatgtagtaaagtaaaggctgaggtgcagaacctgggaggcgaacttgtggttagcggcgtggactcggctatgtccctcattcaagccgctaagaatttgatgaatgccgtggtccagacggtgaaggcctcttacgtcgcttcgaccaaatatcagaaatctcagggcatggcaagtctgaatctgcctgccgtgagctggaagatgaaggcaccagaaaagaaacccctcgtgaagcgcgagaagcaagacgaaacgcagactaaaatcaaacgcgcctctcagaagaaacacgtaaatcccgtgcaggcactgtctgaatttaaagcaatggactcaatatag

SEQ ID NO: 122067 - DNA, 2412 bp, Artificial Sequence
  derived and/or modified sequence
atgaaggccgccgccggcgagttcgccgacgacccctgcagcagcgtgaaaagagggaacatggttcgcgcagctagagccctcctttcggcggttactcgactccttatcttagccgacatggccgacgtctacaagcttttggtgcagctaaaggtcgtggaggacgggatcctgaagctcaggaatgccgggaatgagcaggatttgggcatccaatacaaggctctgaagcctgaagtcgataaactgaacatcatggccgccaagcgccaacaggagcttaaggacgttgggcaccgggaccaaatggccgccgcgcgcggaattctccaaaagaatgtgcccatactgtatacagccagccaggcttgtctgcagcatccagacgtcgccgcgtataaagctaatcgggatctgatttacaagcagctgcaacaagctgtcaccggaatctctaacgctgctcaagcaactgcctccgacgacgcatctcagcaccagggcggaggaggtggagaactggcttatgccctgaacaatttcgacaaacagattattgtcgatcctctgtccttttccgaggaaaggttccgaccatcacttgaggagagactagaatcaataatctctggcgccgctttgatggcagacagcagttgcacacgggacgatcgcagagagagaattgtcgcggagtgcaacgcggtgagacaggccctgcaggacttgctctcagaatacatgggaaatgccggaagaaaggagcgcagcgacgccctgaatagtgctatcgacaagatgacgaaaaagactcgggacctgaggagacagttgaggaaagctgttatggaccatgtaagtgactccttcttggagaccaatgtgccccttttggtgttaattgaagcagcaaaaaatggcaacgagaaagaggtaaaggagtacgcgcaagtttttcgggaacacgccaataagctcattgaggtggccaacctggcctgttcaatttcgaacaatgaggaaggcgtcaagttagtacgaatgtccgcttcccagctcgaggccctttgtcctcaagtgatcaatgctgctctggcacttgccgccaagccgcagagcaagctcgcacaggagaatatggacctgttcaaggagcaatgggaaaagcaagtgagggtgttgaccgatgccgtagacgacattactagcatagacgatttcctggccgtcagcgagaaccatatcctggaagatgtcaataaatgtgtgattgctctccaagaaaaggatgtggacgggttggatagaacggctggggcgatacggggaagagccgcacgtgtgatccacgtcgttacctccgagatggataactatgaaccgggtgtgtacacagaaaaggtcttggaggccactaagttattgtctaacaccgtgatgccacgatttacagagcaggtagaagccgcggtggaggcgctttcatccgatcccgctcagcccatggatgagaacgaatttatcgatgcctcacggctcgtatacgatggcatcagagacatacgaaaggctgtactgatgataaggacccctgaggagctggatgattccgactttgaaactgaagacttcgacgtgcggtccaggacctcagtccaaactgaagatgaccaacttattgcaggacaatctgcccgcgcaataatggcacagctcccccaagagcaaaaggcaaaaatcgcagagcaagtggccagcttccaagaagagaagtctaaattggacgcagaagtatcaaagtgggatgactcaggaaacgacatcatcgtcctggctaaacagatgtgtatgatcatgatggagatgacagattttacaagagggaaggggcctctgaaaaacacatcggacgtcatttctgccgcaaagaaaatagctgaggctggtagtcgaatggataaactggggcgaaccatcgccgaccactgcccagatagtgcatgtaaacaggatcttcttgcttacttgcagaggatcgccctgtattgccaccagttaaatatatgctccaaggtgaaagctgaggtacagaatctgggcggcgagctggtagtgtcaggagtcgattctgcgatgtctctgatccaggccgcaaaaaatctcatgaatgcagtggtgcagactgtgaaggcttcttatgtggcctccacaaagtaccagaagagccaagggatggcttccctgaacctgccagccgtaagctggaagatgaaagctcctgaaaaaaagcctttggtgaaacgggagaagcaggatgagacacagactaagatcaaacgtgcttctcagaagaaacacgtgaatcccgtccaggcactgtctgagttcaaagccatggattctatatag

SEQ ID NO: 122068 - DNA, 2790 bp, Artificial Sequence
  derived and/or modified sequence
atgaccgccgtgcacgccggcaacatcaacttcaagtgggaccccaaaagtctggagatccgcacgctggccgtggaaaggctcctcgaaccactggtgacccaggtgacaacactggtaaacaccaatagtaagggtccatccaacaaaaagcgcggacggagcaagaaggcccatgttctcgcagcatcagtcgaacaggcaacagaaaacttccttgagaagggggataaaatcgccaaggaatcgcaattcttgaaagaagagttagttgctgccgtggaagatgtccggaagcagggcgatctgatgaaagctgctgcaggggagtttgccgatgatccttgctcatctgtgaaaagggggaatatggtgcgagctgccagagctttgctttccgcggtgactcgcctgttaatcttggccgacatggccgacgtctataaactgctggtgcaattgaaggttgtcgaggatggcattctgaaattaaggaatgccggcaacgaacaagatctaggtattcagtacaaggctctaaaacccgaggtcgacaagctgaatattatggcggccaaacgccagcaggagttgaaggacgtgggtcacagagatcaaatggcagcagctcgaggcattttacagaagaatgtgcctattttgtacaccgcgagccaagcttgccttcaacacccagacgtagctgcatataaagccaaccgtgacctcatctacaagcaactgcaacaagcagtgaccggtatttccaacgccgctcaagccaccgcatcggatgatgcctcacagcatcagggggggggagggggggagctcgcctatgctttaaataactttgataaacagattatcgtcgacccactttcattctcggaagaaagatttcgcccaagcctggaagaaagactggagagtattatttcaggagccgcccttatggctgacagctcatgcacacgggatgaccgtagagaacgaatagtggccgagtgtaacgcggtaaggcaggccctgcaggacctgctttctgagtatatgggcaacgctgggaggaaggagcgctcagatgccctcaatagcgccatcgataagatgaccaagaagaccagagatctgaggcgacagctgcgtaaggctgtgatggatcacgtgtcagactccttcctagagacaaatgtccccctcctggttctcatcgaggctgcgaagaatggcaacgagaaagaagtgaaagagtacgcccaagtgttccgtgaacatgctaataagttaatcgaggtggccaatttagcttgcagcatcagtaacaacgaggagggcgtgaagctggtcaggatgagtgcgagccaactggaagccctgtgcccccaggtgattaacgcagcgcttgctttagctgccaaaccccagtccaagctagcccaggagaacatggatctcttcaaagagcagtgggagaaacaggtgcgggtactcacagatgccgtagatgacatcacctccattgacgatttcctagccgtctcagaaaaccatatcctagaggatgttaataagtgtgttatcgccttacaagagaaagacgtggatgggttagaccgcaccgctggagctattaggggccgggccgcgcgcgtcatccacgtcgtgacttcagagatggacaattacgaacccggcgtatacactgaaaaagtactggaggcaacaaagctcctgtccaatacagtgatgcctcggtttaccgagcaggtagaagcagccgtggaggccttgagttcagaccccgcccagccaatggatgaaaacgagttcatcgatgcctcaagacttgtgtacgacggaatccgggacattcgaaaggcagtgctgatgatccgcacacctgaagagctagatgatagtgactttgaaactgaagatttcgacgttcgctcaaggacttctgtccagacagaggatgatcagctgatagcggggcaatctgctcgagctattatggcccagctccctcaagagcaaaaagccaaaatcgccgagcaggtggccagcttccaggaggagaagagcaaactcgatgccgaagtatccaagtgggacgattctggaaacgatatcattgtgttggcgaaacaaatgtgcatgattatgatggagatgacagacttcacacggggaaagggtccactaaagaatacgagcgatgtgattagtgcagccaaaaaaattgccgaagcagggagccggatggacaagttggggcgaaccattgctgaccactgcccagactctgcatgtaagcaggacctactcgcctacctgcaacgcatcgcgctatattgtcaccaattgaatatctgttcgaaggtgaaggctgaagtgcagaatctcggtggggaactcgttgtgtcagggaattgcgacacttgtggtgcgctgcaggggctgaaggggtggccaccccctctgtgtgctacgcactgggtggactccgccatgtctctgatccaagctgcaaagaatcttatgaacgccgtggttcagaccgtcaaagcaagctacgtggcctccacaaagtaccagaagagccagggaatggctagtttaaatctgccggccgtttcttggaagatgaaagcacccgaaaagaaaccacttgtcaagagagagaaacaggacgagacccagacaaagatcaagagagcctcccaaaaaaagcacgtgaatccggtgcaggctttgagtgaatttaaagccatggattctatctag

SEQ ID NO: 122069 - DNA, 2676 bp, Artificial Sequence
  derived and/or modified sequence
atgaccgccgtgcacgccggcaacatcaacttcaagtgggaccccaaatcactagaaatcagaacactggctgttgaacgcttgttggaacccctcgtaacgcaggtaaccacccttgtgaatacaaacagcaaagggccttcaaacaagaaaaggggcaggtccaagaaagctcatgtgctcgccgcctccgtcgagcaagccacagagaactttcttgagaagggcgacaagatcgccaaagaaagccagttcttaaaggaggaactggtggcagctgtcgaggacgtcaggaaacaaggggatctgatgaaagcagcagcaggtgagtttgctgacgacccttgctctagcgtgaagagaggaaatatggttagggcggccagggctttgctttcagccgtcacccgactgttgaaggttgtggaggatggtattctaaagttgcggaacgccgggaatgagcaggatttaggaattcagtataaggcactgaaacccgaagtcgataaactaaatatcatggccgccaaacggcagcaggagctgaaagacgtggggcatagggaccaaatggccgcagcacggggtatactccagaagaatgtgccaattctgtacaccgcatctcaagcatgcctccaacaccccgatgttgcggcctacaaggctaatcgcgacctgatttacaagcaactacaacaagccgtgaccggcatatccaacgcggctcaggctaccgcttcagatgacgcttcgcaacaccaggggggcgggggtggagaacttgcttacgctctgaataattttgataaacagattattgttgaccccctctccttcagtgaggagagatttcggccctcactcgaagagcggctggaatccatcatttccggagctgctctaatggcagactcatcctgcacccgggacgaccgtagagagagaatcgtggcagaatgcaacgccgtgcgccaggctctgcaggacctcctgtctgaatacatgggtaacgcgggacggaaggaaaggagcgatgccctgaattcagccatcgataaaatgaccaagaaaacgagggacctgcggagacagttaagaaaggcggtcatggatcatgtctccgactcttttctggagaccaatgtgccgttactggtcctgattgaggctgcgaagaacggtaacgaaaaagaagtgaaggagtatgctcaggtgtttagggaacatgccaataagctcatcgaggtggcgaatctggcatgtagtatctcgaataatgaagagggggtgaaattagtgaggatgtcggccagccagttggaagcgctgtgccctcaagtgatcaatgccgcactcgcactggccgcaaaacctcaaagcaagctggcgcaggagaacatggaccttttcaaagagcaatgggagaaacaggtccgggtgctgacagacgccgtcgacgacattacaagtattgacgactttctcgccgtatcggagaatcacattctggaagatgttaataaatgtgttatcgccttgcaggagaaagacgtggacggcctggatcgcacagccggggctataaggggtagagccgcaagagtcattcacgtggtgacctcagagatggacaattatgagccgggggtgtacacggagaaagtgttagaagctaccaagctgttgtcgaataccgtgatgccccgctttacagagcaggtcgaggcggcagtcgaagccctgtcctctgaccccgcacagccaatggacgaaaatgagttcatagacgccagccggctggtttatgatggaatccgcgatataaggaaagcagtcctgatgatccggacgccagaggagttggatgattctgattttgagacagaggactttgatgtgcggtctcgaacctctgtccagaccgaggatgaccagctaatcgctgggcagtctgctagagccatcatggcacagttaccacaggaacagaaggctaaaatagcagagcaggtggcaagctttcaagaagaaaagtccaaacttgacgctgaggtctctaaatgggatgactctggcaacgacattatcgtattggctaagcagatgtgcatgattatgatggaaatgaccgattttacccgcggcaagggacctctcaaaaatacctccgatgtaatctctgcggccaagaagatcgctgaagccggatccaggatggacaagctggggcggacgatagctgatcattgccccgacagtgcctgtaaacaagatctcctcgcttatcttcagaggatcgccctatactgccaccagcttaatatttgcagtaaggtgaaggccgaagtccagaatctaggcggtgagttggtggtctccggggtagactccgctatgtcactcatccaggcagccaagaatctgatgaatgcagtcgttcagaccgtcaaggctagctatgtcgcctcaacaaagtaccagaaaagtcaaggtatggcatccctgaacctcccggcagtttcatggaaaatgaaagcccccgagaagaagccgctggtgaagcgcgagaagcaagacgaaacacagacaaaaatcaagcgtgcgtcacagaaaaaacacgtcaatcccgtgcaggccctaagtgaatttaaggcgatggactccatttag

SEQ ID NO: 122070 - DNA, 2721 bp, Artificial Sequence
  derived and/or modified sequence
atgaccgccgtacatgctggaaatattaactttaagtgggaccctaaatcgcttgaaatcaggaccctggctgtggagagattactggagccactggttactcaggttaccacgctggtcaacacgaactcgaaggggccaagcaataagaaacgaggtcgaagcaaaaaagcccatgtcctggctgcctctgtcgaacaggccaccgaaaatttcttagagaaaggtgacaaaatcgccaaggagtcccagttcctgaaggaagaacttgtggccgcagtggaggatgtgcgcaagcaaggagacctgatgaaggccgctgccggagagttcgctgacgacccttgttcatcggtgaagcggggtaacatggtgagagcagccagggccttactttcagctgttactcgcctgctgattctggctgacatggctgacgtttacaaactcctggtgcagctgaaggtggttgaagatggcatcctgaagttaagaaatgctggaaatgagcaagatctaggcatccagtacaaggctttgaaaccagaggtagacaaattgaacatcatggctgccaaacgccagcaggagctcaaggatgtgggccaccgtgaccaaatggccgctgcacgcggtatccttcagaaaaatgtccctattttgtatactgcctcccaggcttgcttgcagcaccccgatgtggccgcttataaagcaaaccgggacttgatctataagcagctgcagcaggcggtaactgggatctctaacgcagctcaggcaaccgcatccgatgatgctagtcagcatcaaggcggagggggaggagagttggcatacgccctgaataactttgacaaacagatcatcgttgatcccctgagtttttccgaggagcgattccgaccttccttggaagaaaggttggaatccatcatctccggggcagctttgatggcagactcgtcctgcactcgggatgatcgacgggagagaattgtcgcggaatgcaacgccgtgcgtcaagccttgcaggatctgctctctgagtacatggggaacgcgggtcgtaaggaacgatctgatgccttaaattccgcaatcgacaaaatgacgaagaagacgcgggatctcagacgccagctgcggaaagccgttatggatcatgttagcgactcgttccttgagactaacgtccctctgttagttttgatcgaggccgctaagaacgggaacgagaaggaggtgaaagagtacgcacaggtgtttcgcgagcatgcgaataaactgatcgaagtcgcaaatctcgcatgttctatttctaataacgaggaaggcgttaaattggttagaatgtcagcgtctcaactggaggcgttatgtccccaagtgattaacgcggcattagcactggcggcaaaaccacagagcaaattagctcaggagaatatggacctgttcaaagaacagtgggagaagcaagtgcgcgtgctgacagacgcagtggatgatattacatccattgatgatttcctagctgttagcgaaaaccacatcctagaggatgtgaataaatgcgtgattgctctgcaggagaaggacgtcgatggattggatagaacggccggagctataagaggacgggctgctagagtgattcacgtggtcaccagtgagatggacaactatgaacccggagtctatacagagaaagtacttgaggcaactaaattgctgtcaaatactgtcatgccacgtttcaccgaacaggtggaagctgcagtagaggctttgtctagcgacccggcacagcccatggacgagaacgagtttattgatgcatcccgcttggtgtatgacgggatccgggatatcagaaaggctgtgcttatgatacgtactccagaagagcttgacgattctgatttcgagactgaggattttgacgtgcgctcacggacgagcgtgcagaccgaagacgatcagctgatcgccggtcagagcgcccgtgccattatggctcaattgcctcaggagcagaaggcaaagatcgccgaacaggtcgcttctttccaggaggagaaatctaaactggacgcggaagtctcaaagtgggacgatagtggcaatgatattattgttctggccaaacaaatgtgtatgatcatgatggagatgaccgactttactcgtggaaaagggcctctcaagaacacttctgacgtgatatcagccgctaagaaaatcgctgaggctggaagccggatggataaactggggcgaaccatcgccgatcattgtcccgacagcgcgtgtaaacaggacttgctcgcatatctgcagaggatagctctgtactgccaccagctgaatatctgtagcaaggttaaggcggaggtacagaacctcggcggtgaactggtggtttccggagtggactccgccatgagccttatacaggcagctaaaaatctgatgaacgcggtcgtgcagaccgtgaaagctagctatgtggccagcaccaagtatcagaagtcgcagggcatggcctcacttaacctgcccgcagttagctggaagatgaaggctcccgagaagaaaccactggtgaaaagggaaaagcaggacgaaacccagacgaagatcaagagggcctctcagaagaagcacgtgaatcctgtgcaggctctgtcggagtttaaggcaatggactctatatag

SEQ ID NO: 122071 - DNA, 2412 bp, Artificial Sequence
  derived and/or modified sequence
atgaaggctgcagctggagagtttgctgacgatccctgtagcagtgtgaagcggggaaacatggttagagctgctcgagccctcctctccgcagttactcggctcctgatcttggctgacatggccgatgtgtacaagctgctggtgcagctgaaggtcgtggaagacggaatacttaagcttcgtaatgctgggaacgagcaggatctggggatccaatacaaggcgctgaaacctgaggtggacaaactgaatatcatggccgcaaagcggcagcaggaactgaaggacgtcggacatcgagaccaaatggccgcagccaggggaattctccagaagaatgttcctatcctgtataccgcttcacaggcctgtctgcaacacccagacgttgccgcttacaaggctaaccgtgatttgatatacaaacagttacagcaggcagtgaccggtatatcaaacgcagcccaggccacggcgtcagatgatgctagtcaacatcaggggggtggcggaggcgagctggcctacgctctgaataacttcgacaagcaaatcattgttgatcccctttctttctccgaggaacgcttccgcccatcccttgaagagcggttagagtctatcattagtggggcagccttaatggccgacagcagctgcactcgggatgacaggcgcgaacgaatcgtcgcagaatgcaatgcagtcaggcaggccctacaggatttactgagcgaatacatgggcaacgccggacggaaggagcggagtgatgctctgaattctgcaatcgataagatgaccaagaaaactagagacctgcgtcggcagcttcgcaaggccgtcatggatcatgttagtgactcatttcttgagactaatgtacctttattagttcttattgaagccgctaaaaacggcaacgagaaggaagtgaaggaatacgcacaggtttttagggagcacgctaataaactcatcgaggtggcgaatctggcctgctctatatccaataatgaagaaggtgtgaagcttgtgaggatgtcagcaagtcagctggaggccttatgtcctcaggtgattaacgcggcactggcactggcagctaagccccagtctaaattggcccaggaaaacatggacctctttaaagagcagtgggagaaacaagtgcgtgtgttgacagacgccgtggacgacattacatccatcgacgacttcctggcagtttcagagaaccacatccttgaagacgtaaacaagtgcgttatcgccctccaggaaaaggacgtggatggtctggacaggaccgccggtgcaatcaggggcagagcagccagagtcatccacgtcgtgacctcggagatggataactacgagccaggcgtatacaccgagaaagttcttgaagctactaagctgttatctaatacggtgatgcctcgatttacggagcaggtcgaggccgctgtggaggctctctccagtgaccctgcccagcctatggatgagaacgaatttattgatgcttcacgtctggtttatgatggaatcagagacatccggaaggccgtattgatgatcagaactccagaagagttagatgacagcgatttcgagacagaagatttcgacgtgcgttccaggacgagcgtccagactgaagacgatcaactcattgccggacagtccgcacgggcaatcatggcccagctcccacaagagcaaaaggccaagattgctgagcaggtggcgtcatttcaggaagagaaaagtaagcttgatgcagaagtctccaagtgggacgattctggcaatgacatcattgtgctggccaagcagatgtgtatgattatgatggaaatgaccgactttaccaggggcaaaggcccactgaagaacacaagtgatgtaatatctgccgcaaagaaaatcgcagaggctggctctcgaatggacaagttaggtcgtaccatagcggatcactgtccagatagcgcatgcaagcaggaccttctagcctacctgcagagaattgcactgtattgccatcagctgaatatctgttccaaggtgaaagcagaggtccagaatctgggtggtgagctggtggtctctggagtcgacagcgccatgtcgctcatccaggccgctaaaaacctgatgaacgcggtcgtgcagaccgtgaaagcgagctatgttgcatccaccaaatatcaaaagagccagggaatggccagcctaaacttaccggcagtttcatggaaaatgaaggcaccagagaagaagcctctggtcaaaagagaaaagcaagatgaaacacagactaagatcaagcgggcatcacagaagaaacacgttaacccagttcaagccctcagcgagtttaaagcaatggacagtatctag

SEQ ID NO: 122072 - DNA, 2790 bp, Artificial Sequence
  derived and/or modified sequence
atgacagccgtacacgctggtaatatcaatttcaaatgggatccaaagagtctggaaatacgtactttggccgttgaacgactcttggaacctttagttactcaggttacaaccctggttaacacaaatagcaagggtcctagcaacaaaaagagaggtcgaagcaagaaagcccacgtcctggctgcatcggtcgaacaggcaactgagaacttcctcgagaagggagataagattgctaaagaaagtcagttcctgaaggaagaactggtggccgcagtggaggatgtcaggaaacagggggatctgatgaaagccgcagctggcgagttcgccgatgatccctgctccagcgtgaaaagagggaatatggtgcgcgcagcccgagccctactgtcggctgtgactagattactgattcttgccgacatggctgacgtctataagctcctggtgcagttaaaagtagtcgaggacgggatcctgaaactgcggaacgccggtaacgaacaggaccttgggattcaatacaaggcccttaagccggaggtcgacaaattaaacataatggccgcaaagcggcagcaggagttgaaggacgtggggcaccgggaccagatggcagctgcccgtgggatactccagaagaatgtgcccatcctgtacaccgccagccaagcctgtttgcagcatccagatgttgccgcttacaaggccaatcgcgaccttatctataaacagttacaacaggcagtgactggaatctcaaacgctgcccaggctacagcctctgacgacgcttcgcagcaccaggggggtggcggaggggaattagcctatgcactgaataactttgacaaacagatcattgtagaccccctgagttttagcgaggagcggttcaggccctccctggaagagaggctggaatccatcatctcgggggcagccctcatggctgacagctcctgtacccgtgatgatcgccgtgagcggatcgtagcagagtgcaatgcagttaggcaggccttgcaggacttgcttagtgagtacatggggaacgcaggccgaaaagagcggtccgacgcccttaactccgccatcgacaaaatgaccaagaaaacgagggatttacgtcgacaactccgaaaagctgtgatggatcacgtgagcgattcttttctggaaaccaacgttccccttcttgtcttgatagaggcagcgaaaaatggcaacgaaaaggaggtgaaagaatatgcgcaggtctttcgagagcacgcaaataaattaatcgaggtggccaacctagcttgttccatctctaacaacgaagagggagtcaaactggtccgcatgtccgcctctcagctagaggccctttgcccccaggtaatcaatgcggcattagctctggccgcaaagccccaatcaaaactggcacaggaaaatatggatctattcaaggagcagtgggaaaagcaggtgcgtgttctgacagacgctgtagatgatatcacctccatcgatgactttcttgccgtatctgagaatcacatactcgaagatgtcaacaaatgcgtgattgccttgcaggagaaggacgtcgatggcctggaccgaaccgctggagccattagaggcagggccgctagagtgattcacgtggtgaccagcgaaatggacaattacgaacctggggtctacacggagaaggtgttggaagcaaccaagcttctctcaaatactgttatgccacgattcacagagcaggtagaggccgctgtagaggccctgtcctccgatcccgcacagcctatggacgagaatgagttcattgatgcctcccgcctagtgtatgacggaattcgggatatacgtaaggcggtgcttatgatacgtacacctgaggaactggatgacagcgactttgaaacggaggatttcgatgtacgaagcagaacttcggtgcagactgaggatgaccagctgattgctggacagagcgcccgagccattatggcccagctcccgcaagagcagaaagctaaaatcgccgagcaggttgcctcctttcaggaagagaaatcaaagctagatgctgaggtatccaaatgggatgattctggaaatgatattattgtcttggccaaacagatgtgcatgatcatgatggaaatgacagatttcaccaggggcaagggccctctgaagaacacatccgatgtgattagcgcggcaaagaagatagcagaggcgggatctaggatggacaagttgggcagaactatagcggatcactgtccagattccgcttgtaagcaggatctccttgcttatctgcagaggattgccctgtattgccaccaattgaacatctgctcaaaggtaaaggccgaggtccagaacctgggcggtgagttagtggttagcgggaattgcgacacctgtggagccttacagggattgaaagggtggccccctcctctgtgtgccacccattgggtcgatagtgcaatgtcgctgatccaggcggctaaaaacctaatgaatgcagttgtgcagaccgtgaaggcatcctatgtcgcatctactaaatatcaaaaaagtcagggcatggccagtctgaatctgcccgctgtgagctggaagatgaaggcgccagagaaaaaaccactggtgaagcgagaaaaacaagatgagacacagaccaagataaagcgagcgagccagaagaaacacgtcaaccctgtgcaagcactgtctgaatttaaagcaatggattccatttag

SEQ ID NO: 122073 - DNA, 2676 bp, Artificial Sequence
  derived and/or modified sequence
atgaccgccgtgcatgcgggtaacatcaatttcaaatgggatccaaagagtctggagattaggaccctagcagtggaacggctgctggagcctctagtgacacaggtcacaacccttgtgaataccaattccaaaggcccttcaaataaaaaaagaggaaggtccaaaaaggctcacgtgctggcagccagcgtggagcaggccaccgagaattttctcgagaaaggcgacaagatagcaaaagaatctcagttcttaaaggaggagctagtggccgctgtcgaggatgtgaggaaacaaggggatcttatgaaagccgctgcgggagagttcgcggacgatccctgttcgtctgtgaaacgaggaaacatggtccgagccgcaagggcgcttcttagcgcagttactagactcctcaaagtggtggaggacggcatcctcaagctccggaacgcagggaatgagcaggatttaggcattcagtacaaggcccttaaaccagaagttgacaagctcaacatcatggccgcaaaacgacagcaggagcttaaggacgttgggcacagggatcagatggccgctgctcggggtatccttcagaagaacgtcccaatcctgtacaccgcgtctcaggcctgcctgcagcaccccgatgtggccgcttacaaagccaaccgagatctcatctacaaacagctgcagcaggctgtcacgggtatctcaaacgctgcccaggccaccgcgagtgacgacgctagccagcaccaggggggaggcggtggagagttagcctacgccctgaataactttgataagcagatcattgttgatccactgagttttagcgaagaacgatttaggccctcactggaagaacggttggagtctattatttccggtgccgctcttatggccgattcctcttgcacacgggacgaccggagagaaaggatcgtggcagaatgcaacgctgtgaggcaagccctccaagacctgctctccgagtatatgggaaatgccggacgaaaggagcgctcagatgccctaaacagtgcgatcgacaagatgacaaagaaaacgcgggatctgcgtcgccaactcagaaaagccgtaatggaccacgtctctgattcatttcttgagactaacgttcctctcctggtccttatcgaagcagccaagaacggtaacgagaaagaagtgaaggaatatgctcaggtatttcgagagcacgcgaacaaactgatagaagttgctaatctggcttgctccatttccaataacgaagagggagttaaactcgtccggatgtctgcgagtcaactggaagctctctgtccacaagtcattaatgccgcattggcacttgcggctaagccacagagcaagctggctcaggagaacatggatctgttcaaagagcagtgggagaaacaggtacgcgtgctgacggacgctgtggatgacataacctcaatcgacgactttcttgccgtgagcgagaaccatattctggaggacgtaaacaaatgtgtgattgcactgcaagaaaaggatgttgacggcctggaccggacagccggagccattcggggtcgggctgcgcgagtcatccacgtcgtaaccagcgagatggataactacgagcccggagtgtatactgagaaggtgctcgaggcaaccaagctgttaagcaatacggtgatgcctagatttacggaacaggtagaagccgctgtggaagccttatctagtgaccccgcacagcccatggacgagaacgaatttatcgatgcttcccggttggtttacgacgggatccgggacatccggaaggccgtcctcatgattcggacccctgaagagctcgacgacagcgacttcgaaaccgaagatttcgacgtccgttcccgtacctctgtccagaccgaggatgaccagctgattgctggccaatcagccagagcgattatggcacagctccctcaggagcagaaagccaagatcgctgaacaagtagcctcttttcaggaggaaaaatctaagctcgacgccgaggtgtctaaatgggatgatagtggtaacgacataattgtcctagctaaacagatgtgtatgatcatgatggaaatgactgacttcacaagaggcaagggcccactgaagaataccagcgatgtgataagcgcagcgaagaagattgcagaggctgggagccgcatggataagttgggaaggaccattgctgaccattgccctgactcggcatgcaagcaagacctgctagcttacttgcaacggattgctctgtactgtcaccaactgaacatatgcagtaaggttaaagctgaggtgcagaatcttgggggagagctagtggtgtctggggttgactcagccatgtctctcatccaagcagcgaagaatctcatgaacgcggtggtccagaccgtaaaggccagctacgtggcttccaccaagtaccagaagtctcagggaatggcatccctgaacctgcctgcagtgtcatggaaaatgaaggccccagaaaagaaaccactagtaaagcgcgagaagcaggatgagacacagaccaagatcaagagggccagtcaaaagaaacatgtgaacccagttcaggcattgtcagaattcaaggctatggactcaatttag

SEQ ID NO: 122074 - DNA, 3756 bp, Artificial Sequence
  derived and/or modified sequence
tcctcctcctagccggactggagggagacaaagcagcgcccgtctgcttcgggcctctggaatttagcgctcgcccagctagccgcagaaatgactgctgtccatgcaggcaacataaacttcaagtgggatcctaaaagtctagagatcaggactctggcagttgagagactgttggagcctcttgttacacaggttacaacccttgtaaacaccaatagtaaagggccctctaataagaagagaggtcgttctaagaaggcccatgttttggctgcatctgttgaacaagcaactgagaatttcttggagaagggggataaaattgcgaaggagagccagtttctcaaggaggagcttgtggctgctgtagaagatgttcgaaaacaaggtgatttgatgaaggctgctgcaggagagttcgcagatgatccctgctcttctgtgaagcgaggcaacatggttcgggcagctcgagctttgctctctgctgttacccggttgctgattttggctgacatggcagatgtctacaaattacttgttcagctgaaagttgtggaagatggtatcttgaagttgaggaatgctggcaatgaacaagacttaggaatccagtataaagccctaaaacctgaagtggataagctgaacattatggcagccaaaagacaacaggaattgaaagatgttggccatcgtgatcagatggctgcagctagaggaatcctgcagaagaacgttccgatcctctatactgcatcccaggcatgcctacagcaccctgatgtcgcagcctataaggccaacagggacctgatatacaagcagctgcagcaggcggtcacaggcatttccaatgcagcccaggccactgcctcagacgatgcctcacagcaccagggtggaggaggaggagaactggcatatgcactcaataactttgacaaacaaatcattgtggaccccttgagcttcagcgaggagcgctttaggccttccctggaggagcgtctggaaagcatcattagtggggctgccttgatggccgactcgtcctgcacgcgtgatgaccgtcgtgagcgaattgtggcagagtgtaatgctgtccgccaggccctgcaggacctgctttcggagtacatgggcaatgctggacgtaaagaaagaagtgatgcactcaattctgcaatagataaaatgaccaagaagaccagggacttgcgtagacagctccgcaaagctgtcatggaccacgtttcagattctttcctggaaaccaatgttccacttttggtattgattgaagctgcaaagaatggaaatgagaaagaagttaaggagtatgcccaagttttccgtgaacatgccaacaaattgattgaggttgccaacttggcctgttccatctcaaataatgaagaaggtgtaaagcttgttcgaatgtctgcaagccagttagaagccctctgtcctcaggttattaatgctgcactggctttagcagcaaaaccacagagtaaactggcccaagagaacatggatctttttaaagaacaatgggaaaaacaagtccgtgttctcacagatgctgtcgatgacattacttccattgatgacttcttggctgtctcagagaatcacattttggaagatgtgaacaaatgtgtcattgctctccaagagaaggatgtggatggcctggaccgcacagctggtgcaattcgaggccgggcagcccgggtcattcacgtagtcacctcagagatggacaactatgagccaggagtctacacagagaaggttctggaagccactaagctgctctccaacacagtcatgccacgttttactgagcaagtagaagcagccgtggaagccctcagctcggaccctgcccagcccatggatgagaatgagtttatcgatgcttcccgcctggtatatgatggcatccgggacatcaggaaagcagtgctgatgataaggacccctgaggagttggatgactctgactttgagacagaagattttgatgtcagaagcaggacgagcgtccagacagaagacgatcagctgatagctggccagagtgcccgggcgatcatggctcagcttccccaggagcaaaaagcgaagattgcggaacaggtggccagcttccaggaagaaaagagcaagctggatgctgaagtgtccaaatgggacgacagtggcaatgacatcattgtgctggccaagcagatgtgcatgattatgatggagatgacagactttacccgaggtaaaggaccactcaaaaatacatcggatgtcatcagtgctgccaagaaaattgctgaggcaggatccaggatggacaagcttggccgcaccattgcagaccattgccccgactcggcttgcaagcaggacctgctggcctacctgcaacgcatcgccctctactgccaccagctgaacatctgcagcaaggtcaaggccgaggtgcagaatctcggcggggagcttgttgtctctggggtggacagcgccatgtccctgatccaggcagccaagaacttgatgaatgctgtggtgcagacagtgaaggcatcctacgtcgcctctaccaaataccaaaagtcacagggtatggcttccctcaaccttcctgctgtgtcatggaagatgaaggcaccagagaaaaagccattggtgaagagagagaaacaggatgagacacagaccaagattaaacgggcatctcagaagaagcacgtgaacccggtgcaggccctcagcgagttcaaagctatggacagcatctaagtctgcccaggccggccgcccccacccctcggggctcctgaatatcagtcactgttcgtcactcaaatgaatttgctaaatacaacactgatactagattccacagggaaatgggcagactgaaccagtccaggtggtgaattttccaagaacatagtttaagttgattaaaaatgcttttagaatgcaggagcctacttctagctgtattttttgtatgcttaaataaaaataaaaattcataaccaaagagaatcccacattagcttgttagtaatgctctgaccaagccgagatgcccattctcttagtgatggcggcgttagggtttgagagaagggaatttggctcaacttcagttgagagggtgcagtccagacagcttgactgcttttaaatgaccaaagatgacctgtggtaagcaacctgggcatcttaggaagcagtccctggagaaggcatgttcccagaaaggtctctggagggacaaactcactcagtaaaacataatgtatcatgaagaaaactgattctctatgacatgaaatgaaaattttaatgcattgttataattactaatgtacgctgctgcaggacattaataaagttgcttttttaggctacagtgtctcgatgccataatcagaacacactttttttcctctttctcccagcttcaaatgcaaattcatcattgggctcacttctaataactgcagtgtttcccgccttgggcttgcagcagaaaaacctgacaacatagtgtttgctaaggcagtaatttagactttaccttatttgtgattactgtagtgattgattgattgattactattaactacaaggtataatttactatcaccttatttaaattttatgaattaatttgaatgttttttacactaactaacttttcccaataaagtccactatgaaaccacgaca

SEQ ID NO: 122075 - DNA, 2741 bp, Artificial Sequence
  derived and/or modified sequence
tttcctcctcctagccggactggagggagacaaagcagcgcccgtctgcttcgggcctctggaatttagcgctcgcccagctagccgcagaaatgactgctgtccatgcaggcaacataaacttcaagtgggatcctaaaagtctagagatcaggactctggcagttgagagactgttggagcctcttgttacacaggtgatttgatgaaggctgctgcaggagagttcgcagatgatccctgctcttctgtgaagcgaggcaacatggttcgggcagctcgagctttgctctctgctgttacccggttgctgattttggctgacatggcagatgtctacaaattacttgttcagctgaaagttgtggaagatggtatcttgaagttgaggaatgctggcaatgaacaagacttaggaatccagtataaagccctaaaacctgaagtggataagctgaacattatggcagccaaaagacaacaggaattgaaagatgttggccatcgtgatcagatggctgcagctagaggaatcctgcagaagaacgttccgatcctctatactgcatcccaggcatgcctacagcaccctgatgtcgcagcctataaggccaacagggacctgatatacaagcagctgcagcaggcggtcacaggcatttccaatgcagcccaggccactgcctcagacgatgcctcacagcaccagggtggaggaggaggagaactggcatatgcactcaataactttgacaaacaaatcattgtggaccccttgagcttcagcgaggagcgctttaggccttccctggaggagcgtctggaaagcatcattagtggggctgccttgatggccgactcgtcctgcacgcgtgatgaccgtcgtgagcgaattgtggcagagtgtaatgctgtccgccaggccctgcaggacctgctttcggagtacatgggcaatgctggacgtaaagaaagaagtgatgcactcaattctgcaatagataaaatgaccaagaagaccagggacttgcgtagacagctccgcaaagctgtcatggaccacgtttcagattctttcctggaaaccaatgttccacttttggtattgattgaagctgcaaagaatggaaatgagaaagaagttaaggagtatgcccaagttttccgtgaacatgccaacaaattgattgaggttgccaacttggcctgttccatctcaaataatgaagaaggtgtaaagcttgttcgaatgtctgcaagccagttagaagccctctgtcctcaggttattaatgctgcactggctttagcagcaaaaccacagagtaaactggcccaagagaacatggatctttttaaagaacaatgggaaaaacaagtccgtgttctcacagatgctgtcgatgacattacttccattgatgacttcttggctgtctcagagaatcacattttggaagatgtgaacaaatgtgtcattgctctccaagagaaggatgtggatggcctggaccgcacagctggtgcaattcgaggccgggcagcccgggtcattcacgtagtcacctcagagatggacaactatgagccaggagtctacacagagaaggttctggaagccactaagctgctctccaacacagtcatgccacgttttactgagcaagtagaagcagccgtggaagccctcagctcggaccctgcccagcccatggatgagaatgagtttatcgatgcttcccgcctggtatatgatggcatccgggacatcaggaaagcagtgctgatgataaggacccctgaggagttggatgactctgactttgagacagaagattttgatgtcagaagcaggacgagcgtccagacagaagacgatcagctgatagctggccagagtgcccgggcgatcatggctcagcttccccaggagcaaaaagcgaagattgcggaacaggtggccagcttccaggaagaaaagagcaagctggatgctgaagtgtccaaatgggacgacagtggcaatgacatcattgtgctggccaagcagatgtgcatgattatgatggagatgacagactttacccgaggtaaaggaccactcaaaaatacatcggatgtcatcagtgctgccaagaaaattgctgaggcaggatccaggatggacaagcttggccgcaccattgcagaccattgccccgactcggcttgcaagcaggacctgctggcctacctgcaacgcatcgccctctactgccaccagctgaacatctgcagcaaggtcaaggccgaggtgcagaatctcggcggggagcttgttgtctctggggtggacagcgccatgtccctgatccaggcagccaagaacttgatgaatgctgtggtgcagacagtgaaggcatcctacgtcgcctctaccaaataccaaaagtcacagggtatggcttccctcaaccttcctgctgtgtcatggaagatgaaggcaccagagaaaaagccattggtgaagagagagaaacaggatgagacacagaccaagattaaacgggcatctcagaagaagcacgtgaacccggtgcaggccctcagcgagttcaaagctatggacagcatctaagtctgcccaggccggccgcccccacccctcggggctcctgaatatcagtcactgttcgtcactcaaatgaatttgctaaatacaacactgatactagattccacagggaaatgggcagactgaa

SEQ ID NO: 122076 - DNA, 3800 bp, Artificial Sequence
  derived and/or modified sequence
gagacaaagcagcgcccgtctgcttcgggcctctggaatttagcgctcgcccagctagccgcagaaatgactgctgtccatgcaggcaacataaacttcaagtgggatcctaaaagtctagagatcaggactctggcagttgagagactgttggagcctcttgttacacaggttacaacccttgtaaacaccaatagtaaagggccctctaataagaagagaggtcgttctaagaaggcccatgttttggctgcatctgttgaacaagcaactgagaatttcttggagaagggggataaaattgcgaaggagagccagtttctcaaggaggagcttgtggctgctgtagaagatgttcgaaaacaaggtgatttgatgaaggctgctgcaggagagttcgcagatgatccctgctcttctgtgaagcgaggcaacatggttcgggcagctcgagctttgctctctgctgttacccggttgctgattttggctgacatggcagatgtctacaaattacttgttcagctgaaagttgtggaagatggtatcttgaagttgaggaatgctggcaatgaacaagacttaggaatccagtataaagccctaaaacctgaagtggataagctgaacattatggcagccaaaagacaacaggaattgaaagatgttggccatcgtgatcagatggctgcagctagaggaatcctgcagaagaacgttccgatcctctatactgcatcccaggcatgcctacagcaccctgatgtcgcagcctataaggccaacagggacctgatatacaagcagctgcagcaggcggtcacaggcatttccaatgcagcccaggccactgcctcagacgatgcctcacagcaccagggtggaggaggaggagaactggcatatgcactcaataactttgacaaacaaatcattgtggaccccttgagcttcagcgaggagcgctttaggccttccctggaggagcgtctggaaagcatcattagtggggctgccttgatggccgactcgtcctgcacgcgtgatgaccgtcgtgagcgaattgtggcagagtgtaatgctgtccgccaggccctgcaggacctgctttcggagtacatgggcaatgctggacgtaaagaaagaagtgatgcactcaattctgcaatagataaaatgaccaagaagaccagggacttgcgtagacagctccgcaaagctgtcatggaccacgtttcagattctttcctggaaaccaatgttccacttttggtattgattgaagctgcaaagaatggaaatgagaaagaagttaaggagtatgcccaagttttccgtgaacatgccaacaaattgattgaggttgccaacttggcctgttccatctcaaataatgaagaaggtgtaaagcttgttcgaatgtctgcaagccagttagaagccctctgtcctcaggttattaatgctgcactggctttagcagcaaaaccacagagtaaactggcccaagagaacatggatctttttaaagaacaatgggaaaaacaagtccgtgttctcacagatgctgtcgatgacattacttccattgatgacttcttggctgtctcagagaatcacattttggaagatgtgaacaaatgtgtcattgctctccaagagaaggatgtggatggcctggaccgcacagctggtgcaattcgaggccgggcagcccgggtcattcacgtagtcacctcagagatggacaactatgagccaggagtctacacagagaaggttctggaagccactaagctgctctccaacacagtcatgccacgttttactgagcaagtagaagcagccgtggaagccctcagctcggaccctgcccagcccatggatgagaatgagtttatcgatgcttcccgcctggtatatgatggcatccgggacatcaggaaagcagtgctgatgataaggacccctgaggagttggatgactctgactttgagacagaagattttgatgtcagaagcaggacgagcgtccagacagaagacgatcagctgatagctggccagagtgcccgggcgatcatggctcagcttccccaggagcaaaaagcgaagattgcggaacaggtggccagcttccaggaagaaaagagcaagctggatgctgaagtgtccaaatgggacgacagtggcaatgacatcattgtgctggccaagcagatgtgcatgattatgatggagatgacagactttacccgaggtaaaggaccactcaaaaatacatcggatgtcatcagtgctgccaagaaaattgctgaggcaggatccaggatggacaagcttggccgcaccattgcagaccattgccccgactcggcttgcaagcaggacctgctggcctacctgcaacgcatcgccctctactgccaccagctgaacatctgcagcaaggtcaaggccgaggtgcagaatctcggcggggagcttgttgtctctgggaactgtgacacctgcggggcactgcaagggctgaaaggctggcctcctcccctttgcgccactcactgggtggacagcgccatgtccctgatccaggcagccaagaacttgatgaatgctgtggtgcagacagtgaaggcatcctacgtcgcctctaccaaataccaaaagtcacagggtatggcttccctcaaccttcctgctgtgtcatggaagatgaaggcaccagagaaaaagccattggtgaagagagagaaacaggatgagacacagaccaagattaaacgggcatctcagaagaagcacgtgaacccggtgcaggccctcagcgagttcaaagctatggacagcatctaagtctgcccaggccggccgcccccacccctcggggctcctgaatatcagtcactgttcgtcactcaaatgaatttgctaaatacaacactgatactagattccacagggaaatgggcagactgaaccagtccaggtggtgaattttccaagaacatagtttaagttgattaaaaatgcttttagaatgcaggagcctacttctagctgtattttttgtatgcttaaataaaaataaaaattcataaccaaagagaatcccacattagcttgttagtaatgctctgaccaagccgagatgcccattctcttagtgatggcggcgttagggtttgagagaagggaatttggctcaacttcagttgagagggtgcagtccagacagcttgactgcttttaaatgaccaaagatgacctgtggtaagcaacctgggcatcttaggaagcagtccctggagaaggcatgttcccagaaaggtctctggagggacaaactcactcagtaaaacataatgtatcatgaagaaaactgattctctatgacatgaaatgaaaattttaatgcattgttataattactaatgtacgctgctgcaggacattaataaagttgcttttttaggctacagtgtctcgatgccataatcagaacacactttttttcctctttctcccagcttcaaatgcaaattcatcattgggctcacttctaataactgcagtgtttcccgccttgggcttgcagcagaaaaacctgacaacatagtgtttgctaaggcagtaatttagactttaccttatttgtgattactgtagtgattgattgattgattactattaactacaaggtataatttactatcaccttatttaaattttatgaattaatttgaatgttttttacactaactaacttttcccaataaagtccactatgaaaccacgac

SEQ ID NO: 122077 - DNA, 3686 bp, Artificial Sequence
  derived and/or modified sequence
gagacaaagcagcgcccgtctgcttcgggcctctggaatttagcgctcgcccagctagccgcagaaatgactgctgtccatgcaggcaacataaacttcaagtgggatcctaaaagtctagagatcaggactctggcagttgagagactgttggagcctcttgttacacaggttacaacccttgtaaacaccaatagtaaagggccctctaataagaagagaggtcgttctaagaaggcccatgttttggctgcatctgttgaacaagcaactgagaatttcttggagaagggggataaaattgcgaaggagagccagtttctcaaggaggagcttgtggctgctgtagaagatgttcgaaaacaaggtgatttgatgaaggctgctgcaggagagttcgcagatgatccctgctcttctgtgaagcgaggcaacatggttcgggcagctcgagctttgctctctgctgttacccggttgctgaaagttgtggaagatggtatcttgaagttgaggaatgctggcaatgaacaagacttaggaatccagtataaagccctaaaacctgaagtggataagctgaacattatggcagccaaaagacaacaggaattgaaagatgttggccatcgtgatcagatggctgcagctagaggaatcctgcagaagaacgttccgatcctctatactgcatcccaggcatgcctacagcaccctgatgtcgcagcctataaggccaacagggacctgatatacaagcagctgcagcaggcggtcacaggcatttccaatgcagcccaggccactgcctcagacgatgcctcacagcaccagggtggaggaggaggagaactggcatatgcactcaataactttgacaaacaaatcattgtggaccccttgagcttcagcgaggagcgctttaggccttccctggaggagcgtctggaaagcatcattagtggggctgccttgatggccgactcgtcctgcacgcgtgatgaccgtcgtgagcgaattgtggcagagtgtaatgctgtccgccaggccctgcaggacctgctttcggagtacatgggcaatgctggacgtaaagaaagaagtgatgcactcaattctgcaatagataaaatgaccaagaagaccagggacttgcgtagacagctccgcaaagctgtcatggaccacgtttcagattctttcctggaaaccaatgttccacttttggtattgattgaagctgcaaagaatggaaatgagaaagaagttaaggagtatgcccaagttttccgtgaacatgccaacaaattgattgaggttgccaacttggcctgttccatctcaaataatgaagaaggtgtaaagcttgttcgaatgtctgcaagccagttagaagccctctgtcctcaggttattaatgctgcactggctttagcagcaaaaccacagagtaaactggcccaagagaacatggatctttttaaagaacaatgggaaaaacaagtccgtgttctcacagatgctgtcgatgacattacttccattgatgacttcttggctgtctcagagaatcacattttggaagatgtgaacaaatgtgtcattgctctccaagagaaggatgtggatggcctggaccgcacagctggtgcaattcgaggccgggcagcccgggtcattcacgtagtcacctcagagatggacaactatgagccaggagtctacacagagaaggttctggaagccactaagctgctctccaacacagtcatgccacgttttactgagcaagtagaagcagccgtggaagccctcagctcggaccctgcccagcccatggatgagaatgagtttatcgatgcttcccgcctggtatatgatggcatccgggacatcaggaaagcagtgctgatgataaggacccctgaggagttggatgactctgactttgagacagaagattttgatgtcagaagcaggacgagcgtccagacagaagacgatcagctgatagctggccagagtgcccgggcgatcatggctcagcttccccaggagcaaaaagcgaagattgcggaacaggtggccagcttccaggaagaaaagagcaagctggatgctgaagtgtccaaatgggacgacagtggcaatgacatcattgtgctggccaagcagatgtgcatgattatgatggagatgacagactttacccgaggtaaaggaccactcaaaaatacatcggatgtcatcagtgctgccaagaaaattgctgaggcaggatccaggatggacaagcttggccgcaccattgcagaccattgccccgactcggcttgcaagcaggacctgctggcctacctgcaacgcatcgccctctactgccaccagctgaacatctgcagcaaggtcaaggccgaggtgcagaatctcggcggggagcttgttgtctctggggtggacagcgccatgtccctgatccaggcagccaagaacttgatgaatgctgtggtgcagacagtgaaggcatcctacgtcgcctctaccaaataccaaaagtcacagggtatggcttccctcaaccttcctgctgtgtcatggaagatgaaggcaccagagaaaaagccattggtgaagagagagaaacaggatgagacacagaccaagattaaacgggcatctcagaagaagcacgtgaacccggtgcaggccctcagcgagttcaaagctatggacagcatctaagtctgcccaggccggccgcccccacccctcggggctcctgaatatcagtcactgttcgtcactcaaatgaatttgctaaatacaacactgatactagattccacagggaaatgggcagactgaaccagtccaggtggtgaattttccaagaacatagtttaagttgattaaaaatgcttttagaatgcaggagcctacttctagctgtattttttgtatgcttaaataaaaataaaaattcataaccaaagagaatcccacattagcttgttagtaatgctctgaccaagccgagatgcccattctcttagtgatggcggcgttagggtttgagagaagggaatttggctcaacttcagttgagagggtgcagtccagacagcttgactgcttttaaatgaccaaagatgacctgtggtaagcaacctgggcatcttaggaagcagtccctggagaaggcatgttcccagaaaggtctctggagggacaaactcactcagtaaaacataatgtatcatgaagaaaactgattctctatgacatgaaatgaaaattttaatgcattgttataattactaatgtacgctgctgcaggacattaataaagttgcttttttaggctacagtgtctcgatgccataatcagaacacactttttttcctctttctcccagcttcaaatgcaaattcatcattgggctcacttctaataactgcagtgtttcccgccttgggcttgcagcagaaaaacctgacaacatagtgtttgctaaggcagtaatttagactttaccttatttgtgattactgtagtgattgattgattgattactattaactacaaggtataatttactatcaccttatttaaattttatgaattaatttgaatgttttttacactaactaacttttcccaataaagtccactatgaaaccacgac

SEQ ID NO: 122078 - DNA, 2721 bp, Artificial Sequence
  derived and/or modified sequence
atgaccgccgtgcacgccggcaacatcaacttcaagtgggaccccaagagcctggagatcagaaccctggccgtggagagactgctggagcccctggtgacccaggtgaccaccctggtgaacaccaacagcaagggccccagcaacaagaagagaggcagaagcaagaaggcccacgtgctggccgccagcgtggagcaggccaccgagaacttcctggagaagggcgacaagatcgccaaggagagccagttcctgaaggaggagctggtggccgccgtggaggacgtgagaaagcagggcgacctgatgaaggccgccgccggcgagttcgccgacgacccctgcagcagcgtgaagagaggcaacatggtgagagccgccagagccctgctgagcgccgtgaccagactgctgatcctggccgacatggccgacgtgtacaagctgctggtgcagctgaaggtggtggaggacggcatcctgaagctgagaaacgccggcaacgagcaggacctgggcatccagtacaaggccctgaagcccgaggtggacaagctgaacatcatggccgccaagagacagcaggagctgaaggacgtgggccacagagaccagatggccgccgccagaggcatcctgcagaagaacgtgcccatcctgtacaccgccagccaggcctgcctgcagcaccccgacgtggccgcctacaaggccaacagagacctgatctacaagcagctgcagcaggccgtgaccggcatcagcaacgccgcccaggccaccgccagcgacgacgccagccagcaccagggcggcggcggcggcgagctggcctacgccctgaacaacttcgacaagcagatcatcgtggaccccctgagcttcagcgaggagagattcagacccagcctggaggagagactggagagcatcatcagcggcgccgccctgatggccgacagcagctgcaccagagacgacagaagagagagaatcgtggccgagtgcaacgccgtgagacaggccctgcaggacctgctgagcgagtacatgggcaacgccggcagaaaggagagaagcgacgccctgaacagcgccatcgacaagatgaccaagaagaccagagacctgagaagacagctgagaaaggccgtgatggaccacgtgagcgacagcttcctggagaccaacgtgcccctgctggtgctgatcgaggccgccaagaacggcaacgagaaggaggtgaaggagtacgcccaggtgttcagagagcacgccaacaagctgatcgaggtggccaacctggcctgcagcatcagcaacaacgaggagggcgtgaagctggtgagaatgagcgccagccagctggaggccctgtgcccccaggtgatcaacgccgccctggccctggccgccaagccccagagcaagctggcccaggagaacatggacctgttcaaggagcagtgggagaagcaggtgagagtgctgaccgacgccgtggacgacatcaccagcatcgacgacttcctggccgtgagcgagaaccacatcctggaggacgtgaacaagtgcgtgatcgccctgcaggagaaggacgtggacggcctggacagaaccgccggcgccatcagaggcagagccgccagagtgatccacgtggtgaccagcgagatggacaactacgagcccggcgtgtacaccgagaaggtgctggaggccaccaagctgctgagcaacaccgtgatgcccagattcaccgagcaggtggaggccgccgtggaggccctgagcagcgaccccgcccagcccatggacgagaacgagttcatcgacgccagcagactggtgtacgacggcatcagagacatcagaaaggccgtgctgatgatcagaacccccgaggagctggacgacagcgacttcgagaccgaggacttcgacgtgagaagcagaaccagcgtgcagaccgaggacgaccagctgatcgccggccagagcgccagagccatcatggcccagctgccccaggagcagaaggccaagatcgccgagcaggtggccagcttccaggaggagaagagcaagctggacgccgaggtgagcaagtgggacgacagcggcaacgacatcatcgtgctggccaagcagatgtgcatgatcatgatggagatgaccgacttcaccagaggcaagggccccctgaagaacaccagcgacgtgatcagcgccgccaagaagatcgccgaggccggcagcagaatggacaagctgggcagaaccatcgccgaccactgccccgacagcgcctgcaagcaggacctgctggcctacctgcagagaatcgccctgtactgccaccagctgaacatctgcagcaaggtgaaggccgaggtgcagaacctgggcggcgagctggtggtgagcggcgtggacagcgccatgagcctgatccaggccgccaagaacctgatgaacgccgtggtgcagaccgtgaaggccagctacgtggccagcaccaagtaccagaagagccagggcatggccagcctgaacctgcccgccgtgagctggaagatgaaggcccccgagaagaagcccctggtgaagagagagaagcaggacgagacccagaccaagatcaagagagccagccagaagaagcacgtgaaccccgtgcaggccctgagcgagttcaaggccatggacagcatctag

SEQ ID NO: 122079 - DNA, 2412 bp, Artificial Sequence
  derived and/or modified sequence
atgaaggccgccgccggcgagttcgccgacgacccctgcagcagcgtgaagagaggcaacatggtgagagccgccagagccctgctgagcgccgtgaccagactgctgatcctggccgacatggccgacgtgtacaagctgctggtgcagctgaaggtggtggaggacggcatcctgaagctgagaaacgccggcaacgagcaggacctgggcatccagtacaaggccctgaagcccgaggtggacaagctgaacatcatggccgccaagagacagcaggagctgaaggacgtgggccacagagaccagatggccgccgccagaggcatcctgcagaagaacgtgcccatcctgtacaccgccagccaggcctgcctgcagcaccccgacgtggccgcctacaaggccaacagagacctgatctacaagcagctgcagcaggccgtgaccggcatcagcaacgccgcccaggccaccgccagcgacgacgccagccagcaccagggcggcggcggcggcgagctggcctacgccctgaacaacttcgacaagcagatcatcgtggaccccctgagcttcagcgaggagagattcagacccagcctggaggagagactggagagcatcatcagcggcgccgccctgatggccgacagcagctgcaccagagacgacagaagagagagaatcgtggccgagtgcaacgccgtgagacaggccctgcaggacctgctgagcgagtacatgggcaacgccggcagaaaggagagaagcgacgccctgaacagcgccatcgacaagatgaccaagaagaccagagacctgagaagacagctgagaaaggccgtgatggaccacgtgagcgacagcttcctggagaccaacgtgcccctgctggtgctgatcgaggccgccaagaacggcaacgagaaggaggtgaaggagtacgcccaggtgttcagagagcacgccaacaagctgatcgaggtggccaacctggcctgcagcatcagcaacaacgaggagggcgtgaagctggtgagaatgagcgccagccagctggaggccctgtgcccccaggtgatcaacgccgccctggccctggccgccaagccccagagcaagctggcccaggagaacatggacctgttcaaggagcagtgggagaagcaggtgagagtgctgaccgacgccgtggacgacatcaccagcatcgacgacttcctggccgtgagcgagaaccacatcctggaggacgtgaacaagtgcgtgatcgccctgcaggagaaggacgtggacggcctggacagaaccgccggcgccatcagaggcagagccgccagagtgatccacgtggtgaccagcgagatggacaactacgagcccggcgtgtacaccgagaaggtgctggaggccaccaagctgctgagcaacaccgtgatgcccagattcaccgagcaggtggaggccgccgtggaggccctgagcagcgaccccgcccagcccatggacgagaacgagttcatcgacgccagcagactggtgtacgacggcatcagagacatcagaaaggccgtgctgatgatcagaacccccgaggagctggacgacagcgacttcgagaccgaggacttcgacgtgagaagcagaaccagcgtgcagaccgaggacgaccagctgatcgccggccagagcgccagagccatcatggcccagctgccccaggagcagaaggccaagatcgccgagcaggtggccagcttccaggaggagaagagcaagctggacgccgaggtgagcaagtgggacgacagcggcaacgacatcatcgtgctggccaagcagatgtgcatgatcatgatggagatgaccgacttcaccagaggcaagggccccctgaagaacaccagcgacgtgatcagcgccgccaagaagatcgccgaggccggcagcagaatggacaagctgggcagaaccatcgccgaccactgccccgacagcgcctgcaagcaggacctgctggcctacctgcagagaatcgccctgtactgccaccagctgaacatctgcagcaaggtgaaggccgaggtgcagaacctgggcggcgagctggtggtgagcggcgtggacagcgccatgagcctgatccaggccgccaagaacctgatgaacgccgtggtgcagaccgtgaaggccagctacgtggccagcaccaagtaccagaagagccagggcatggccagcctgaacctgcccgccgtgagctggaagatgaaggcccccgagaagaagcccctggtgaagagagagaagcaggacgagacccagaccaagatcaagagagccagccagaagaagcacgtgaaccccgtgcaggccctgagcgagttcaaggccatggacagcatctag

SEQ ID NO: 122080 - DNA, 2790 bp, Artificial Sequence
  derived and/or modified sequence
atgaccgccgtgcacgccggcaacatcaacttcaagtgggaccccaagagcctggagatcagaaccctggccgtggagagactgctggagcccctggtgacccaggtgaccaccctggtgaacaccaacagcaagggccccagcaacaagaagagaggcagaagcaagaaggcccacgtgctggccgccagcgtggagcaggccaccgagaacttcctggagaagggcgacaagatcgccaaggagagccagttcctgaaggaggagctggtggccgccgtggaggacgtgagaaagcagggcgacctgatgaaggccgccgccggcgagttcgccgacgacccctgcagcagcgtgaagagaggcaacatggtgagagccgccagagccctgctgagcgccgtgaccagactgctgatcctggccgacatggccgacgtgtacaagctgctggtgcagctgaaggtggtggaggacggcatcctgaagctgagaaacgccggcaacgagcaggacctgggcatccagtacaaggccctgaagcccgaggtggacaagctgaacatcatggccgccaagagacagcaggagctgaaggacgtgggccacagagaccagatggccgccgccagaggcatcctgcagaagaacgtgcccatcctgtacaccgccagccaggcctgcctgcagcaccccgacgtggccgcctacaaggccaacagagacctgatctacaagcagctgcagcaggccgtgaccggcatcagcaacgccgcccaggccaccgccagcgacgacgccagccagcaccagggcggcggcggcggcgagctggcctacgccctgaacaacttcgacaagcagatcatcgtggaccccctgagcttcagcgaggagagattcagacccagcctggaggagagactggagagcatcatcagcggcgccgccctgatggccgacagcagctgcaccagagacgacagaagagagagaatcgtggccgagtgcaacgccgtgagacaggccctgcaggacctgctgagcgagtacatgggcaacgccggcagaaaggagagaagcgacgccctgaacagcgccatcgacaagatgaccaagaagaccagagacctgagaagacagctgagaaaggccgtgatggaccacgtgagcgacagcttcctggagaccaacgtgcccctgctggtgctgatcgaggccgccaagaacggcaacgagaaggaggtgaaggagtacgcccaggtgttcagagagcacgccaacaagctgatcgaggtggccaacctggcctgcagcatcagcaacaacgaggagggcgtgaagctggtgagaatgagcgccagccagctggaggccctgtgcccccaggtgatcaacgccgccctggccctggccgccaagccccagagcaagctggcccaggagaacatggacctgttcaaggagcagtgggagaagcaggtgagagtgctgaccgacgccgtggacgacatcaccagcatcgacgacttcctggccgtgagcgagaaccacatcctggaggacgtgaacaagtgcgtgatcgccctgcaggagaaggacgtggacggcctggacagaaccgccggcgccatcagaggcagagccgccagagtgatccacgtggtgaccagcgagatggacaactacgagcccggcgtgtacaccgagaaggtgctggaggccaccaagctgctgagcaacaccgtgatgcccagattcaccgagcaggtggaggccgccgtggaggccctgagcagcgaccccgcccagcccatggacgagaacgagttcatcgacgccagcagactggtgtacgacggcatcagagacatcagaaaggccgtgctgatgatcagaacccccgaggagctggacgacagcgacttcgagaccgaggacttcgacgtgagaagcagaaccagcgtgcagaccgaggacgaccagctgatcgccggccagagcgccagagccatcatggcccagctgccccaggagcagaaggccaagatcgccgagcaggtggccagcttccaggaggagaagagcaagctggacgccgaggtgagcaagtgggacgacagcggcaacgacatcatcgtgctggccaagcagatgtgcatgatcatgatggagatgaccgacttcaccagaggcaagggccccctgaagaacaccagcgacgtgatcagcgccgccaagaagatcgccgaggccggcagcagaatggacaagctgggcagaaccatcgccgaccactgccccgacagcgcctgcaagcaggacctgctggcctacctgcagagaatcgccctgtactgccaccagctgaacatctgcagcaaggtgaaggccgaggtgcagaacctgggcggcgagctggtggtgagcggcaactgcgacacctgcggcgccctgcagggcctgaagggctggcccccccccctgtgcgccacccactgggtggacagcgccatgagcctgatccaggccgccaagaacctgatgaacgccgtggtgcagaccgtgaaggccagctacgtggccagcaccaagtaccagaagagccagggcatggccagcctgaacctgcccgccgtgagctggaagatgaaggcccccgagaagaagcccctggtgaagagagagaagcaggacgagacccagaccaagatcaagagagccagccagaagaagcacgtgaaccccgtgcaggccctgagcgagttcaaggccatggacagcatctag

SEQ ID NO: 122081 - DNA, 2676 bp, Artificial Sequence
  derived and/or modified sequence
atgaccgccgtgcacgccggcaacatcaacttcaagtgggaccccaagagcctggagatcagaaccctggccgtggagagactgctggagcccctggtgacccaggtgaccaccctggtgaacaccaacagcaagggccccagcaacaagaagagaggcagaagcaagaaggcccacgtgctggccgccagcgtggagcaggccaccgagaacttcctggagaagggcgacaagatcgccaaggagagccagttcctgaaggaggagctggtggccgccgtggaggacgtgagaaagcagggcgacctgatgaaggccgccgccggcgagttcgccgacgacccctgcagcagcgtgaagagaggcaacatggtgagagccgccagagccctgctgagcgccgtgaccagactgctgaaggtggtggaggacggcatcctgaagctgagaaacgccggcaacgagcaggacctgggcatccagtacaaggccctgaagcccgaggtggacaagctgaacatcatggccgccaagagacagcaggagctgaaggacgtgggccacagagaccagatggccgccgccagaggcatcctgcagaagaacgtgcccatcctgtacaccgccagccaggcctgcctgcagcaccccgacgtggccgcctacaaggccaacagagacctgatctacaagcagctgcagcaggccgtgaccggcatcagcaacgccgcccaggccaccgccagcgacgacgccagccagcaccagggcggcggcggcggcgagctggcctacgccctgaacaacttcgacaagcagatcatcgtggaccccctgagcttcagcgaggagagattcagacccagcctggaggagagactggagagcatcatcagcggcgccgccctgatggccgacagcagctgcaccagagacgacagaagagagagaatcgtggccgagtgcaacgccgtgagacaggccctgcaggacctgctgagcgagtacatgggcaacgccggcagaaaggagagaagcgacgccctgaacagcgccatcgacaagatgaccaagaagaccagagacctgagaagacagctgagaaaggccgtgatggaccacgtgagcgacagcttcctggagaccaacgtgcccctgctggtgctgatcgaggccgccaagaacggcaacgagaaggaggtgaaggagtacgcccaggtgttcagagagcacgccaacaagctgatcgaggtggccaacctggcctgcagcatcagcaacaacgaggagggcgtgaagctggtgagaatgagcgccagccagctggaggccctgtgcccccaggtgatcaacgccgccctggccctggccgccaagccccagagcaagctggcccaggagaacatggacctgttcaaggagcagtgggagaagcaggtgagagtgctgaccgacgccgtggacgacatcaccagcatcgacgacttcctggccgtgagcgagaaccacatcctggaggacgtgaacaagtgcgtgatcgccctgcaggagaaggacgtggacggcctggacagaaccgccggcgccatcagaggcagagccgccagagtgatccacgtggtgaccagcgagatggacaactacgagcccggcgtgtacaccgagaaggtgctggaggccaccaagctgctgagcaacaccgtgatgcccagattcaccgagcaggtggaggccgccgtggaggccctgagcagcgaccccgcccagcccatggacgagaacgagttcatcgacgccagcagactggtgtacgacggcatcagagacatcagaaaggccgtgctgatgatcagaacccccgaggagctggacgacagcgacttcgagaccgaggacttcgacgtgagaagcagaaccagcgtgcagaccgaggacgaccagctgatcgccggccagagcgccagagccatcatggcccagctgccccaggagcagaaggccaagatcgccgagcaggtggccagcttccaggaggagaagagcaagctggacgccgaggtgagcaagtgggacgacagcggcaacgacatcatcgtgctggccaagcagatgtgcatgatcatgatggagatgaccgacttcaccagaggcaagggccccctgaagaacaccagcgacgtgatcagcgccgccaagaagatcgccgaggccggcagcagaatggacaagctgggcagaaccatcgccgaccactgccccgacagcgcctgcaagcaggacctgctggcctacctgcagagaatcgccctgtactgccaccagctgaacatctgcagcaaggtgaaggccgaggtgcagaacctgggcggcgagctggtggtgagcggcgtggacagcgccatgagcctgatccaggccgccaagaacctgatgaacgccgtggtgcagaccgtgaaggccagctacgtggccagcaccaagtaccagaagagccagggcatggccagcctgaacctgcccgccgtgagctggaagatgaaggcccccgagaagaagcccctggtgaagagagagaagcaggacgagacccagaccaagatcaagagagccagccagaagaagcacgtgaaccccgtgcaggccctgagcgagttcaaggccatggacagcatctag

SEQ ID NO: 122082 - protein, 263 aa, Artificial Sequence
  derived and/or modified sequence
MASLWLLSCFSLVGAAFGCGVPAIHPVLSGLSRIVNGEDAVPGSWPWQVSLQDKTGFHFCGGSLISEDWVVTAAHCGVRTSDVVVAGEFDQGSDEENIQVLKIAKVFKNPKFSILTVNNDITLLKLATPARFSQTVSAVCLPSADDDFPAGTLCATTGWGKTKYNANKTPDKLQQAALPLLSNAECKKSWGRRITDVMICAGASGVSSCMGDSGGPLVCQKDGAWTLVGIVSWGSDTCSTSSPGVYARVTKLIPWVQKILAAN

SEQ ID NO: 122083 - DNA, 792 bp, Artificial Sequence
  derived and/or modified sequence
atggccagcctctggctgttgtcctgttttagtctcgtcggagccgccttcggatgtggggtgcctgccattcacccggttctcagcggtcttagtcggatagtgaatggcgaggacgcagtgcccgggtcgtggccttggcaagtgtccttgcaagataaaacagggttccacttttgcgggggatcacttattagcgaagactgggtggtgaccgccgcccactgcggcgtccgaacttcagatgtagtggttgcaggggaattcgaccagggctccgatgaggagaatatccaggtgctgaagatcgcaaaggtctttaaaaatcccaaattctctattcttactgtgaacaatgatatcacactcctgaagctggcgacgccagctagattcagccaaacagtgtccgctgtctgcttgcctagcgccgacgatgattttcctgctggaaccttgtgtgccacaaccgggtggggcaaaaccaagtacaatgccaacaagacaccagacaaactgcagcaagcagcgctcccgctgctaagtaacgccgaatgcaagaaatcttggggcagacgcatcacagatgtcatgatttgcgcaggtgctagcggggtttcctcttgtatgggggattccggcgggccgctcgtgtgccagaaagatggcgcctggaccttggtcgggattgtcagttgggggtctgatacctgcagtacttcttcacccggggtgtacgccagagtaaccaagctgatcccttgggtgcaaaaaattctggccgccaattag

SEQ ID NO: 122084 - DNA, 792 bp, Artificial Sequence
  derived and/or modified sequence
atggccagcctgtggctgctgagctgcttcagcctggtgggcgccgccttcggctgcggcgtgcctgccatccaccctgtgctgagcggcctgagccgcatcgtgaatggagaagatgctgtgcccggctcctggccctggcaggtgtccctgcaggacaagacaggcttccacttctgtggcggcagcctcatcagcgaggactgggtggtgacagctgcccactgcggcgtgaggaccagtgatgtggtggtggccggggagtttgaccagggcagtgatgaggagaacatccaggtgctgaagatcgccaaggtgttcaagaaccccaagttcagcatcctgactgtgaacaatgacatcaccctgctgaagctggccaccccagcccgcttcagccagacagtgtctgctgtgtgcctgcccagcgcagatgatgacttccctgctggcaccctgtgtgccaccaccggctggggcaagaccaagtacaatgccaacaagaccccagacaagctgcagcaggccgccctgcccctgctgagcaatgctgagtgcaagaagtcctggggccgccgcatcacagatgtgatgatctgtgccggggccagcggcgtgagcagctgcatgggagacagcggcggccccctggtgtgccagaaggatggagcctggaccctggtgggcatcgtgtcctggggcagtgacacctgcagcaccagcagccctggggtgtatgcccgggtgaccaagctgatcccctgggtgcagaagatcctggccgccaactag

SEQ ID NO: 122085 - DNA, 792 bp, Artificial Sequence
  derived and/or modified sequence
atggccagcctgtggctgctgagctgcttcagcctggtgggcgccgccttcgggtgcggagtgcctgccatccacccagtcctatcggggttaagccggatcgttaatggcgaagatgccgtgcccggttcctggccctggcaagtttcattacaagacaagacaggatttcacttctgcggcggctctcttatttcagaggattgggtagtaaccgcagcccactgtggcgtccgaacctctgacgtggtggttgcaggagagttcgaccaaggttcagacgaggaaaacatccaggttttgaaaattgccaaggtgtttaagaaccccaagttttctattctgaccgtgaacaatgacatcaccctactgaaactcgcaacaccggcgaggttctctcagacggtaagcgccgtatgcctccccagtgctgacgacgattttcctgccggcaccctctgcgcgacaaccggatggggaaagacgaagtataatgcaaataaaacccccgacaagctgcagcaggctgccctgcccctcctgtccaatgctgaatgcaaaaaaagctggggtagacgcatcacagatgtcatgatctgcgccggtgcatccggcgtgtctagctgtatgggagattctggtggacctttggtttgccagaaagacggagcctggactctcgtcggcatcgtgtcttggggcagcgatacctgtagcacctccagccccggagtgtacgcgcgagttacaaaattaatcccctgggtccagaagatcctcgccgctaattag

SEQ ID NO: 122086 - DNA, 792 bp, Artificial Sequence
  derived and/or modified sequence
atggcgagcctgtggttgttgtcatgcttctctttggtgggtgccgcatttggatgtggcgtgcctgctattcaccccgtgctgagtggactctctagaattgttaacggcgaggacgccgtgccagggtcctggccgtggcaggtgtctcttcaagacaagactggattccatttctgcgggggatcactcatctctgaggattgggtggttactgccgctcattgtggtgtgcggacatctgatgtagtagtggcaggggaattcgatcagggttccgacgaggagaatattcaggtcctcaagatcgccaaggtgtttaagaatcccaaattttccatattgacagtgaataatgacattacactgctgaaattagcaacgccggctagattctcccagactgtctctgcggtgtgtcttccatccgctgatgacgacttcccggctggcactctgtgtgctacaaccggttggggcaagaccaaatataacgctaataaaactcccgataagttacagcaggccgcactgcctctcctttctaacgcagaatgtaagaaatcatggggaaggaggatcacggacgtcatgatctgtgccggtgcttcaggtgtaagcagctgtatgggcgacagtggcggacccctggtctgccagaaagacggagcctggacattagtggggattgtgagctggggctctgacacatgtagcacaagttctccaggcgtgtacgctagagtgaccaaactaatcccttgggtccagaagattctcgcagctaactag

SEQ ID NO: 122087 - DNA, 868 bp, Artificial Sequence
  derived and/or modified sequence
accttctgaggcagcggcatggcttccctctggctcctctcctgcttctcccttgtgggggccgcctttggctgcggggtccccgccatccaccctgtgctcagcggcctgtccaggatcgtgaatggggaggacgccgtccccggctcctggccctggcaggtgtccctgcaggacaaaaccggcttccacttctgcgggggctccctcatcagcgaggactgggtggtcaccgctgcccactgcggggtcaggacctccgacgtggtcgtggctggggagtttgaccagggctctgacgaggagaacatccaggtcctgaagatcgccaaggtcttcaagaaccccaagttcagcattctgaccgtgaacaatgacatcaccctgctgaagctggccacacctgcccgcttctcccagacagtgtccgccgtgtgcctgcccagcgccgacgacgacttccccgcggggacactgtgtgccaccacaggctggggcaagaccaagtacaacgccaacaagacccctgacaagctgcagcaggcagccctgcccctcctgtccaatgccgaatgcaagaagtcctggggcaggaggatcaccgacgtgatgatctgtgccggggccagtggcgtctcctcctgcatgggcgactctggcggccccctggtctgccaaaaggatggagcctggaccctggtgggcattgtgtcctggggcagcgacacctgctccacctccagccctggcgtgtacgcccgtgtcaccaagctcataccttgggtgcagaagatcctggctgccaactgagcccgcggctccctccgaccctgctccccacagagcctcagtaaacccatggaacaca

SEQ ID NO: 122088 - DNA, 792 bp, Artificial Sequence
  derived and/or modified sequence
atggccagcctgtggctgctgagctgcttcagcctggtgggcgccgccttcggctgcggcgtgcccgccatccaccccgtgctgagcggcctgagcagaatcgtgaacggcgaggacgccgtgcccggcagctggccctggcaggtgagcctgcaggacaagaccggcttccacttctgcggcggcagcctgatcagcgaggactgggtggtgaccgccgcccactgcggcgtgagaaccagcgacgtggtggtggccggcgagttcgaccagggcagcgacgaggagaacatccaggtgctgaagatcgccaaggtgttcaagaaccccaagttcagcatcctgaccgtgaacaacgacatcaccctgctgaagctggccacccccgccagattcagccagaccgtgagcgccgtgtgcctgcccagcgccgacgacgacttccccgccggcaccctgtgcgccaccaccggctggggcaagaccaagtacaacgccaacaagacccccgacaagctgcagcaggccgccctgcccctgctgagcaacgccgagtgcaagaagagctggggcagaagaatcaccgacgtgatgatctgcgccggcgccagcggcgtgagcagctgcatgggcgacagcggcggccccctggtgtgccagaaggacggcgcctggaccctggtgggcatcgtgagctggggcagcgacacctgcagcaccagcagccccggcgtgtacgccagagtgaccaagctgatcccctgggtgcagaagatcctggccgccaactag

SEQ ID NO: 122089 - protein, 264 aa, Artificial Sequence
  derived and/or modified sequence
MLLLSLTLSLVLLGSSWGCGIPAIKPALSFSQRIVNGENAVLGSWPWQVSLQDSSGFHFCGGSLISQSWVVTAAHCNVSPGRHFVVLGEYDRSSNAEPLQVLSVSRAITHPSWNSTTMNNDVTLLKLASPAQYTTRISPVCLASSNEALTEGLTCVTTGWGRLSGVGNVTPAHLQQVALPLVTVNQCRQYWGSSITDSMICAGGAGASSCQGDSGGPLVCQKGNTWVLIGIVSWGTKNCNVRAPAVYTRVSKFSTWINQVIAYN

SEQ ID NO: 122090 - DNA, 795 bp, Artificial Sequence
  derived and/or modified sequence
atgcttctgttatctttgaccctgtctctcgtactcctggggagctcttggggatgcggaattccggccatcaaacccgccttgagtttttcccagaggattgtcaacggtgagaatgctgtgctgggcagctggccatggcaggtatccctccaggactctagcggcttccatttttgtggagggagcctcattagccaaagctgggtcgtgaccgcggcccattgcaacgtttcccccggacgccatttcgttgtgttgggtgagtacgataggtcctccaatgccgagcctttgcaggtgctctctgtgtcccgagccatcacacatcccagctggaattcaaccacgatgaacaacgatgtcaccctactgaagctcgcgtctcccgcccagtatactactcggatcagcccggtgtgcctggcctcctctaatgaagctctcacagaggggctcacatgcgtgacaacagggtggggccgactctctggagtgggcaacgtgactcctgcccacctgcaacaggtggccctcccgctggttaccgtgaaccagtgccgacaatattggggcagttcaatcaccgatagcatgatttgcgccggcggggccggagcctcttcctgtcagggggacagcgggggccctctggtatgtcagaaaggcaacacctgggtgctaattggcatcgtttcttgggggactaagaattgcaacgttagagccccagcagtgtacacccgagtaagcaaattctccacctggatcaaccaagtgatcgcatacaattag

SEQ ID NO: 122091 - DNA, 795 bp, Artificial Sequence
  derived and/or modified sequence
atgctcttactctctctgaccttgtctcttgttctgctgggttccagctggggctgcggtatccctgctatcaaaccagcgctgagcttttctcagaggatcgtaaacggggagaacgcagtacttggcagctggccttggcaggtaagtctacaagactcatctggcttccatttctgcgggggcagcctgatctcccagtcgtgggtagtgacggctgcacattgtaatgtgtcacctggtagacatttcgtggttttgggtgagtatgatcgcagttcaaatgccgagcctcttcaggttttgtcggtgtcccgggctatcactcacccttcctggaatagtactacaatgaacaacgacgtaacactccttaaacttgcctcccccgctcaatacacaacacgcatcagtccagtctgcctcgcaagcagcaacgaggctttaaccgaagggctcacgtgtgtgaccactggctggggccgccttagcggagtcggtaatgtaacccccgcacatctgcagcaggttgctctgcccttggtgacggtaaatcagtgccgccagtactgggggtcttctataacggattcgatgatttgtgccgggggagctggagcctcgtcttgccaaggagacagcggcggccccttggtttgccagaaggggaacacttgggtactgatcggtattgtgagctggggaaccaagaactgtaatgtcagagccccagccgtgtacactagagtgagtaaattctccacatggatcaaccaagtcattgcctataattag

SEQ ID NO: 122092 - DNA, 795 bp, Artificial Sequence
  derived and/or modified sequence
atgctgctgctgagcctgaccctgagcctggtgctgctgggcagctcctggggctgcggcatcccagccatcaagccagccctgtccttcagccagagaattgtgaatggagaaaatgctgtgctgggctcctggccctggcaggtgtccctgcaggacagcagcggcttccacttctgtggcggcagcctcatcagccagagctgggtggtgacagctgcccactgcaatgtgtccccaggccgccactttgtggtgctgggggagtatgacaggagcagcaatgctgagcccctgcaggtgctgtctgtgtcccgggccatcacccaccccagctggaacagcaccaccatgaacaatgatgtgaccctgctgaagctggccagccctgcccagtacaccacccgcatcagccctgtgtgcctggccagcagcaatgaggccctgacagagggcctgacctgtgtgaccaccggctggggccgcctgagcggcgtgggcaatgtgaccccagcccacctgcagcaggtggccctgcccctggtgacagtgaaccagtgccggcagtactggggcagcagcatcacagacagcatgatctgtgccggcggggccggggccagcagctgccagggcgacagcggcggccccctggtgtgccagaagggcaacacctgggtgctgattggaattgtgtcctggggcaccaagaactgcaatgtgcgggccccagctgtgtacaccagggtgtccaagttcagcacctggatcaaccaggtgattgcctacaactag

SEQ ID NO: 122093 - DNA, 795 bp, Artificial Sequence
  derived and/or modified sequence
atgctgctgctgagcctgaccctgagcctggtgctgctgggcagctcatggggctgcggtattcctgctatcaagcccgctttgtcctttagccagcggatcgtgaatggtgagaacgccgtccttggatcttggccctggcaggtttccctccaagacagcagcggatttcatttctgtggtggtagcttaatcagtcagagctgggtggtgaccgctgcccactgtaacgtgtcacccgggcgccacttcgtggtgcttggtgaatacgataggtcaagcaacgccgagcctctgcaagtattgtcagtcagcagagctatcacacacccatcatggaatagcactaccatgaacaatgatgttaccctactgaagttggcctctcccgcccagtatactactcggattagccccgtctgcctcgctagttcgaacgaggcattaacagaaggtctcacctgcgtgactaccggatggggacgactctccggcgtgggcaacgtgactccggctcatttacagcaggttgccttgcccttggtgacggtcaaccaatgtcgccaatactggggatcgagcataactgatagcatgatctgtgcggggggagccggggcctccagttgccaaggtgactccggtggccccctggtctgtcagaaaggtaatacctgggtgctcattggcatcgtgtcttggggcactaaaaactgtaatgtgagggcccccgctgtgtacacccgggtgtctaagttctcaacttggattaatcaggttattgcttacaactag

SEQ ID NO: 122094 - DNA, 795 bp, Artificial Sequence
  derived and/or modified sequence
atgctgctgctgagcctgaccctgagcctggtgctgctgggcagctcgtggggctgcgggattcccgctattaagcccgcactttccttttcacagagaattgtaaatggggagaatgccgtcctgggaagctggccgtggcaagtgagtttgcaggattcatctggcttccatttctgtggcgggtcccttataagccagtcctgggttgtcactgcggctcattgtaacgtgagcccagggcgccatttcgtggtcctgggagagtatgaccggtctagtaacgccgaaccacttcaagtgctctcagtgagtagggccatcacccatcccagctggaactcaacaacaatgaataacgatgtaacacttctgaagcttgcctcccctgcccagtataccacacgaattagcccagtgtgtttagcttctagcaatgaggcacttactgaagggttgacatgtgtaactactgggtggggccggctttctggggtcggaaatgtgacacctgcccaccttcaacaggtagccctccccctcgtgacagtgaatcaatgtagacagtattgggggagctcgattacagacagcatgatttgtgcagggggcgccggagcttcatcgtgccagggggattccggaggtcccctggtttgtcaaaagggcaacacctgggtgttgataggcattgtgtcatggggcacaaagaattgcaacgtccgcgcacctgctgtctatacaagagtgagcaaattcagcacttggatcaatcaggtaattgcctataactag

SEQ ID NO: 122095 - DNA, 795 bp, Artificial Sequence
  derived and/or modified sequence
atgttacttctgagcctgaccctatcgctggtgctcctggggtcttcgtgggggtgcggtattcccgctattaagcctgcactttcattcagtcaacgcatcgtgaatggggaaaatgccgtcctcggctcatggccttggcaggtgagcctgcaggatagtagcgggtttcatttttgcggcggtagcctgatttcacagagctgggtagtaactgccgctcactgcaacgtgtcgccagggagacatttcgtggtgctgggggagtacgaccgatcaagcaatgccgagcccctccaggtgctcagtgtttcccgcgctattacccacccatcctggaactcaactaccatgaacaacgatgttaccctccttaaattagccagccctgctcagtacacaactcggataagcccggtttgtctggctagctccaacgaagctctgacggaaggcctgacatgcgtgacaacaggttggggtcggctcagcggcgtcggcaacgtcacaccggcacatctgcagcaagtggctctgcccctggtcacagtgaatcagtgcaggcaatactggggctcctccattactgactccatgatatgtgccggtggagctggtgcttcctcctgccagggtgacagcggtggcccattggtttgccagaaaggaaacacttgggtgctgatagggattgtgtcatggggcacaaagaactgcaacgtccgagctcctgcagtgtacactcgcgtttcaaaattttcaacatggattaatcaggttatagcttacaattag

SEQ ID NO: 122096 - DNA, 795 bp, Artificial Sequence
  derived and/or modified sequence
atgcttctcctctccctgacattaagcctggtgctgcttggcagttcctggggctgcggtattcctgccattaagccagctctcagcttttcacagaggatcgttaacggggagaacgctgttttgggctcatggccttggcaggtgtctctccaggactcatccggatttcatttctgtggaggcagcctgatttcccagtcctgggtggtgacagccgctcactgcaacgtgagtccaggcaggcattttgttgtgctgggcgaatacgatcggtcatctaacgccgagccccttcaagtcctatctgtgagtagagcgattacccacccatcttggaattccaccacaatgaacaacgacgtgactctcctgaagcttgctagtcctgcacagtatacaacgcgcataagtccagtttgtctcgcttcatctaatgaggccttgacagagggcctcacatgcgttaccaccgggtgggggcgactgtctggagtgggcaacgtgacgcctgctcatctgcagcaggtggccctcccattggtgactgtgaatcaatgccggcaatattggggcagcagcattaccgacagtatgatctgcgccggaggggctggagcctccagttgccaaggagactctggcggacctcttgtgtgccaaaagggcaacacttgggtcctgatcgggattgtgtcttggggtaccaagaattgcaatgtccgggcacctgccgtttacacgcgcgtgtctaagttttccacctggatcaatcaggtgatcgcctataactag

SEQ ID NO: 122097 - DNA, 1174 bp, Artificial Sequence
  derived and/or modified sequence
ctcacatctgccacgatgttgctgctcagcctgaccctaagcctggttctcctcggctcctcctggggctgcggcattcctgccatcaaaccggcactgagcttcagccagaggattgtcaacggggagaatgcagtgttgggctcctggccctggcaggtgtccctgcaggacagcagcggcttccacttctgcggtggttctctcatcagccagtcctgggtggtcactgctgcccactgcaatgtcagccctggccgccattttgttgtcctgggcgagtatgaccgatcatcaaacgcagagcccttgcaggttctgtccgtctctcgggccattacacaccctagctggaactctaccaccatgaacaatgacgtgacgctgctgaagctcgcctcgccagcccagtacacaacacgcatctcgccagtttgcctggcatcctcaaacgaggctctgactgaaggcctcacgtgtgtcaccaccggctggggtcgcctcagtggcgtgggcaatgtgacaccagcacatctgcagcaggtggctttgcccctggtcactgtgaatcagtgccggcagtactggggctcaagtatcactgactccatgatctgtgcaggtggcgcaggtgcctcctcgtgccagggtgactccggaggccctcttgtctgccagaagggaaacacatgggtgcttattggtattgtctcctggggcaccaaaaactgcaatgtgcgcgcacctgctgtgtatactcgagttagcaagttcagcacctggatcaaccaggtcatagcctacaactgagctcaccacaggccctccccagctcaacccattaaagacccaggccctgtcccatcatgcattcatgtctgtcttcctggctcaggagaaagaagaggctgttgagggtccgactccctacttggacttctggcacagaaggggctgagtgactccttgagtagcagtggctcttcctagagtagccatgccgaggccggggcccccacccctcctccagggcaaccccttggtcctacagcaagaagccagaactgttggaatgaatggcagccctccctggagaggcagcctgtttactgaatacagaggatacgtttacaaactgaatacgcataataaataactgcacattctccatcca

SEQ ID NO: 122098 - DNA, 1721 bp, Artificial Sequence
  derived and/or modified sequence
cacgtgctggtgggagagtcaccatctctgagcagacctgtgactcctgttccaaatggacgaggaaccactgcgatgatgtgttaggactcccagcctgccagaacctcacagcccctggcccttcacagcaaagttgaccgcagtgagcattccatccaccagtcagaacaccctggacgctgagcggccttctctgaaagcctggtgcctttgttagccctgggtgactcctgtgatcccagccaccaggttgtcactatagacctaatttaaccatctgtcctcagtaccgagggctcaacatttggaatgggaggtggttctgggagccaattagaggccaggctttgggaggtggcagaggtgagtctcacacctgggctctgtctgataagtctaggtctcggtcaggggaccttggcctaaagggcctgtcttgcctggagcgtgggagggggctgagtctacacagctggcctggcctcaggcctggagctttagctcaaggacgagaagacccataaagccagacccagctcccaacctcacatctgccacgatgttgctgctcagcctgaccctaagcctggttctcctcggctcctcctggggctgcggcattcctgccatcaaaccggcactgagcttcagccagaggattgtcaacggggagaatgcagtgttgggctcctggccctggcaggtgtccctgcaggacagcagcggcttccacttctgcggtggttctctcatcagccagtcctgggtggtcactgctgcccactgcaatgtcagccctggccgccattttgttgtcctgggcgagtatgaccgatcatcaaacgcagagcccttgcaggttctgtccgtctctcgggccattacacaccctagctggaactctaccaccatgaacaatgacgtgacgctgctgaagctcgcctcgccagcccagtacacaacacgcatctcgccagtttgcctggcatcctcaaacgaggctctgactgaaggcctcacgtgtgtcaccaccggctggggtcgcctcagtggcgtgggcaatgtgacaccagcacatctgcagcaggtggctttgcccctggtcactgtgaatcagtgccggcagtactggggctcaagtatcactgactccatgatctgtgcaggtggcgcaggtgcctcctcgtgccagggtgactccggaggccctcttgtctgccagaagggaaacacatgggtgcttattggtattgtctcctggggcaccaaaaactgcaatgtgcgcgcacctgctgtgtatactcgagttagcaagttcagcacctggatcaaccaggtcatagcctacaactgagctcaccacaggccctccccagctcaacccattaaagacccaggccctgtcccatcatgcattcatgtctgtcttcctggctcaggagaaagaagaggctgttgagggtccgactccctacttggacttctggcacagaaggggctgagtgactccttgagtagcagtggctcttcctagagtagccatgccgaggccggggcccccacccctcctccagggcaaccccttggtcctacagcaagaagccagaactgttggaatgaatggcagccctccctggagaggcagcctgtttactgaatacagaggatacgtttacaaactgaatacgcataataaataactgcacattctccatcca

SEQ ID NO: 122099 - DNA, 795 bp, Artificial Sequence
  derived and/or modified sequence
atgctgctgctgagcctgaccctgagcctggtgctgctgggcagcagctggggctgcggcatccccgccatcaagcccgccctgagcttcagccagagaatcgtgaacggcgagaacgccgtgctgggcagctggccctggcaggtgagcctgcaggacagcagcggcttccacttctgcggcggcagcctgatcagccagagctgggtggtgaccgccgcccactgcaacgtgagccccggcagacacttcgtggtgctgggcgagtacgacagaagcagcaacgccgagcccctgcaggtgctgagcgtgagcagagccatcacccaccccagctggaacagcaccaccatgaacaacgacgtgaccctgctgaagctggccagccccgcccagtacaccaccagaatcagccccgtgtgcctggccagcagcaacgaggccctgaccgagggcctgacctgcgtgaccaccggctggggcagactgagcggcgtgggcaacgtgacccccgcccacctgcagcaggtggccctgcccctggtgaccgtgaaccagtgcagacagtactggggcagcagcatcaccgacagcatgatctgcgccggcggcgccggcgccagcagctgccagggcgacagcggcggccccctggtgtgccagaagggcaacacctgggtgctgatcggcatcgtgagctggggcaccaagaactgcaacgtgagagcccccgccgtgtacaccagagtgagcaagttcagcacctggatcaaccaggtgatcgcctacaactag

SEQ ID NO: 122100 - protein, 412 aa, Artificial Sequence
  derived and/or modified sequence
MQPSSLLPLALCLLAAPASALVRIPLHKFTSIRRTMSEVGGSVEDLIAKGPVSKYSQAVPAVTEGPIPEVLKNYMDAQYYGEIGIGTPPQCFTVVFDTGSSNLWVPSIHCKLLDIACWIHHKYNSDKSSTYVKNGTSFDIHYGSGSLSGYLSQDTVSVPCQSASSASALGGVKVERQVFGEATKQPGITFIAAKFDGILGMAYPRISVNNVLPVFDNLMQQKLVDQNIFSFYLSRDPDAQPGGELMLGGTDSKYYKGSLSYLNVTRKAYWQVHLDQVEVASGLTLCKEGCEAIVDTGTSLMVGPVDEVRELQKAIGAVPLIQGEYMIPCEKVSTLPAITLKLGGKGYKLSPEDYTLKVSQAGKTLCLSGFMGMDIPPPSGPLWILGDVFIGRYYTVFDRDNNRVGFAEAARL

SEQ ID NO: 122101 - DNA, 1239 bp, Artificial Sequence
  derived and/or modified sequence
atgcagccatctagtctgctccctctagcattatgcctcctggcagcacctgcctcagctcttgtgcgcattccgctgcacaagttcacaagcatcagacgaactatgtcagaagtggggggatcagtagaagacctgatcgcgaaggggccagtttccaagtattctcaggccgtgccagccgtcactgaaggacccatccctgaggtcttaaaaaactatatggacgcacagtactacggcgagatcggaatcgggactcctccacagtgcttcacagtggtctttgataccggatcttcaaacctttgggtccctagcatccattgcaagctgttagacattgcttgttggattcaccataaatataactccgataagagcagtacttacgtgaagaacggtactagcttcgatatacactatggcagcggatctctatccggatatctcagccaggacaccgtatctgtgccctgtcagtcagctagctccgccagcgccctgggaggcgtgaaagtcgagaggcaggtgtttggcgaagctaccaaacaaccaggcatcactttcattgcagccaaattcgacggcatacttgggatggcttatcccagaatctcagtcaacaatgttctccccgtcttcgataatctgatgcagcaaaagctcgtggaccaaaatatcttctcattttacttaagtagagatcctgacgcccagcctggcggagagctgatgctgggggggaccgacagcaagtattacaagggctccctgtcctacctgaacgttacacggaaggcttattggcaggtgcacttggatcaagttgaggtggctagtggtctgactctttgtaaggagggatgcgaggccattgtcgacaccggcacaagtcttatggtgggtcccgtagatgaagttcgggagttgcagaaggcgatcggtgcggtgccacttatccagggtgagtacatgattccttgtgagaaggtctctacactgcccgccatcacactcaaactgggaggcaaaggctataaactgtcacctgaagactataccctgaaggtctcacaggctgggaaaactttgtgtctgtcagggttcatgggcatggatatccccccccccagcggcccactgtggatcctaggggacgtgttcatcgggcgatattacacagtgtttgacagagataacaatcgagtgggctttgcagaagccgcccgattatag

SEQ ID NO: 122102 - DNA, 1239 bp, Artificial Sequence
  derived and/or modified sequence
atgcagcccagcagcctgctgcccctggccctgtgcctgctggccgccccagccagcgccctggtgcgcatccccctgcacaagttcaccagcatccggaggaccatgtctgaggtgggcggctctgtggaggacctgattgccaagggccctgtgtccaagtacagccaggccgtgcctgctgtgacagagggccccatccctgaggtgctgaagaactacatggatgcccagtactacggggagattggaattggcaccccaccccagtgcttcaccgtggtgtttgacaccggcagcagcaacctgtgggtgcccagcatccactgcaagctgctggacatcgcctgctggatccaccacaagtacaacagcgacaagagcagcacctacgtgaagaatggcaccagctttgacatccactacggcagcggcagcctgagcggctacctgagccaggacacagtgtctgtgccctgccagagcgccagcagcgccagcgccctgggcggcgtgaaggtggagcggcaggtgtttggagaggccaccaagcagcccggcatcaccttcatcgccgccaagtttgatggcatcctgggcatggcctacccccgcatctctgtgaacaacgtgctgcctgtgtttgacaacctgatgcagcagaagctggtggaccagaacatcttctccttctacctgagccgggaccctgatgcccagcctggaggagagctgatgctgggcggcacagacagcaagtactacaagggcagcctgagctacctgaatgtgaccaggaaggcctactggcaggtgcacctggaccaggtggaggtggccagcggcctgaccctgtgcaaggagggctgtgaggccatcgtggacaccggcaccagcctgatggtgggccctgtggatgaggtgcgggagctgcagaaggccatcggggctgtgcccctcatccagggcgagtacatgatcccctgtgagaaggtgtccaccctgcctgccatcaccctgaagctgggcggcaagggctacaagctgagccctgaggactacaccctgaaggtgtcccaggccggcaagaccctgtgcctgagcggcttcatgggcatggacatccccccaccttctggccccctgtggatcctgggagatgtgttcatcggccgctactacacagtgtttgaccgggacaacaacagagtgggctttgctgaggccgcccggctgtag

SEQ ID NO: 122103 - DNA, 1239 bp, Artificial Sequence
  derived and/or modified sequence
atgcagcccagcagcctgctgcccctggccctgtgcctgctggccgcacctgccagcgctctggtgcgcattcccctccacaagtttacctctatacgcagaacaatgtctgaagtaggcggaagcgtggaagacctgatagctaagggccccgtgagtaaatactcccaagctgtgcctgcagttaccgaaggtcccattccggaggttctgaaaaactatatggacgcccaatactatggcgaaattgggattggaacaccgccacagtgttttaccgtcgtgtttgacacaggatccagcaacctgtgggtaccgtctatccattgcaaattactggacattgcctgctggatccaccataaatataactctgataaatccagcacctatgtcaagaatggcacatcttttgatatccactatgggtctgggtccctttctggctatctcagccaggacactgtatccgtgccttgtcagtctgcgtcttctgcctcagcactgggcggggtgaaagtagagaggcaagtgttcggtgaggccacgaaacagcccggcatcacgttcattgccgccaaattcgatggaattctgggtatggcatatccgagaatatctgtcaataatgttctgccagtgttcgataaccttatgcagcagaagctggtcgaccaaaatatcttttcattctatctttcccgagacccagacgctcagcccggtggcgaacttatgctgggcggaaccgactcaaagtactacaaggggagcctttcatatttaaacgtaaccagaaaggcttactggcaggtacatctcgaccaggttgaggtagctagcggtctgacattatgcaaggagggatgcgaagccatcgtggacacgggaacaagcctgatggtgggcccggtggatgaagtgcgcgaactgcaaaaagccattggtgctgttcccctgattcaaggcgaatatatgattccctgcgagaaggtgtctactctgccggctataacattaaagttgggagggaaggggtacaaactctctccagaggattatacgctgaaggtaagtcaagccgggaaaaccttgtgtttgtcaggcttcatgggcatggatatcccaccgccctctgggccactatggatccttggtgacgtcttcattggacgctactacaccgttttcgacagagataataatagagtcggattcgcggaggctgctcgtctctag

SEQ ID NO: 122104 - DNA, 1239 bp, Artificial Sequence
  derived and/or modified sequence
atgcagccaagttcgctgctgccactcgcgctttgcctcttagctgcacctgcctctgcattagtgcgcattccattacataagttcactagcatacgtcgaactatgtctgaggtgggcggatcagtggaggacttgattgcaaagggacccgtgtccaaatactcgcaggctgtccccgcagttaccgagggcccaattcccgaggtgctgaagaactacatggacgcccagtactatggcgagatcggcattggcacacctccacagtgcttcaccgtggtgttcgacacaggtagttccaatctgtgggtgccttccatacactgcaaactcctcgacattgcctgttggattcaccacaagtataactctgacaagtcttccacgtatgttaagaacggaacttctttcgatattcactatggttcgggttccttgtccgggtacttgagtcaagataccgtgtcggtcccttgccagtctgctagttcggcttcagcgctgggaggcgtcaaggttgagcgccaggtcttcggggaggccacaaaacaaccagggataaccttcatagcggctaagtttgatggcatccttggcatggcttatcccagaatatccgtaaataatgttcttcctgtgttcgacaacctcatgcagcagaaactggtggatcagaatatttttagcttctatctttcacgggatcccgatgcccagccagggggagaactgatgctaggaggcacagattctaagtactataagggctccctgtcatatctgaacgtgacgagaaaagcgtactggcaggtgcatctcgatcaggtcgaagtggctagtggattgaccctatgcaaagaagggtgcgaggccatcgttgatacaggaactagtctgatggtgggtccggtggatgaagtgcgggagctgcagaaggcaattggtgctgtgcctcttatccagggtgagtatatgattccttgcgagaaagtttctacactcccagccatcacgttaaagctagggggaaagggctacaagctgtcccctgaggactacaccctgaaggtaagccaggccggaaaaaccctctgtctctccgggtttatgggaatggacatccctccaccatcagggcctctgtggatcctgggtgacgtttttatcgggagatactacactgtgtttgacagggacaacaatagagtgggcttcgccgaggctgcccgtctttag

SEQ ID NO: 122105 - DNA, 2123 bp, Artificial Sequence
  derived and/or modified sequence
gcgcacgccggccgcgcccacgtgaccggtccgggtgcaaacacgcgggtcagctgatccggcccaactgcggcgtcatcccggctataagcgcacggcctcggcgaccctctccgacccggccgccgccgccatgcagccctccagccttctgccgctcgccctctgcctgctggctgcacccgcctccgcgctcgtcaggatcccgctgcacaagttcacgtccatccgccggaccatgtcggaggttgggggctctgtggaggacctgattgccaaaggccccgtctcaaagtactcccaggcggtgccagccgtgaccgaggggcccattcccgaggtgctcaagaactacatggacgcccagtactacggggagattggcatcgggacgcccccccagtgcttcacagtcgtcttcgacacgggctcctccaacctgtgggtcccctccatccactgcaaactgctggacatcgcttgctggatccaccacaagtacaacagcgacaagtccagcacctacgtgaagaatggtacctcgtttgacatccactatggctcgggcagcctctccgggtacctgagccaggacactgtgtcggtgccctgccagtcagcgtcgtcagcctctgccctgggcggtgtcaaagtggagaggcaggtctttggggaggccaccaagcagccaggcatcaccttcatcgcagccaagttcgatggcatcctgggcatggcctacccccgcatctccgtcaacaacgtgctgcccgtcttcgacaacctgatgcagcagaagctggtggaccagaacatcttctccttctacctgagcagggacccagatgcgcagcctgggggtgagctgatgctgggtggcacagactccaagtattacaagggttctctgtcctacctgaatgtcacccgcaaggcctactggcaggtccacctggaccaggtggaggtggccagcgggctgaccctgtgcaaggagggctgtgaggccattgtggacacaggcacttccctcatggtgggcccggtggatgaggtgcgcgagctgcagaaggccatcggggccgtgccgctgattcagggcgagtacatgatcccctgtgagaaggtgtccaccctgcccgcgatcacactgaagctgggaggcaaaggctacaagctgtccccagaggactacacgctcaaggtgtcgcaggccgggaagaccctctgcctgagcggcttcatgggcatggacatcccgccacccagcgggccactctggatcctgggcgacgtcttcatcggccgctactacactgtgtttgaccgtgacaacaacagggtgggcttcgccgaggctgcccgcctctagttcccaaggcgtccgcgcgccagcacagaaacagaggagagtcccagagcaggaggcccctggcccagcggcccctcccacacacacccacacactcgcccgcccactgtcctgggcgccctggaagccggcggcccaagcccgacttgctgttttgttctgtggttttcccctccctgggttcagaaatgctgcctgcctgtctgtctctccatctgtttggtgggggtagagctgatccagagcacagatctgtttcgtgcattggaagaccccacccaagcttggcagccgagctcgtgtatcctggggctcccttcatctccagggagtcccctccccggccctaccagcgcccgctgggctgagcccctaccccacaccaggccgtcctcccgggccctcccttggaaacctgccctgcctgagggcccctctgcccagcttgggcccagctgggctctgccaccctacctgttcagtgtcccgggcccgttgaggatgaggccgctagaggcctgaggatgagctggaaggagtgagaggggacaaaacccaccttgttggagcctgcagggtggtgctgggactgagccagtcccaggggcatgtattggcctggaggtggggttgggattgggggctggtgccagccttcctctgcagctgacctctgttgtcctccccttgggcggctgagagccccagctgacatggaaatacagttgttggcctccggcctcccctctgt

SEQ ID NO: 122106 - DNA, 1239 bp, Artificial Sequence
  derived and/or modified sequence
atgcagcccagcagcctgctgcccctggccctgtgcctgctggccgcccccgccagcgccctggtgagaatccccctgcacaagttcaccagcatcagaagaaccatgagcgaggtgggcggcagcgtggaggacctgatcgccaagggccccgtgagcaagtacagccaggccgtgcccgccgtgaccgagggccccatccccgaggtgctgaagaactacatggacgcccagtactacggcgagatcggcatcggcacccccccccagtgcttcaccgtggtgttcgacaccggcagcagcaacctgtgggtgcccagcatccactgcaagctgctggacatcgcctgctggatccaccacaagtacaacagcgacaagagcagcacctacgtgaagaacggcaccagcttcgacatccactacggcagcggcagcctgagcggctacctgagccaggacaccgtgagcgtgccctgccagagcgccagcagcgccagcgccctgggcggcgtgaaggtggagagacaggtgttcggcgaggccaccaagcagcccggcatcaccttcatcgccgccaagttcgacggcatcctgggcatggcctaccccagaatcagcgtgaacaacgtgctgcccgtgttcgacaacctgatgcagcagaagctggtggaccagaacatcttcagcttctacctgagcagagaccccgacgcccagcccggcggcgagctgatgctgggcggcaccgacagcaagtactacaagggcagcctgagctacctgaacgtgaccagaaaggcctactggcaggtgcacctggaccaggtggaggtggccagcggcctgaccctgtgcaaggagggctgcgaggccatcgtggacaccggcaccagcctgatggtgggccccgtggacgaggtgagagagctgcagaaggccatcggcgccgtgcccctgatccagggcgagtacatgatcccctgcgagaaggtgagcaccctgcccgccatcaccctgaagctgggcggcaagggctacaagctgagccccgaggactacaccctgaaggtgagccaggccggcaagaccctgtgcctgagcggcttcatgggcatggacatccccccccccagcggccccctgtggatcctgggcgacgtgttcatcggcagatactacaccgtgttcgacagagacaacaacagagtgggcttcgccgaggccgccagactgtag

SEQ ID NO: 122107 - protein, 396 aa, Artificial Sequence
  derived and/or modified sequence
MKTLLLLLLVLLELGEAQGSLHRVPLRRHPSLKKKLRARSQLSEFWKSHNLDMIQFTESCSMDQSAKEPLINYLDMEYFGTISIGSPPQNFTVIFDTGSSNLWVPSVYCTSPACKTHSRFQPSQSSTYSQPGQSFSIQYGTGSLSGIIGADQVSVEGLTVVGQQFGESVTEPGQTFVDAEFDGILGLGYPSLAVGGVTPVFDNMMAQNLVDLPMFSVYMSSNPEGGAGSELIFGGYDHSHFSGSLNWVPVTKQAYWQIALDNIQVGGTVMFCSEGCQAIVDTGTSLITGPSDKIKQLQNAIGAAPVDGEYAVECANLNVMPDVTFTINGVPYTLSPTAYTLLDFVDGMQFCSSGFQGLDIHPPAGPLWILGDVFIRQFYSVFDRGNNRVGLAPAVP

SEQ ID NO: 122108 - DNA, 1191 bp, Artificial Sequence
  derived and/or modified sequence
atgaaaacgctgctcctactgcttttagtactgctggaactcggcgaggcacagggaagcctgcatcgagtcccattacggcgtcacccaagcctcaaaaaaaaacttagggcacgttcacagctgtcagagttttggaaaagtcataacctggacatgatccaatttacggagtcttgctccatggaccagagtgcaaaggaacctctgatcaactacctggacatggaatacttcggaacaatttctattggctcgcctccccaaaacttcaccgtgatctttgacaccgggagctcgaatctttgggtaccaagcgtgtattgtacatctccagcttgcaaaacacacagtagatttcagccgagtcagtcttctacatactctcagcctggacagtccttcagtatccagtacggcactggatctctgtcagggatcatcggcgccgatcaggtctccgttgaaggactgaccgtggttggccagcaattcggcgaaagtgtgactgagccgggtcagaccttcgtggatgccgagtttgatggaattcttggccttggctaccccagcctagcggtggggggcgtaacaccagtttttgataatatgatggcccaaaacctcgttgacctccccatgttctcagtgtatatgagttctaacccagagggaggggccgggtccgagctcatatttggaggatatgatcatagccacttctccggctcattaaattgggtccctgtgacaaaacaagcttactggcaaatcgccctggataacatccaggtcggtggaactgtgatgttctgcagtgagggatgccaggccatagttgatacggggacctctttaatcaccgggccctcagataagataaagcagctgcagaacgcaattggagctgctcccgttgacggagaatatgccgtggaatgcgcaaatcttaatgtgatgccagatgtcaccttcaccataaacggcgtcccttacacactgagccctaccgcttacacactgctcgactttgtggacggaatgcagttctgctccagcgggtttcaagggctagacattcatccccccgcaggccctttatggatactgggcgacgtcttcatcaggcagttttattcggtcttcgacagaggaaataaccgggtcggtcttgcccctgctgtgccctag

SEQ ID NO: 122109 - DNA, 1191 bp, Artificial Sequence
  derived and/or modified sequence
atgaagaccctgctgctgctgctgctggtgctgctggagctgggggaggcccagggcagcctgcaccgggtgcccctgcggcggcaccccagcctgaagaagaagctgcgggcccggagccagctgtctgagttctggaagagccacaacctggacatgatccagttcacagagagctgcagcatggaccagagcgccaaggagcccctcatcaactacctggacatggagtacttcggcaccatcagcatcggcagccccccccagaacttcaccgtcatctttgacaccggcagcagcaacctgtgggtgcccagcgtgtactgcaccagccctgcctgcaagacccacagccgcttccagcccagccagagcagcacctacagccagcccggccagagcttcagcatccagtatggaacaggcagcctgagcggcatcatcggggctgaccaggtgtctgtggagggcctgactgtggtgggccagcagtttggagagagcgtgacagagcccggccagacctttgtggatgctgagtttgatggcatcctgggcctgggctaccccagcctggccgtgggcggcgtgacccctgtgtttgacaacatgatggcccagaacctggtggacctgcccatgttttctgtgtacatgagcagcaaccctgagggcggggccggcagcgagctgatctttggaggctatgaccacagccacttcagcggcagcctgaactgggtgcctgtgaccaagcaggcctactggcagatcgccctggacaacatccaggtgggcggcaccgtgatgttctgcagcgagggctgccaggccatcgtggacaccggcaccagcctcatcaccggccccagcgacaagatcaagcagctgcagaatgccatcggggccgcccctgtggatggagaatatgctgtggagtgtgccaacctgaatgtgatgccagatgtgaccttcaccatcaacggggtgccctacaccctgagccccacagcctacaccctgctggactttgtggatggcatgcagttctgcagcagcggcttccagggcctggacatccaccccccagctggccccctgtggatcctgggagatgtgttcatccggcagttctacagcgtgtttgaccggggcaacaacagagtgggcctggccccagctgtgccctag

SEQ ID NO: 122110 - DNA, 1191 bp, Artificial Sequence
  derived and/or modified sequence
atgaagaccctgctgctgctgctgctggtgctgctggagctgggcgaggctcagggatcccttcatagagttcctcttcggaggcacccatccctgaagaaaaagttgcgcgctcggagccagttgtcagagttttggaagagccacaatttggacatgatacaattcacggagagctgctccatggatcagtcagccaaagagccactgatcaactacttggacatggagtatttcggcactataagtataggttccccccctcagaacttcaccgttatcttcgatactggatcatccaacctatgggtgccgtccgtatactgcacttcccccgcatgtaagacacactcgagatttcaacccagccagagctctacctatagccagccagggcagagctttagcatccaatatggaaccggaagtcttagcggtattattggagctgaccaggtgtcagtagagggactgacggtggtcggccagcagtttggggagtcggtaactgagcccggacaaaccttcgtagatgctgagtttgacggaatccttggtcttggttacccttcgctggccgtgggcggcgtaaccccagtttttgacaacatgatggcacagaacttggtcgatcttccaatgttctctgtctacatgagcagtaatcccgagggtggggccggctctgaactgatattcggcggctacgaccactcccatttctctgggagcttgaactgggtgcctgtgaccaagcaggcttactggcagatcgcactggacaatatacaagtgggtggcactgtgatgttttgttcagaggggtgtcaggccatagtggacacggggacgtcactcattaccgggcccagtgacaagattaaacaattgcaaaacgctattggagccgcacccgtggacggagaatatgcagtggagtgtgccaatctaaatgttatgcctgatgtgacctttaccataaacggagtaccctacacattgtcgcccacagcctacacattgcttgattttgtcgatggtatgcagttctgttcatccgggtttcagggcctggatatccaccctccagcagggccattatggattctgggcgacgtcttcattcgccagttttactctgtttttgatcggggaaataatagagtgggactcgcacccgctgtgccctag

SEQ ID NO: 122111 - DNA, 1191 bp, Artificial Sequence
  derived and/or modified sequence
atgaaaacactcttactgcttttactggtgcttctggagctcggcgaggcccagggatcacttcatagagtgcctttgaggaggcatcctagtctgaaaaagaagctgagagcacggtcccagttgtcagagttctggaaaagccataatttggacatgatccagttcaccgagtcatgcagcatggatcaatccgcaaaggagccactaattaactacctagatatggaatactttgggaccatcagcataggttccccaccacagaacttcacggtaattttcgacacaggcagttcgaacctctgggtcccgagcgtctattgtacatcccccgcttgtaaaactcactctcgatttcagccttctcagagtagcacatattcccaacctgggcaatcattcagtatccaatacgggaccggctcacttagcggcatcatcggcgctgatcaggtgagtgtagagggcctaaccgtagtgggtcagcagttcggggagtcagtcacagaaccgggacagactttcgtcgatgccgagtttgatggaatcctgggactgggatacccaagcttggccgtgggcggtgttaccccagtatttgataatatgatggcccaaaacctagtcgatctgcctatgttttccgtatacatgtccagtaatcctgagggcggtgccggtagcgagctgatttttgggggttatgaccattcacatttctccggttcacttaattgggtgccagttacaaaacaggcttattggcagatcgctcttgacaatatccaggttggcggtaccgtaatgttttgttctgagggctgtcaggcaatagttgacacaggcacaagtttgatcacagggccatccgataaaatcaagcaactccaaaatgccattggcgctgcccctgtggatggtgaatacgctgtggagtgcgccaaccttaacgtgatgcccgatgtcacatttactatcaatggggtcccctacactctatcccccacagcctacaccctgttggactttgttgatgggatgcaattctgtagtagtgggtttcagggtttagatatccaccctcccgctgggcctttatggattctcggagacgtcttcatcagacagttttattctgtgttcgacagggggaacaaccgggtggggctggctcccgcagtcccttag

SEQ ID NO: 122112 - DNA, 2228 bp, Artificial Sequence
  derived and/or modified sequence
atcattcggccctcagactgggctgggcaggtctgagagttagggaaagtccgttcccactgccctcggggagagaagaaaggagggggcaagggagaagctgctggtcggactcacaatgaaaacgctccttcttttgctgctggtgctcctggagctgggagaggcccaaggatcccttcacagggtgcccctcaggaggcatccgtccctcaagaagaagctgcgggcacggagccagctctctgagttctggaaatcccataatttggacatgatccagttcaccgagtcctgctcaatggaccagagtgccaaggaacccctcatcaactacttggatatggaatacttcggcactatctccattggctccccaccacagaacttcactgtcatcttcgacactggctcctccaacctctgggtcccctctgtgtactgcactagcccagcctgcaagacgcacagcaggttccagccttcccagtccagcacatacagccagccaggtcaatctttctccattcagtatggaaccgggagcttgtccgggatcattggagccgaccaagtctctgtggaaggactaaccgtggttggccagcagtttggagaaagtgtcacagagccaggccagacctttgtggatgcagagtttgatggaattctgggcctgggatacccctccttggctgtgggaggagtgactccagtatttgacaacatgatggctcagaacctggtggacttgccgatgttttctgtctacatgagcagtaacccagaaggtggtgcggggagcgagctgatttttggaggctacgaccactcccatttctctgggagcctgaattgggtcccagtcaccaagcaagcttactggcagattgcactggataacatccaggtgggaggcactgttatgttctgctccgagggctgccaggccattgtggacacagggacttccctcatcactggcccttccgacaagattaagcagctgcaaaacgccattggggcagcccccgtggatggagaatatgctgtggagtgtgccaaccttaacgtcatgccggatgtcaccttcaccattaacggagtcccctataccctcagcccaactgcctacaccctactggacttcgtggatggaatgcagttctgcagcagtggctttcaaggacttgacatccaccctccagctgggcccctctggatcctgggggatgtcttcattcgacagttttactcagtctttgaccgtgggaataaccgtgtgggactggccccagcagtcccctaaggaggggccttgtgtctgtgcctgcctgtctgacagaccttgaatatgttaggctggggcattctttacacctacaaaaagttattttccagagaatgtagctgtttccagggttgcaacttgaattaagaccaaacagaacatgagaatacacacacacacacacatatacacacacacacacttcacacatacacaccactcccaccaccgtcatgatggaggaattacgttatacattcatattttgtattgatttttgattatgaaaatcaaaaattttcacatttgattatgaaaatctccaaacatatgcacaagcagagatcatggtataataaatccctttgcaactccactcagccctgacaacccatccacacacggccaggcctgtttatctacactgctgcccactcctctctccagctccacatgctgtacctggatcattctgaagcaaattccgagcattacatcattttgtccataaatatttctaacatccttaaatatacaatcggaattcaagcatctcccattgtcccacaaatgtttggctgtttttgtagttggattgtttgtattaggattcaagcaaggcccatatattgcatttatttgaaatgtctgtaagtctctttccatctacagagtttagcacatttgaacgttgctggttgaaatcccgaggtgtcatttgacatggttctctgaacttatctttcctataaaatggtagttagatctggaggtctgattttgtggcaaaaatacttcctaggtggtgctgggtacttcttgttgcatcctgtcaggaggcagataatgctggtgcctctctattggtaatgttaagactgctgggtgggtttggagttcttggctttaatcattcattacaaagttcagcatttta

SEQ ID NO: 122113 - DNA, 1191 bp, Artificial Sequence
  derived and/or modified sequence
atgaagaccctgctgctgctgctgctggtgctgctggagctgggcgaggcccagggcagcctgcacagagtgcccctgagaagacaccccagcctgaagaagaagctgagagccagaagccagctgagcgagttctggaagagccacaacctggacatgatccagttcaccgagagctgcagcatggaccagagcgccaaggagcccctgatcaactacctggacatggagtacttcggcaccatcagcatcggcagccccccccagaacttcaccgtgatcttcgacaccggcagcagcaacctgtgggtgcccagcgtgtactgcaccagccccgcctgcaagacccacagcagattccagcccagccagagcagcacctacagccagcccggccagagcttcagcatccagtacggcaccggcagcctgagcggcatcatcggcgccgaccaggtgagcgtggagggcctgaccgtggtgggccagcagttcggcgagagcgtgaccgagcccggccagaccttcgtggacgccgagttcgacggcatcctgggcctgggctaccccagcctggccgtgggcggcgtgacccccgtgttcgacaacatgatggcccagaacctggtggacctgcccatgttcagcgtgtacatgagcagcaaccccgagggcggcgccggcagcgagctgatcttcggcggctacgaccacagccacttcagcggcagcctgaactgggtgcccgtgaccaagcaggcctactggcagatcgccctggacaacatccaggtgggcggcaccgtgatgttctgcagcgagggctgccaggccatcgtggacaccggcaccagcctgatcaccggccccagcgacaagatcaagcagctgcagaacgccatcggcgccgcccccgtggacggcgagtacgccgtggagtgcgccaacctgaacgtgatgcccgacgtgaccttcaccatcaacggcgtgccctacaccctgagccccaccgcctacaccctgctggacttcgtggacggcatgcagttctgcagcagcggcttccagggcctggacatccacccccccgccggccccctgtggatcctgggcgacgtgttcatcagacagttctacagcgtgttcgacagaggcaacaacagagtgggcctggcccccgccgtgccctag

SEQ ID NO: 122114 - protein, 20 aa, Artificial Sequence
  derived and/or modified sequence
QSPAGQSRCGGFLVREDFVL

SEQ ID NO: 122115 - protein, 255 aa, Artificial Sequence
  derived and/or modified sequence
MQPLLLLLAFLLPTGAEAGEIIGGRESRPHSRPYMAYLQIQSPAGQSRCGGFLVREDFVLTAAHCWGSNINVTLGAHNIQRRENTQQHITARRAIRHPQYNQRTIQNDIMLLQLSRRVRRNRNVNPVALPRAQEGLRPGTLCTVAGWGRVSMRRGTDTLREVQLRVQRDRQCLRIFGSYDPRRQICVGDRRERKAAFKGDSGGPLLCNNVAHGIVSYGKSSGVPPEVFTRVSSFLPWIRTTMRSFKLLDQMETPL

SEQ ID NO: 122116 - DNA, 459 bp, Artificial Sequence
  derived and/or modified sequence
atgcctgggctcgtgttctttaagtttgcgaatctcgggggaggctggggttccagaaaaatgctggagccagggatgtgcccagccgaaatgtccctgaccccctttgtgaccagaagcctcaacctgctctgcttttctgtaacgcaccggggaaggggcaaggataaccctttgcactttttcctgcagctactagccccttctgcttccgcctcactcggactgggcagagagaccggccctttgccctcacccggactgtctcccggtctcctatctgaaaccttcgtctcggagggacccctgcttacactacagatatcctggtgtggaactgaatgtctgatggatggccaggggcctttgatccatctgcacagtcagaacatacgaatcagctttggtgcaacacagcctccactgctgctagtgtatgaaatacgttggaaccggtag

SEQ ID NO: 122117 - DNA, 768 bp, Artificial Sequence
  derived and/or modified sequence
atgcaacccctattgttgctgctggccttcctcctgcccaccggggccgaggctggagagattattgggggtagggagagccggccgcattctcgcccatacatggcctatctccagatccagagtcccgccgggcagagtagatgcggagggttcctcgtgagagaagatttcgtcctgactgccgcacattgctggggttccaatatcaacgttacgctgggtgctcataatattcaacgcagggagaacacgcagcagcacattacagcccggcgcgctatccggcacccccagtataaccaacgcaccattcagaatgacatcatgctccttcagctctcccggcgggtccgccgcaatcggaacgtaaatccagtcgcccttccaagggcacaggagggactccgacctggtaccctgtgtactgtcgctggttggggacgtgtgagtatgcgccgcggcacagatactctgagagaggtgcagctccgcgtccaacgcgacaggcagtgtctgcgcatatttggttcttatgatcccaggcgccagatctgcgtgggtgacaggagggaacgcaaagccgcctttaaaggagatagcggaggccctctgctgtgcaacaacgtggcccacggtattgtttcctacgggaagtcctccggtgtgcctcctgaagtcttcaccagggtcagtagcttcttaccgtggattagaactacgatgcggtccttcaaacttctggaccagatggaaacgcccctctag

SEQ ID NO: 122118 - DNA, 768 bp, Artificial Sequence
  derived and/or modified sequence
atgcagcccctgctgctgctgctggccttcctgctgcccaccggggctgaggccggggagatcatcggcggccgggagagccggccccacagccggccctacatggcctacctgcagatccagagccctgctggccagagccgctgtggcggcttcctggtgcgggaggactttgtgctgacagctgcccactgctggggcagcaacatcaacgtgaccctgggcgcccacaacatccagaggcgggagaacacccagcagcacatcacagcccggcgggccatccgccacccccagtacaaccagaggaccatccagaatgacatcatgctgctgcagctgagccggcgggtgagaagaaacagaaatgtgaaccctgtggccctgccccgggcccaggagggcctgcggcccggcaccctgtgcaccgtggccggctggggccgggtgtccatgagaagaggaacagacaccctgcgggaggtgcagctgcgggtgcagagggaccggcagtgcctgcgcatcttcggcagctatgacccccggcggcagatctgtgtgggggaccggcgggagaggaaggccgccttcaagggggacagcggcggccccctgctgtgcaacaacgtggcccacggcatcgtgtcctatggcaagagcagtggagtgcccccagaggtgttcaccagggtgtcctccttcctgccctggatccgcaccaccatgaggagcttcaagctgctggaccagatggagacccccctgtag

SEQ ID NO: 122119 - DNA, 768 bp, Artificial Sequence
  derived and/or modified sequence
atgcagcccctgctgctgctgctggccttcctgctgcccaccggcgctgaagccggtgagataatcggagggcgagagtcccgcccccattcacggccttatatggcctacctgcagatccagagcccagccgggcagtccaggtgcgggggttttctcgtacgggaggatttcgtcctcaccgctgcccattgctgggggtcaaacattaatgttaccctgggcgctcataatattcagcgcagagagaacacacagcagcacattacggctcgacgggcaattcggcatccacagtataatcagaggactatccaaaatgacatcatgcttctgcaactctcaaggagggtgagacggaatcggaacgtcaatccagtcgccctgcctcgggctcaagaaggactcaggccagggaccctctgcaccgtcgccggctggggacgtgtgtcaatgcggcgggggacagatactctgagagaggtccagctgagagtccagagggatagacagtgccttagaatttttggaagttacgacccacggcggcagatttgcgtgggagacaggagggaacgcaaagcggcatttaaaggcgacagtggtggtccgctgctgtgtaataatgtcgcccatgggattgtgagctatggcaaatcctcaggggtaccccccgaggtatttaccagggtttcatcatttcttccttggatccgtaccacaatgcgatcttttaaactgctggatcagatggaaacccctctgtag

SEQ ID NO: 122120 - DNA, 768 bp, Artificial Sequence
  derived and/or modified sequence
atgcagccgttgttactacttctggcatttttgttgcccacaggcgcagaagcaggggaaataatcggaggccgagaatcacgccctcatagcaggccgtatatggcctacctacaaatccagtctcccgcaggtcaatctagatgtgggggattcctggtgcgggaggactttgtgctaacagccgcacactgttggggcagcaacattaacgttacactgggtgcccacaatatccagaggagagagaatactcagcagcatattaccgctaggcgggctatccgtcatccccagtacaatcagcgtactattcagaatgacattatgttgctgcagttgtccaggcgcgtgcggagaaaccggaatgttaaccccgtcgcactccctcgcgctcaggaaggtctgagacctgggaccctgtgtacggtagccggttgggggagggtatcaatgagaagaggcacagacaccctgcgcgaggttcagttaagagtgcagcgcgaccgacaatgcttgcgcatcttcggtagctatgaccccagaagacagatttgtgtaggagaccggagagagcgcaaggccgcattcaaaggcgatagcgggggtcctcttctgtgcaacaatgtggcccacggcatcgtgagttatggcaaaagctcaggagtgccacccgaagtgttcacgcgtgtgtcatccttcttgccgtggatcagaactaccatgcgtagttttaagctgctagaccaaatggagacgcctctatag

SEQ ID NO: 122121 - DNA, 886 bp, Artificial Sequence
  derived and/or modified sequence
gcacagcagcaactgactgggcagcctttcaggaaagatgcagccactcctgcttctgctggcctttctcctacccactggggctgaggcaggggagatcatcggaggccgggagagcaggccccactcccgcccctacatggcgtatcttcagatccagagtccagcaggtcagagcagatgtggagggttcctggtgcgagaagactttgtgctgacagcagctcattgctggggaagcaatataaatgtcaccctgggcgcccacaatatccagagacgggaaaacacccagcaacacatcactgcgcgcagagccatccgccaccctcaatataatcagcggaccatccagaatgacatcatgttattgcagctgagcagaagagtcagacggaatcgaaacgtgaacccagtggctctgcctagagcccaggagggactgagacccgggacgctgtgcactgtggccggctggggcagggtcagcatgaggaggggaacagatacactccgagaggtgcagctgagagtgcagagggataggcagtgcctccgcatcttcggttcctacgacccccgaaggcagatttgtgtgggggaccggcgggaacggaaggctgccttcaagggggattccggaggccccctgctgtgtaacaatgtggcccacggcatcgtctcctatggaaagtcgtcaggggttcctccagaagtcttcaccagggtctcaagtttcctgccctggataaggacaacaatgagaagcttcaaactgctggatcagatggagacccccctgtgactgactcttcttctcggggacacaggccagctccacagtgttgccagagccttaataaacgtccacagagtataaataacc

SEQ ID NO: 122122 - DNA, 768 bp, Artificial Sequence
  derived and/or modified sequence
atgcagcccctgctgctgctgctggccttcctgctgcccaccggcgccgaggccggcgagatcatcggcggcagagagagcagaccccacagcagaccctacatggcctacctgcagatccagagccccgccggccagagcagatgcggcggcttcctggtgagagaggacttcgtgctgaccgccgcccactgctggggcagcaacatcaacgtgaccctgggcgcccacaacatccagagaagagagaacacccagcagcacatcaccgccagaagagccatcagacacccccagtacaaccagagaaccatccagaacgacatcatgctgctgcagctgagcagaagagtgagaagaaacagaaacgtgaaccccgtggccctgcccagagcccaggagggcctgagacccggcaccctgtgcaccgtggccggctggggcagagtgagcatgagaagaggcaccgacaccctgagagaggtgcagctgagagtgcagagagacagacagtgcctgagaatcttcggcagctacgaccccagaagacagatctgcgtgggcgacagaagagagagaaaggccgccttcaagggcgacagcggcggccccctgctgtgcaacaacgtggcccacggcatcgtgagctacggcaagagcagcggcgtgccccccgaggtgttcaccagagtgagcagcttcctgccctggatcagaaccaccatgagaagcttcaagctgctggaccagatggagacccccctgtag

SEQ ID NO: 122123 - protein, 678 aa, Artificial Sequence
  derived and/or modified sequence
MAANVGSMFQYWKRFDLQQLQRELDATATVLANRQDESEQSRKRLIEQSREFKKNTPEDLRKQVAPLLKSFQGEIDALSKRSKEAEAAFLNVYKRLIDVPDPVPALDLGQQLQLKVQRLHDIETENQKLRETLEEYNKEFAEVKNQEVTIKALKEKIREYEQTLKNQAETIALEKEQKLQNDFAEKERKLQETQMSTTSKLEEAEHKVQSLQTALEKTRTELFDLKTKYDEETTAKADEIEMIMTDLERANQRAEVAQREAETLREQLSSANHSLQLASQIQKAPDVEQAIEVLTRSSLEVELAAKEREIAQLVEDVQRLQASLTKLRENSASQISQLEQQLSAKNSTLKQLEEKLKGQADYEEVKKELNILKSMEFAPSEGAGTQDAAKPLEVLLLEKNRSLQSENAALRISNSDLSGRCAELQVRITEAVATATEQRELIARLEQDLSIIQSIQRPDAEGAAEHRLEKIPEPIKEATALFYGPAAPASGALPEGQVDSLLSIISSQRERFRARNQELEAENRLAQHTLQALQSELDSLRADNIKLFEKIKFLQSYPGRGSGSDDTELRYSSQYEERLDPFSSFSKRERQRKYLSLSPWDKATLSMGRLVLSNKMARTIGFFYTLFLHCLVFLVLYKLAWSESMERDCATFCAKKFADHLHKFHENDNGAAAGDLWQ

SEQ ID NO: 122124 - protein, 633 aa, Artificial Sequence
  derived and/or modified sequence
MKISAWLMCARGKDLRKQVAPLLKSFQGEIDALSKRSKEAEAAFLNVYKRLIDVPDPVPALDLGQQLQLKVQRLHDIETENQKLRETLEEYNKEFAEVKNQEVTIKALKEKIREYEQTLKNQAETIALEKEQKLQNDFAEKERKLQETQMSTTSKLEEAEHKVQSLQTALEKTRTELFDLKTKYDEETTAKADEIEMIMTDLERANQRAEVAQREAETLREQLSSANHSLQLASQIQKAPDVEQAIEVLTRSSLEVELAAKEREIAQLVEDVQRLQASLTKLRENSASQISQLEQQLSAKNSTLKQLEEKLKGQADYEEVKKELNILKSMEFAPSEGAGTQDAAKPLEVLLLEKNRSLQSENAALRISNSDLSGRCAELQVRITEAVATATEQRELIARLEQDLSIIQSIQRPDAEGAAEHRLEKIPEPIKEATALFYGPAAPASGALPEGQVDSLLSIISSQRERFRARNQELEAENRLAQHTLQALQSELDSLRADNIKLFEKIKFLQSYPGRGSGSDDTELRYSSQYEERLDPFSSFSKRERQRKYLSLSPWDKATLSMGRLVLSNKMARTIGFFYTLFLHCLVFLVLYKLAWSESMERDCATFCAKKFADHLHKFHENDNGAAAGDLWQ

SEQ ID NO: 122125 - protein, 692 aa, Artificial Sequence
  derived and/or modified sequence
MSAGTGKGGPQTPVESPTASSKLPQAHWLCSPGIKRELDATATVLANRQDESEQSRKRLIEQSREFKKNTPEDLRKQVAPLLKSFQGEIDALSKRSKEAEAAFLNVYKRLIDVPDPVPALDLGQQLQLKVQRLHDIETENQKLRETLEEYNKEFAEVKNQEVTIKALKEKIREYEQTLKNQAETIALEKEQKLQNDFAEKERKLQETQMSTTSKLEEAEHKVQSLQTALEKTRTELFDLKTKYDEETTAKADEIEMIMTDLERANQRAEVAQREAETLREQLSSANHSLQLASQIQKAPDVEQAIEVLTRSSLEVELAAKEREIAQLVEDVQRLQASLTKLRENSASQISQLEQQLSAKNSTLKQLEEKLKGQADYEEVKKELNILKSMEFAPSEGAGTQDAAKPLEVLLLEKNRSLQSENAALRISNSDLSGRCAELQVRITEAVATATEQRELIARLEQDLSIIQSIQRPDAEGAAEHRLEKIPEPIKEATALFYGPAAPASGALPEGQVDSLLSIISSQRERFRARNQELEAENRLAQHTLQALQSELDSLRADNIKLFEKIKFLQSYPGRGSGSDDTELRYSSQYEERLDPFSSFSKRERQRKYLSLSPWDKATLSMGRLVLSNKMARTIGFFYTLFLHCLVFLVLYKLAWSESMERDCATFCAKKFADHLHKFHENDNGAAAGDLWQ

SEQ ID NO: 122126 - DNA, 2942 bp, Artificial Sequence
  derived and/or modified sequence
cgtctcaatatgtctcaagatggcggccaatgtgggatcgatgtttcaatattggaagcgctttgatttacagcagctgcagagagaactcgatgccaccgcaacggtattggcgaaccggcaggatgaaagtgagcagtccagaaagcggcttatcgaacagagccgggagttcaagaagaacactccagaggatttgcgcaagcaggtagcgccgctgctgaagagtttccaaggagagattgatgcactgagtaaaagaagcaaggaagctgaagcagctttcttgaatgtctacaaaagattgattgacgtcccagatcccgtaccagctttggatctcggacagcaactccagctcaaagtgcagcgcctgcacgatattgaaacagagaaccagaaacttagggaaactctggaagaatacaacaaggaatttgctgaagtgaaaaatcaagaggttacgataaaagcacttaaagagaaaatccgagaatatgaacagacactgaagaaccaagccgaaaccatagctcttgagaaggaacagaagttacagaatgactttgcagaaaaggagagaaagctgcaggagacacagatgtccaccacctcaaagctggaggaagctgagcataaggttcagagcctacaaacagccctggaaaaaactcgaacagaattatttgacctgaaaaccaaatacgatgaagaaactactgcaaaggccgacgagattgaaatgatcatgacggaccttgaaagggcaaaccagagggcagaggtggctcagagagaggcggagaccttaagggaacagctctcatcggccaatcactccctccagctggcctcacagatccagaaggcaccagacgtggagcaggccatagaggtgctgacccgctccagcctagaagttgagttggccgccaaggagcgggagatcgcacagctggtggaggacgtgcagagactccaggccagcctcaccaagctgcgggagaattcggccagccagatctcacagcttgagcagcagctgagcgccaaaaacagcacactcaaacaactggaagaaaaactcaaaggccaggctgactatgaagaggtgaagaaagagctgaacattctgaagtccatggagtttgcaccgtccgagggcgctgggacacaggatgcggccaagcccctggaggtgctgttgctggagaagaaccgctcgctgcagtccgagaacgccgcgctgcgcatctccaacagcgacctgagcggacgctgtgcagagctgcaagtccgtatcactgaggctgtggccacagccactgagcagagagagctgatcgcccgcctggagcaggacctgagcatcattcagtccatccagcggcccgatgccgagggtgccgctgagcaccgcctggagaagatcccagagcccatcaaagaggccactgccctattctacggacctgcagcaccagccagcggtgccctcccagagggccaggtggattcactgctttccatcatctccagccagagggagcgcttccgtgcccggaaccaggagcttgaggccgagaaccgcctggcccagcacaccctccaggccctgcagagtgagctggacagcctgcgcgccgacaacatcaagctctttgagaagatcaagttcctgcagagctaccctggccggggcagcggcagtgatgacacggagctgcggtactcgtcccagtacgaggagcgcctggaccccttctcctccttcagcaagcgggagcggcagaggaagtacctgagcttgagtccctgggacaaggccaccctcagcatggggcgtctggttctctccaacaagatggcgcgcaccatcggcttcttctacacactgttcctgcactgcctggtcttcctggtgctctacaagctggcatggagcgagagcatggagagggactgtgccaccttctgcgccaagaagttcgctgaccacctgcacaagttccacgagaatgacaacggggctgcggctggtgacttgtggcagtgataccccggggcctcccccgtgacagtgacggctgcgcctccaccccgactgctcagtgcatctaatcacttagactcccctgaagaatcccccatggaaactgcccttatccgctgtccagcagctgccagaggccccaggtcacctcgggtccccttgaaagaatgtctcggtcacatcaggcccgctaggtccagagagcgagcccccaatgcccggccaggctaagccgcagagaccctctcagcccccacctcaggttagggctctgcccgcagcctgacctctagccctggtggcagaggtccctcagctgcgaggctaattgggtgaccaccgattccagctgcggttaatccagcttgggcctgtctgcactgcgatcctcttgggctctcctaggatccccccatgccccgtaagaggtggaagacgcttccttccaggacagcaggctttgagtccagcacccccagcctgcctttgccaccagccccaccctgcagagtatatgaggcttgacagagtctgccccctcccccactgcaccccaagagagagagccccagccagcggaacagtttctattaccccctccctgcccccagacccatgtgatttctgctttcttctttagcaagatattctggtttctagataaggaagagtctctaatgagcccccgagccccagtctcttcagactcatggattggtctgaggggtctgaacgtctcctagccaatcagaactggctgtggaccaccctagcacggccacctctcagggccactggcaggccttcctgagttagatttgtagttgcatatttagctttgcacatttgaaataaaccacggttgcagccaaaaaaaaaaaaaaaaaaa

SEQ ID NO: 122127 - DNA, 2930 bp, Artificial Sequence
  derived and/or modified sequence
ctcactccgtctcaatatgtctcaagatggcggccaatgtgggatcgatgtttcaatattggaagcgctttgatttacagcagctgcagagagaactcgatgccaccgcaacggtattggcgaaccggcaggatgaaagtgagcagtccagaaagcggcttatcgaacagagccgggagttcaagaagaacactccagaggatttgcgcaagcaggtagcgccgctgctgaagagtttccaaggagagattgatgcactgagtaaaagaagcaaggaagctgaagcagctttcttgaatgtctacaaaagattgattgacgtcccagatcccgtaccagctttggatctcggacagcaactccagctcaaagtgcagcgcctgcacgatattgaaacagagaaccagaaacttagggaaactctggaagaatacaacaaggaatttgctgaagtgaaaaatcaagaggttacgataaaagcacttaaagagaaaatccgagaatatgaacagacactgaagaaccaagccgaaaccatagctcttgagaaggaacagaagttacagaatgactttgcagaaaaggagagaaagctgcaggagacacagatgtccaccacctcaaagctggaggaagctgagcataaggttcagagcctacaaacagccctggaaaaaactcgaacagaattatttgacctgaaaaccaaatacgatgaagaaactactgcaaaggccgacgagattgaaatgatcatgacggaccttgaaagggcaaaccagagggcagaggtggctcagagagaggcggagaccttaagggaacagctctcatcggccaatcactccctccagctggcctcacagatccagaaggcaccagacgtggagcaggccatagaggtgctgacccgctccagcctagaagttgagttggccgccaaggagcgggagatcgcacagctggtggaggacgtgcagagactccaggccagcctcaccaagctgcgggagaattcggccagccagatctcacagcttgagcagcagctgagcgccaaaaacagcacactcaaacaactggaagaaaaactcaaaggccaggctgactatgaagaggtgaagaaagagctgaacattctgaagtccatggagtttgcaccgtccgagggcgctgggacacaggatgcggccaagcccctggaggtgctgttgctggagaagaaccgctcgctgcagtccgagaacgccgcgctgcgcatctccaacagcgacctgagcggacgctgtgcagagctgcaagtccgtatcactgaggctgtggccacagccactgagcagagagagctgatcgcccgcctggagcaggacctgagcatcattcagtccatccagcggcccgatgccgagggtgccgctgagcaccgcctggagaagatcccagagcccatcaaagaggccactgccctattctacggacctgcagcaccagccagcggtgccctcccagagggccaggtggattcactgctttccatcatctccagccagagggagcgcttccgtgcccggaaccaggagcttgaggccgagaaccgcctggcccagcacaccctccaggccctgcagagtgagctggacagcctgcgcgccgacaacatcaagctctttgagaagatcaagttcctgcagagctaccctggccggggcagcggcagtgatgacacggagctgcggtactcgtcccagtacgaggagcgcctggaccccttctcctccttcagcaagcgggagcggcagaggaagtacctgagcttgagtccctgggacaaggccaccctcagcatggggcgtctggttctctccaacaagatggcgcgcaccatcggcttcttctacacactgttcctgcactgcctggtcttcctggtgctctacaagctggcatggagcgagagcatggagagggactgtgccaccttctgcgccaagaagttcgctgaccacctgcacaagttccacgagaatgacaacggggctgcggctggtgacttgtggcagtgataccccggggcctcccccgtgacagtgacggctgcgcctccaccccgactgctcagtgcatctaatcacttagactcccctgaagaatcccccatggaaactgcccttatccgctgtccagcagctgccagaggccccaggtcacctcgggtccccttgaaagaatgtctcggtcacatcaggcccgctaggtccagagagcgagcccccaatgcccggccaggctaagccgcagagaccctctcagcccccacctcaggttagggctctgcccgcagcctgacctctagccctggtggcagaggtccctcagctgcgaggctaattgggtgaccaccgattccagctgcggttaatccagcttgggcctgtctgcactgcgatcctcttgggctctcctaggatccccccatgccccgtaagaggtggaagacgcttccttccaggacagcaggctttgagtccagcacccccagcctgcctttgccaccagccccaccctgcagagtatatgaggcttgacagagtctgccccctcccccactgcaccccaagagagagagccccagccagcggaacagtttctattaccccctccctgcccccagacccatgtgatttctgctttcttctttagcaagatattctggtttctagataaggaagagtctctaatgagcccccgagccccagtctcttcagactcatggattggtctgaggggtctgaacgtctcctagccaatcagaactggctgtggaccaccctagcacggccacctctcagggccactggcaggccttcctgagttagatttgtagttgcatatttagctttgcacatttgaaataaaccacggttgcagcc

SEQ ID NO: 122128 - DNA, 2037 bp, Artificial Sequence
  derived and/or modified sequence
atggccgccaacgtgggcagcatgttccagtactggaagagattcgacctgcagcagctgcagagagagctggacgccaccgccaccgtgctggccaacagacaggacgagagcgagcagagcagaaagagactgatcgagcagagcagagagttcaagaagaacacccccgaggacctgagaaagcaggtggcccccctgctgaagagcttccagggcgagatcgacgccctgagcaagagaagcaaggaggccgaggccgccttcctgaacgtgtacaagagactgatcgacgtgcccgaccccgtgcccgccctggacctgggccagcagctgcagctgaaggtgcagagactgcacgacatcgagaccgagaaccagaagctgagagagaccctggaggagtacaacaaggagttcgccgaggtgaagaaccaggaggtgaccatcaaggccctgaaggagaagatcagagagtacgagcagaccctgaagaaccaggccgagaccatcgccctggagaaggagcagaagctgcagaacgacttcgccgagaaggagagaaagctgcaggagacccagatgagcaccaccagcaagctggaggaggccgagcacaaggtgcagagcctgcagaccgccctggagaagaccagaaccgagctgttcgacctgaagaccaagtacgacgaggagaccaccgccaaggccgacgagatcgagatgatcatgaccgacctggagagagccaaccagagagccgaggtggcccagagagaggccgagaccctgagagagcagctgagcagcgccaaccacagcctgcagctggccagccagatccagaaggcccccgacgtggagcaggccatcgaggtgctgaccagaagcagcctggaggtggagctggccgccaaggagagagagatcgcccagctggtggaggacgtgcagagactgcaggccagcctgaccaagctgagagagaacagcgccagccagatcagccagctggagcagcagctgagcgccaagaacagcaccctgaagcagctggaggagaagctgaagggccaggccgactacgaggaggtgaagaaggagctgaacatcctgaagagcatggagttcgcccccagcgagggcgccggcacccaggacgccgccaagcccctggaggtgctgctgctggagaagaacagaagcctgcagagcgagaacgccgccctgagaatcagcaacagcgacctgagcggcagatgcgccgagctgcaggtgagaatcaccgaggccgtggccaccgccaccgagcagagagagctgatcgccagactggagcaggacctgagcatcatccagagcatccagagacccgacgccgagggcgccgccgagcacagactggagaagatccccgagcccatcaaggaggccaccgccctgttctacggccccgccgcccccgccagcggcgccctgcccgagggccaggtggacagcctgctgagcatcatcagcagccagagagagagattcagagccagaaaccaggagctggaggccgagaacagactggcccagcacaccctgcaggccctgcagagcgagctggacagcctgagagccgacaacatcaagctgttcgagaagatcaagttcctgcagagctaccccggcagaggcagcggcagcgacgacaccgagctgagatacagcagccagtacgaggagagactggaccccttcagcagcttcagcaagagagagagacagagaaagtacctgagcctgagcccctgggacaaggccaccctgagcatgggcagactggtgctgagcaacaagatggccagaaccatcggcttcttctacaccctgttcctgcactgcctggtgttcctggtgctgtacaagctggcctggagcgagagcatggagagagactgcgccaccttctgcgccaagaagttcgccgaccacctgcacaagttccacgagaacgacaacggcgccgccgccggcgacctgtggcagtag

SEQ ID NO: 122129 - DNA, 2037 bp, Artificial Sequence
  derived and/or modified sequence
atggctgcaaacgtcggatctatgttccagtattggaagcgcttcgatctgcagcaactgcagagggaactggatgccacagctacagtgctagccaatcgacaggacgagtcagaacagtcaagaaagagactgatagaacagtcaagggaatttaagaaaaacacccccgaagatttgaggaagcaagtcgcccccctgctgaaatctttccaaggcgaaatcgacgcccttagcaaacggtcaaaagaggccgaggctgcttttctgaacgtgtacaaacgcctgatcgacgttcccgacccagtgcctgcattagatttggggcagcagttgcaactgaaagtccagcgtcttcacgatattgaaaccgagaaccagaagcttcgagaaactctcgaggagtacaataaagagtttgcagaggtgaaaaatcaggaggtgactattaaagcactgaaagaaaagatacgagaatacgaacagactctgaaaaaccaggccgagactatcgcactggagaaagaacaaaaactccagaatgattttgctgagaaagaacggaagttacaggagacacagatgtcaactaccagtaagctggaggaggcggaacacaaagtgcagagcctccagacggctctcgaaaagactagaactgaactgtttgacctgaaaactaaatatgacgaggaaacaacagcaaaggccgacgagattgagatgataatgacggacctcgagagagctaaccagcgagccgaagtggcacaacgcgaggcggagactctgcgggaacagttgtcttcagctaaccatagccttcagctggcctcacaaatccagaaagcacctgatgtcgagcaagcaatcgaggtcttaacccgctcaagtctcgaggtggaattggccgcaaaggaaagggaaatcgctcagctggttgaggacgtgcagcgtctccaagcgtcactcactaaactccgggaaaacagcgccagtcagatctctcagctcgagcaacaattatcagcgaagaatagcacacttaaacagttagaggaaaagttgaaaggacaggccgactatgaggaggtaaagaaagaattgaacatcctgaagagcatggagttcgcaccgtctgaaggggcagggacccaggatgccgcaaagccattggaagtcctgttactagaaaagaacaggagtctccaaagtgaaaacgctgccctacggattagtaattctgacctgtccggacgctgcgccgagctccaggttcggatcacggaggctgtggcgactgcaactgaacaaagggagctgattgcgaggctggaacaggacctgagcatcattcaatcaatccagaggccagatgcagagggtgcagcagaacaccgtctagagaagatccccgaacctatcaaggaagccacagctctgttctacggcccagccgctccggcatcaggagccttgccggagggtcaggtggactctctgctctcaatcatatcctcccagcgagagaggttccgggcaaggaatcaagagctggaagccgaaaatagacttgcacagcacacccttcaggcactgcagtctgaattggatagcctccgcgcagataatataaaactctttgagaagatcaaatttctacagtcataccctggcagaggatctgggtccgatgataccgagctgcgctattcatcccaatatgaggagcggctggatcctttctcttcattttccaagcgggaaagacagaggaagtatctgtcattgtcgccatgggataaggctactttaagtatgggccgccttgtgttgagtaacaaaatggccagaaccatcggtttcttttacacactcttcctccactgcctggtatttttggtgctctataagttagcctggtccgagtcaatggagagagactgcgccactttttgtgccaagaagttcgccgaccatctgcataaattccatgaaaacgacaacggcgccgcagcaggagatctgtggcagtag

SEQ ID NO: 122130 - DNA, 2037 bp, Artificial Sequence
  derived and/or modified sequence
atggccgccaacgtgggctccatgttccagtactggaagagatttgacctgcagcagctgcagcgggagctggatgccacagccaccgtgctggccaaccggcaggatgagagcgagcagagcaggaagaggctcatcgagcagagccgggagttcaagaagaacaccccagaggacctgaggaagcaggtggcccccctgctgaagagcttccagggcgagattgatgccctgagcaagaggagcaaggaggccgaggccgccttcctgaatgtgtacaagaggctgattgatgtgcctgaccctgtgcctgccctggacctgggccagcagctgcagctgaaggtgcagaggctgcatgacatcgagacagagaaccagaagctgcgggagaccctggaggagtacaacaaggagtttgctgaggtgaagaaccaggaggtgaccatcaaggccctgaaggagaagatccgggagtatgagcagaccctgaagaaccaggccgagaccatcgccctggagaaggagcagaagctgcagaatgactttgctgagaaggagaggaagctgcaggagacccagatgagcaccaccagcaagctggaggaggccgagcacaaggtgcagagcctgcagacagccctggagaagaccaggacagagctgtttgacctgaagaccaagtatgatgaggagaccacagccaaggcagatgaaattgagatgatcatgacagacctggagcgggccaaccagagagctgaggtggcccagcgggaggccgagaccctgcgggagcagctgagcagcgccaaccacagcctgcagctggccagccagatccagaaggccccagatgtggagcaggccatcgaggtgctgaccaggagcagcctggaggtggagctggccgccaaggagcgggagatcgcccagctggtggaggatgtgcagaggctgcaggccagcctgaccaagctgagagaaaattctgccagccagatcagccagctggagcagcagctgagcgccaagaacagcaccctgaagcagctggaggagaagctgaagggccaggccgactatgaggaggtgaagaaggagctgaacatcctgaagtccatggagtttgcccccagcgagggcgccggcacccaggatgctgccaagcccctggaggtgctgctgctggagaagaacagaagcctgcagagtgaaaatgctgccctgcgcatcagcaacagcgacctgagcggccgctgtgccgagctgcaggtgcgcatcacagaagctgtggccacagccacagagcagcgggagctgattgcccggctggagcaggacctgagcatcatccagagcatccagaggccagatgctgagggcgctgctgagcaccggctggagaagatccctgagcccatcaaggaggccacagccctcttctacggccctgctgccccagccagcggggccctgcctgagggccaggtggacagcctgctgagcatcatcagcagccagcgggagcgcttccgggccaggaaccaggagctggaggccgagaaccggctggcccagcacaccctgcaggccctgcagagcgagctggacagcctgcgggctgacaacatcaagctgtttgagaagatcaagttcctgcagagctacccaggccggggcagcggcagtgatgacacagagctgcgctacagcagccagtatgaggagcggctggaccccttcagcagcttcagcaagcgggagcggcagaggaagtacctgagcctgagcccctgggacaaggccaccctgtccatgggccgcctggtgctgagcaacaagatggcccggaccatcggcttcttctacaccctcttcctgcactgcctggtgttcctggtgctgtacaagctggcctggagcgagagcatggagcgggactgtgccaccttctgtgccaagaagtttgctgaccacctgcacaagttccatgaaaatgacaatggagctgctgctggggacctgtggcagtag

SEQ ID NO: 122131 - DNA, 2037 bp, Artificial Sequence
  derived and/or modified sequence
atggccgccaacgtgggcagcatgttccagtactggaagcggttcgatctgcagcagctgcagagagaactggatgccactgcgactgtacttgcgaacagacaagatgagtcagagcagtctagaaaacggcttatcgagcagtcgagagaattcaagaaaaacacgccagaagacctcagaaagcaagtagcacccctattgaagtctttccagggcgagattgacgctctgtccaagcggtctaaagaggccgaggctgcctttctcaatgtgtacaagagattgatagatgtgccagatcctgtcccagccctggacctgggccaacagttgcagctgaaagtgcagagactccacgacattgagacggagaaccagaagctgcgcgaaaccctcgaagagtacaacaaggaatttgccgaagtcaagaatcaggaggtgactatcaaagctctgaaggaaaaaatcagagagtacgagcagacgttgaagaatcaggcggagactatcgcacttgaaaaagaacagaagcttcagaacgactttgcagagaaagagaggaagttgcaggaaactcagatgtctacaacctccaagctagaggaagccgaacacaaggtacagtcactgcagacagctctggaaaaaactaggactgaacttttcgacctaaagacaaaatatgatgaggaaaccacagcaaaggctgacgaaattgaaatgatcatgaccgaccttgagagagccaatcagagggccgaggtggcccagcgagaggctgagactctgcgggagcagctctcgtctgctaaccacagcttgcagctggctagtcagatccagaaagcacctgatgtggagcaggccatagaggtcctcacacgctcatccctcgaggtcgagctcgcagcgaaggagcgggaaattgcccagttagtcgaagacgtccagcggctccaggcctcattgacaaagctgagagagaactccgccagccaaatttcacagctggaacaacagctaagcgccaaaaactcgactcttaagcagctggaagagaaactgaaagggcaagcggattacgaggaagtcaaaaaagagctgaacatccttaaatctatggaattcgcacccagcgaaggcgctggcacacaggatgccgccaagccgctggaagtgcttcttctggagaagaatagatctctgcagtccgagaatgcagcgcttcggatcagtaatagcgacctcagcgggcgatgcgcagagcttcaagtccgtatcacagaagccgtggccactgctaccgagcagcgcgaacttatcgccaggcttgaacaggatctgtccattattcagtctattcagcgacctgacgccgaaggtgctgccgaacaccggctcgagaaaatccctgaaccgatcaaggaagcgacggccctgttttacggaccggccgctcccgcctctggtgcattgccagaaggccaggtagactccttgctttccataatcagtagccagcgagagcgttttcgagctagaaaccaggagcttgaggccgagaatcgcttagcgcaacacaccttgcaggccttgcagtcagagctggatagcctaagggccgacaacataaaactttttgaaaaaataaagtttctccagagctaccctggccggggctctgggtctgatgatactgaactacgatattcttcacaatatgaggagcggctcgacccgttttcttctttcagcaagcgcgagcgacaacgaaaatacctgtcactgtccccctgggacaaggcaactctgtctatgggcaggttggtcctttcgaataaaatggctaggaccatcgggtttttttatactctgttcctgcactgcctggtatttctggtgctgtacaaacttgcctggtctgagtccatggagagggattgtgccacattctgtgctaagaaatttgctgaccacttgcataagttccatgaaaatgacaatggagcagctgcgggcgatttgtggcagtag

SEQ ID NO: 122132 - DNA, 2037 bp, Artificial Sequence
  derived and/or modified sequence
atggctgctaacgtcgggagcatgtttcaatactggaagcggttcgacctgcagcagctgcagcgcgagctggatgcaactgccactgtgctcgccaatcgacaggatgaaagtgaacagtcaagaaagcggcttattgagcaatccagagaattcaagaagaatacacctgaggacctaaggaaacaggttgctcctctgctcaagtcttttcaaggtgaaatcgatgctttgtcgaagcggagcaaagaggcagaagctgctttcttgaatgtctacaagcgcctgattgacgtgcctgatcccgtcccggctctagacttaggccaacagctgcagctaaaggtccagaggttgcacgatatagaaactgaaaaccaaaagctacgagagactctcgaagaatacaacaaagaatttgcagaagtaaagaatcaggaggtgacaattaaagcccttaaggagaaaattagggagtatgagcaaacccttaaaaatcaggctgaaacgattgcattagagaaggaacaaaagcttcaaaatgatttcgccgagaaggaacgcaaactccaggagactcaaatgtcgactacctccaaactcgaggaagctgaacataaggtccaaagtctccaaactgccttagagaagactcgcacggaactgttcgacctcaagacaaaatatgatgaggaaacaacagcgaaggcagatgaaattgaaatgataatgaccgacctcgaacgggcaaaccagcgggcagaagtagctcagagggaagcagagactttgcgcgaacagctctcgtccgcaaaccatagtctgcaattggcatcgcagatccagaaggctcctgatgtggagcaggctattgaggtgctgacccggagttccctcgaggtcgaacttgccgcaaaggagcgggagatagctcagctggtggaggacgtgcagcgcttacaggcctccctgacaaaactgagggaaaattccgcttcccaaatctcacagctggaacagcagctctctgccaagaatagcacgctgaagcagctcgaggagaaactgaaaggtcaggctgactatgaggaggtcaaaaaggaactgaacattttgaagtccatggaatttgccccaagtgagggggcagggacccaggacgctgctaagcccctggaggtgctattgttggaaaagaaccgctccctgcagtcagaaaacgcagccctcaggatctccaattctgacctgtctggaagatgtgccgaattacaggtgagaatcactgaagcagtggccactgccacagagcagagagaattaatcgccagactagaacaggacctgagcatcatccagagcattcagcggcctgatgccgagggtgcggcagaacatagactcgagaagattcctgaacctatcaaagaagccactgcccttttttatgggcctgcggcaccagcatccggcgctcttcccgaagggcaggtggatagtctgttgagtatcatctccagccagagggaaaggtttcgggctcgtaaccaagaattggaggcagagaatcggctggcacagcataccttgcaggctttacagtccgaattagatagtctcagagctgataacattaagctgttcgagaagattaagttcctgcagtcctatcctggaagaggctcaggatcagacgatactgaactgcgctatagttcacagtacgaagagagactggatcctttttccagcttctcaaagcgggaacgccagaggaaatatctgtctctctccccatgggataaagcaaccttgagcatggggagacttgtgctgagcaataagatggcacgcactattgggtttttctacactctgtttctgcattgcctcgtcttcctggttctgtataaactcgcctggagcgaaagtatggagcgggattgtgccacattctgcgctaagaagtttgcggaccacttgcataagttccacgagaacgacaatggggctgccgcaggggatctttggcagtag

SEQ ID NO: 122133 - protein, 325 aa, Artificial Sequence
  derived and/or modified sequence
MAAAAASLRGVVLGPRGAGLPGARARGLLCSARPGQLPLRTPQAVALSSKSGLSRGRKVMLSALGMLAAGGAGLAMALHSAVSASDLELHPPSYPWSHRGLLSSLDHTSIRRGFQVYKQVCASCHSMDFVAYRHLVGVCYTEDEAKELAAEVEVQDGPNEDGEMFMRPGKLFDYFPKPYPNSEAARAANNGALPPDLSYIVRARHGGEDYVFSLLTGYCEPPTGVSLREGLYFNPYFPGQAIAMAPPIYTDVLEFDDGTPATMSQIAKDVCTFLRWASEPEHDHRKRMGLKMLMMMALLVPLVYTIKRHKWSVLKSRKLAYRPPK

SEQ ID NO: 122134 - DNA, 978 bp, Artificial Sequence
  derived and/or modified sequence
atggccgccgctgcggccagcttgaggggggtcgttctgggccccaggggtgccgggctcccgggggcacgggctcgtggtctgctttgctccgctcggcccggccagttgccgctgcgcacgccccaggcggtggcactctcatctaaatctggtctcagtagaggcaggaaagtcatgctgtctgccctgggaatgctggccgctggcggagctggcctggccatggcccttcatagtgctgtgagcgcctcagacttggagctgcatccgcccagttatccttggtctcataggggactcctgtctagtctggaccatactagtatcaggagaggatttcaggtgtataaacaggtgtgcgccagctgtcattcaatggactttgttgcctaccggcacttggttggtgtctgctatactgaggatgaagccaaagagctggcagcagaagtcgaggtgcaggacgggcccaacgaagatggagagatgttcatgagacctgggaagctgtttgattacttcccaaagccttaccccaacagtgaagctgccagagcagccaacaacggagcactaccccccgacctctcatacattgtcagggcccgacatggaggcgaagattatgttttcagcctactcacaggatactgtgagccacctaccggagtctctctccgggaagggctttacttcaatccgtacttccccggtcaggccattgccatggcaccgccgatctataccgacgtccttgaatttgacgatggtactccagcgacgatgagtcaaatcgcgaaagatgtgtgcacttttttacggtgggcgtccgagcctgagcatgatcatcggaagcgcatgggcctgaaaatgctgatgatgatggccctgttagtgcctctggtatatactatcaagaggcataagtggtcagtgctgaagagcaggaagctggcttatagacctcccaagtag

SEQ ID NO: 122135 - DNA, 978 bp, Artificial Sequence
  derived and/or modified sequence
atggctgctgctgctgccagcctgcggggcgtggtgctgggccccaggggggccggcctgcccggggcccgggcccggggcctgctgtgcagcgcccggcccggccagctgcccctgcggaccccccaggccgtggccctgagcagcaagagcggcctgagccggggcaggaaggtgatgctgagcgccctgggcatgctggccgccggcggggccggcctggccatggccctgcacagcgctgtgtctgccagtgacctggagctgcaccccccatcctacccctggagccaccggggcctgctgagcagcctggaccacaccagcatcagaagaggcttccaggtgtacaagcaggtgtgtgccagctgccacagcatggactttgtggcctaccgccacctggtgggcgtgtgctacacagaagatgaggccaaggagctggccgctgaggtggaggtgcaggacggccccaatgaagatggagagatgttcatgaggcctgggaagctgtttgactacttccccaagccctaccccaacagcgaggccgcccgggccgccaacaacggggccctgcccccagacctgagctacatcgtgcgggcccggcatggaggagaggactatgtgttcagcctgctgaccggctactgtgagcccccaactggagtgtccctgcgggagggcctgtacttcaacccctacttccctggccaggccatcgccatggccccacccatctacacagatgtgctggagtttgatgatggcaccccagccaccatgagccagatcgccaaggatgtgtgcaccttcctgcgctgggccagcgagcctgagcatgaccacaggaagaggatgggcctgaagatgctgatgatgatggccctgctggtgcccctggtgtacaccatcaagaggcacaagtggagcgtgctgaagagcaggaagctggcctacagaccacccaagtag

SEQ ID NO: 122136 - DNA, 978 bp, Artificial Sequence
  derived and/or modified sequence
atggccgccgccgccgccagcctgcggggcgtggtgctgggccccagaggtgccgggttgccaggtgcgcgagcacggggactgctctgctccgcacgtcccgggcagttacctctgaggacaccccaggccgtcgctttatcctctaaatcggggttgagtcgagggagaaaggtaatgttgtcagctctgggtatgctggctgctggtggggccggtctggccatggccctccactctgctgtctcagcaagcgacttggagctccatccacctagctacccttggagccataggggtttgttatcatcgctcgaccatacttcaattcgccgagggttccaggtgtataagcaagtatgcgcctcatgccattccatggatttcgtcgcttaccggcatcttgtaggggtgtgttataccgaggatgaagcgaaagaactagcggctgaggtggaagtacaggacggccccaacgaggacggagaaatgttcatgagaccaggtaaacttttcgactatttccccaagccttatccaaactccgaggccgctcgcgctgcaaataacggcgcactgccacccgacttgtcctacatagtgcgcgcccgccacggaggcgaggactacgtcttcagcctccttactggatactgtgagccccccacgggcgtatcattacgagagggactttacttcaatccctatttccctggccaggccatcgctatggccccgccaatctacactgatgttttggagttcgatgatggcacccctgccactatgtctcagattgccaaggatgtctgcacctttttgaggtgggcaagtgaaccagaacatgaccatcggaagaggatggggctgaaaatgttgatgatgatggccctgctggtccccctagtttacaccatcaaaagacacaagtggagtgtactcaaatccaggaagctggcatatcgaccccctaagtag

SEQ ID NO: 122137 - DNA, 978 bp, Artificial Sequence
  derived and/or modified sequence
atggctgccgcagctgcttccttgcggggagtagtgctgggtccaaggggcgcaggactgcccggagcacgcgctcggggactgctttgtagcgctagaccgggacagctacctctgaggacacctcaggccgtggctctctcgtccaagtcaggactttcccgaggtaggaaagtaatgctgagcgctcttggaatgctcgctgccggaggagcgggactggcaatggccctacattccgccgtcagcgcatcggacctggagctgcatcctccatcttacccctggtcccatagaggtctcttgtcaagtctggatcacacttcaattcgccgaggatttcaggtatacaagcaggtgtgcgcgtcctgtcatagtatggacttcgtggcatacaggcaccttgtcggcgtatgctacacagaggacgaggcaaaggaactggccgctgaagtagaggtgcaggatggtccaaatgaggatggggagatgtttatgcgaccaggtaaactctttgattacttccctaaaccttacccaaacagcgaagccgcaagagcagccaataacggagccctgccacctgatctcagctatattgtgagggccaggcatggtggcgaagattatgtgttctcgttactgacaggctactgcgagcctcctacaggcgtgtcactccgcgaaggcctgtactttaacccgtacttccccggacaggcaatagctatggcaccccctatatacacagacgtcttggagttcgacgatggcacaccggcaacgatgagccaaattgcaaaggacgtgtgcacattcctgcgctgggccagcgagccagagcacgatcacagaaagcgtatgggactcaagatgctgatgatgatggccctcctggtccccctggtgtatacaatcaagaggcataaatggtccgtcctgaaatctaggaagttggcctacagaccgccaaagtag

SEQ ID NO: 122138 - DNA, 1240 bp, Artificial Sequence
  derived and/or modified sequence
gctttcgcgaggttttgactctcgtggcgccccaggggccgacgggagtggcggccgcgcggaggaggccaagatggcggcagctgcggcttcgcttcgcggggtagtgttgggcccgcggggcgcggggctcccgggcgcgcgtgcccggggtctgctgtgcagcgcgcgtcccgggcagctcccgctacggacacctcaggcagtggccttgtcgtcgaagtctggcctttcccgaggccggaaagtgatgctgtcagcgctgggcatgctggcggcagggggtgcggggctggccatggctctgcattcggctgtgagtgccagtgacctggagctgcacccccccagctatccgtggtctcaccgtggcctcctctcttccttggaccacaccagcatccggaggggtttccaggtatataagcaggtgtgcgcctcctgccacagcatggacttcgtggcctaccgccacctggtgggcgtgtgctacacggaggatgaagctaaggagctggctgcggaggtggaggttcaagacggccccaatgaagatggggagatgttcatgcggccagggaagctgttcgactatttcccaaaaccataccccaacagtgaggctgctcgagctgccaacaacggagcattgccccctgacctcagctacatcgtgcgagctaggcatggtggtgaggactacgtcttctccctgctcacgggctactgcgagccacccaccggggtgtcactgcgggaaggtctctacttcaacccctactttcctggccaggccattgccatggcccctcccatctacacagatgtcttagagtttgacgatggcaccccagctaccatgtcccagatagccaaggatgtgtgcaccttcctgcgctgggcatctgagccagagcacgaccatcgaaaacgcatggggctcaagatgttgatgatgatggctctgctggtgcccctggtctacaccataaagcggcacaagtggtcagtcctgaagagtcggaagctggcatatcggccgcccaagtgaccctgtccagtgtctgcttgccatcctgccagaacaggccctcaagcccaagagccatcccaggcctgttcaggcctcagctaagcctctcttcatctggaagaagaggcaagggggcaggagaccaggctctagctctgggccctccttcagcccccatcatgggaataaattaattttctcaatgta

SEQ ID NO: 122139 - DNA, 978 bp, Artificial Sequence
  derived and/or modified sequence
atggccgccgccgccgccagcctgagaggcgtggtgctgggccccagaggcgccggcctgcccggcgccagagccagaggcctgctgtgcagcgccagacccggccagctgcccctgagaaccccccaggccgtggccctgagcagcaagagcggcctgagcagaggcagaaaggtgatgctgagcgccctgggcatgctggccgccggcggcgccggcctggccatggccctgcacagcgccgtgagcgccagcgacctggagctgcacccccccagctacccctggagccacagaggcctgctgagcagcctggaccacaccagcatcagaagaggcttccaggtgtacaagcaggtgtgcgccagctgccacagcatggacttcgtggcctacagacacctggtgggcgtgtgctacaccgaggacgaggccaaggagctggccgccgaggtggaggtgcaggacggccccaacgaggacggcgagatgttcatgagacccggcaagctgttcgactacttccccaagccctaccccaacagcgaggccgccagagccgccaacaacggcgccctgccccccgacctgagctacatcgtgagagccagacacggcggcgaggactacgtgttcagcctgctgaccggctactgcgagccccccaccggcgtgagcctgagagagggcctgtacttcaacccctacttccccggccaggccatcgccatggccccccccatctacaccgacgtgctggagttcgacgacggcacccccgccaccatgagccagatcgccaaggacgtgtgcaccttcctgagatgggccagcgagcccgagcacgaccacagaaagagaatgggcctgaagatgctgatgatgatggccctgctggtgcccctggtgtacaccatcaagagacacaagtggagcgtgctgaagagcagaaagctggcctacagaccccccaagtag

SEQ ID NO: 122140 - protein, 302 aa, Artificial Sequence
  derived and/or modified sequence
MALVASVRVPARVLLRAGARLPGAALGRTERAAGGGDGARRFGSQRVLVEPDAGAGVAVMKFKNPPVNSLSLEFLTELVISLEKLENDKSFRGVILTSDRPGVFSAGLDLTEMCGRSPAHYAGYWKAVQELWLRLYQSNLVLVSAINGACPAGGCLVALTCDYRILADNPRYCIGLNETQLGIIAPFWLKDTLENTIGHRAAERALQLGLLFPPAEALQVGIVDQVVPEEQVQSTALSAIAQWMAIPDHARQLTKAMMRKATASRLVTQRDADVQNFVSFISKDSIQKSLQMYLERLKEEKG

SEQ ID NO: 122141 - DNA, 909 bp, Artificial Sequence
  derived and/or modified sequence
atggccctggtggccagcgtgagagtgcccgccagagtgctgctgagagccggcgccagactgcccggcgccgccctgggcagaaccgagagagccgccggcggcggcgacggcgccagaagattcggcagccagagagtgctggtggagcccgacgccggcgccggcgtggccgtgatgaagttcaagaacccccccgtgaacagcctgagcctggagttcctgaccgagctggtgatcagcctggagaagctggagaacgacaagagcttcagaggcgtgatcctgaccagcgacagacccggcgtgttcagcgccggcctggacctgaccgagatgtgcggcagaagccccgcccactacgccggctactggaaggccgtgcaggagctgtggctgagactgtaccagagcaacctggtgctggtgagcgccatcaacggcgcctgccccgccggcggctgcctggtggccctgacctgcgactacagaatcctggccgacaaccccagatactgcatcggcctgaacgagacccagctgggcatcatcgcccccttctggctgaaggacaccctggagaacaccatcggccacagagccgccgagagagccctgcagctgggcctgctgttcccccccgccgaggccctgcaggtgggcatcgtggaccaggtggtgcccgaggagcaggtgcagagcaccgccctgagcgccatcgcccagtggatggccatccccgaccacgccagacagctgaccaaggccatgatgagaaaggccaccgccagcagactggtgacccagagagacgccgacgtgcagaacttcgtgagcttcatcagcaaggacagcatccagaagagcctgcagatgtacctggagagactgaaggaggagaagggctag

SEQ ID NO: 122142 - DNA, 1541 bp, Artificial Sequence
  derived and/or modified sequence
aggaggcgagctcagcccgcgacctttatcccgcgcgttgcggtcaagatggcgctggtggcttctgtgcgagtcccggcgcgcgttctgctccgcgcgggggcccggctcccgggcgcggccctcgggcggacggagcgggcggccggcggcggagacggcgcgcggcgcttcgggagccagcgggtgctggtggagccggacgcgggcgcaggggtcgctgtgatgaaattcaagaaccccccagtgaacagcctgagcctggagtttctgacggagctggtcatcagcctggagaagctggagaatgacaagagcttccgcggtgtcattctgacctcggaccgcccgggtgtcttctcggccggcctggacctgacggagatgtgtgggaggagccccgcccactacgctgggtactggaaggccgttcaggagctgtggctgcggttgtaccagtccaacctggtgctggtctccgccatcaacggagcctgccccgctggaggctgcctggtggccctgacctgtgactaccgcatcctggcggacaaccccaggtactgcataggactcaatgagacccagctgggcatcatcgcccctttctggttgaaagacaccctggagaacaccatcgggcaccgggcggcggagcgtgccctgcagctggggctgctcttcccgccggcggaggccctgcaggtgggcatagtggaccaggtggtcccggaggagcaggtgcagagcactgcgctgtcagcgatagcccagtggatggccattccagaccatgctcgacagctgaccaaggccatgatgcgaaaggccacggccagccgcctggtcacgcagcgcgatgcggacgtgcagaacttcgtcagcttcatctccaaagactccatccagaagtccctgcagatgtacttagagaggctcaaagaagaaaaaggctaacgattgggctgccacaggcttacggccacacgtgcccctgtgggtcccagggaggtcttaaacaaggtatttttcaacttaaaagtactgccagcgtttcattttgctgatgttacgtagaagttcctgttcctcatagcccagtggcccaaggcccagccacacacaaacacacatgggtgcctgtgcccgtcaggcaaggggagttggagggcagccttttgacttgggattgtgactggcaggggatgccattctggacctggtgaggttgccacggagtgtctctgttcccaaggcagaatcgtaagtcaagtccctggtcatccattctggcctttggactgcctgctcttaggtgtaaggccaggtggtcttggcccccatgacccacacagaactccccagggaaaagccctttggtcactgcccttactcatcaggatgaagagcgcacagtgaatcagagcaactgggggatcctgagccagcgggagtgggactctggaggcagctgtgctgccagggatccaaatgtcccttaagaaggattttgcaagaaccaaactcatccaaacccttga

SEQ ID NO: 122143 - DNA, 909 bp, Artificial Sequence
  derived and/or modified sequence
atggctctcgttgcctctgtgcgggtgcccgctcgggtactgctgagagctggagctcgattacccggcgccgccctcggtcggacagaacgcgcagccggaggcggtgatggcgcgagacgctttggaagtcagagggtcctggttgagcctgacgcaggtgcaggggtggccgtcatgaagtttaaaaacccccccgttaatagcctttctttagagtttctgactgagctcgtcatcagtctggagaaactcgagaacgacaagtcctttagaggcgttattctgaccagtgatcggcctggcgtgttctccgctgggctggaccttactgagatgtgtggcaggagccccgcgcactatgcaggctactggaaggcggtccaggagctgtggctcaggctgtatcagtccaatcttgtgctcgtttccgcgattaacggcgcatgtcctgcaggaggctgtctcgttgcgctcacctgcgattaccggattttggctgacaatcctcggtattgtatcggcttgaatgaaacacaacttggaattattgcaccgttttggctgaaggatactctggaaaataccataggacatcgggctgctgagcgcgcgttacagttaggactgctgtttccgcccgccgaggccctgcaggtcggtattgttgaccaggtggtgccagaggagcaggtgcagtctacggctctaagcgccattgcccagtggatggccatcccggaccatgctaggcaattaaccaaagcaatgatgcggaaggctacggcttcccgcttagtgacccaacgcgatgcagacgtacagaacttcgtgagctttatttcaaaagattcaatacagaagagcctgcagatgtacctcgaaagactgaaggaggaaaagggctag

SEQ ID NO: 122144 - DNA, 909 bp, Artificial Sequence
  derived and/or modified sequence
atggccctggtggcctctgtgcgggtgcctgcccgggtgctgctgcgggccggggcccggctgcccggggccgccctgggccgcacagaaagagctgctggaggaggagatggagcccggcgcttcggcagccagagggtgctggtggagccagatgctggagctggggtggccgtgatgaagttcaagaacccccctgtgaacagcctgagcctggagttcctgacagagctggtgatcagcctggagaagctggagaatgacaagagcttccggggcgtcatcctgaccagtgacaggcctggggtcttctctgctggcctggacctgacagagatgtgtggccgcagccctgcccactacgccggctactggaaggctgtgcaggagctgtggctgcggctgtaccagagcaacctggtgctggtgtctgccatcaatggagcctgcccagctgggggctgcctggtggccctgacctgtgactaccgcatcctggccgacaacccccgctactgcatcggcctgaatgagacccagctgggcatcatcgcccccttctggctgaaggacaccctggagaacaccatcggccacagagctgctgagcgggccctgcagctgggcctgctcttccccccagctgaggccctgcaggtgggcatcgtggaccaggtggtgcctgaggagcaggtgcagagcacagccctgagcgccatcgcccagtggatggccatcccagaccacgcccggcagctgaccaaggccatgatgaggaaggccacagccagccggctggtgacccagagagatgctgatgtgcagaactttgtgtccttcatcagcaaggacagcatccagaagagcctgcagatgtacctggagcggctgaaggaggagaagggctag

SEQ ID NO: 122145 - DNA, 909 bp, Artificial Sequence
  derived and/or modified sequence
atggccctggtggccagcgtgcgggtgcccgcccgggtgctgctgcgtgcaggagccagactgccaggggcggccctggggcggaccgagcgcgctgcgggcggaggagatggtgctcggagatttggtagtcagagagtgctggtagaacctgacgcgggcgccggagtggctgtcatgaaattcaagaatccaccagttaattccttaagcttagagtttctaactgagctagtgattagcttggaaaagctggaaaatgataagagctttcgaggggtgatactgacgtccgatcgaccgggtgtattttcagccggcctggatctcacggaaatgtgcggtcgatctcccgcgcactacgctggctattggaaggccgtgcaggagctgtggctgcgactgtatcagagcaaccttgtactagtgtccgcgatcaacggcgcgtgtccagctggaggatgccttgtggcactgacatgcgattatcgaattctggccgataatccccggtactgtatcggcctgaacgagacccaactcgggatcattgctccattctggctgaaagatactctggagaacaccatcgggcaccgcgccgccgagcgggctctccagctgggactgttgttcccacccgccgaggccctgcaggtaggtatcgtggaccaggtagtgccagaggagcaggtacagagcacggccctaagcgccattgctcaatggatggccatcccagaccacgccagacagttaaccaaagcaatgatgaggaaggctacagcctcgagacttgtcactcagagagatgccgatgtccaaaactttgtgagcttcatctcaaaagacagcattcagaagtctcttcagatgtatttagaacggttaaaggaggagaagggttag

SEQ ID NO: 122146 - DNA, 909 bp, Artificial Sequence
  derived and/or modified sequence
atggcactggtggcctcagtgcgcgtgcctgcccgagtgctgcttcgcgcaggagctcggctgccaggagctgccctaggcaggacagaacgagccgctggcggtggggacggggctcggaggttcggcagccagagggttctggttgaaccagatgccggagcaggcgtagctgtgatgaaattcaaaaacccacctgtcaattctctttccctggaattcctgacagaactcgtcatctcattggaaaagctggaaaacgacaagtcatttaggggagtgatacttaccagtgatagacctggagtgttttcggcgggactggacttgaccgagatgtgtgggagatcacccgctcattatgcgggatactggaaagctgtgcaggaactctggcttaggctgtaccaatccaatctcgtgctggtctcagctatcaatggcgcttgtcccgcaggaggctgtctcgtggcattaacctgtgactatcgcattctggcagacaatccaagatactgtatcggcctcaacgagacgcaactgggcataattgcgcctttttggctgaaagacaccctggaaaatacaattgggcatagggcagcggagcgggctctgcagctcggccttctgtttcccccagccgaggctttgcaggtgggcattgtcgaccaggtcgttccggaggagcaggtccagagcacagcactgagcgccatcgctcaatggatggccatcccagaccatgctcggcagctcacgaaggctatgatgagaaaagccacagcgtcacggcttgtgactcagagagatgccgacgtccagaactttgtaagttttatctcaaaggactctattcagaagagcctgcaaatgtacctcgaacgcttgaaagaggaaaagggctag

SEQ ID NO: 122147 - protein, 519 aa, Artificial Sequence
  derived and/or modified sequence
MSPLWWGFLLSCLGCKILPGAQGQFPRVCMTVDSLVNKECCPRLGAESANVCGSQQGRGQCTEVRADTRPWSGPYILRNQDDRELWPRKFFHRTCKCTGNFAGYNCGDCKFGWTGPNCERKKPPVIRQNIHSLSPQEREQFLGALDLAKKRVHPDYVITTQHWLGLLGPNGTQPQFANCSVYDFFVWLHYYSVRDTLLGPGRPYRAIDFSHQGPAFVTWHRYHLLCLERDLQRLIGNESFALPYWNFATGRNECDVCTDQLFGAARPDDPTLISRNSRFSSWETVCDSLDDYNHLVTLCNGTYEGLLRRNQMGRNSMKLPTLKDIRDCLSLQKFDNPPFFQNSTFSFRNALEGFDKADGTLDSQVMSLHNLVHSFLNGTNALPHSAANDPIFVVLHSFTDAIFDEWMKRFNPPADAWPQELAPIGHNRMYNMVPFFPPVTNEELFLTSDQLGYSYAIDLPVSVEETPGWPTTLLVVMGTLVALVGLFVLLAFLQYRRLRKGYTPLMETHLSSKRYTEEA

SEQ ID NO: 122148 - DNA, 1560 bp, Artificial Sequence
  derived and/or modified sequence
atgagccccctgtggtggggcttcctgctgagctgcctgggctgcaagatcctgcccggcgcccagggccagttccccagagtgtgcatgaccgtggacagcctggtgaacaaggagtgctgccccagactgggcgccgagagcgccaacgtgtgcggcagccagcagggcagaggccagtgcaccgaggtgagagccgacaccagaccctggagcggcccctacatcctgagaaaccaggacgacagagagctgtggcccagaaagttcttccacagaacctgcaagtgcaccggcaacttcgccggctacaactgcggcgactgcaagttcggctggaccggccccaactgcgagagaaagaagccccccgtgatcagacagaacatccacagcctgagcccccaggagagagagcagttcctgggcgccctggacctggccaagaagagagtgcaccccgactacgtgatcaccacccagcactggctgggcctgctgggccccaacggcacccagccccagttcgccaactgcagcgtgtacgacttcttcgtgtggctgcactactacagcgtgagagacaccctgctgggccccggcagaccctacagagccatcgacttcagccaccagggccccgccttcgtgacctggcacagataccacctgctgtgcctggagagagacctgcagagactgatcggcaacgagagcttcgccctgccctactggaacttcgccaccggcagaaacgagtgcgacgtgtgcaccgaccagctgttcggcgccgccagacccgacgaccccaccctgatcagcagaaacagcagattcagcagctgggagaccgtgtgcgacagcctggacgactacaaccacctggtgaccctgtgcaacggcacctacgagggcctgctgagaagaaaccagatgggcagaaacagcatgaagctgcccaccctgaaggacatcagagactgcctgagcctgcagaagttcgacaacccccccttcttccagaacagcaccttcagcttcagaaacgccctggagggcttcgacaaggccgacggcaccctggacagccaggtgatgagcctgcacaacctggtgcacagcttcctgaacggcaccaacgccctgccccacagcgccgccaacgaccccatcttcgtggtgctgcacagcttcaccgacgccatcttcgacgagtggatgaagagattcaacccccccgccgacgcctggccccaggagctggcccccatcggccacaacagaatgtacaacatggtgcccttcttcccccccgtgaccaacgaggagctgttcctgaccagcgaccagctgggctacagctacgccatcgacctgcccgtgagcgtggaggagacccccggctggcccaccaccctgctggtggtgatgggcaccctggtggccctggtgggcctgttcgtgctgctggccttcctgcagtacagaagactgagaaagggctacacccccctgatggagacccacctgagcagcaagagatacaccgaggaggcctag

SEQ ID NO: 122149 - DNA, 1560 bp, Artificial Sequence
  derived and/or modified sequence
atgtccccgctttggtggggcttcttgctgtcttgtctcggctgtaagatcctgccgggcgctcagggccagtttcctcgggtgtgcatgaccgtggattcattggtgaacaaagagtgttgcccccggctgggcgccgagtccgcaaatgtctgcggttctcagcaagggaggggtcagtgtacagaagtgcgtgctgatacgcgcccttggtctggtccctacattctccgtaatcaggatgatagagagctgtggcccagaaaatttttccacaggacttgtaaatgcaccgggaactttgctggctacaactgtggggactgcaagtttggctggacggggcccaattgtgaaagaaagaagccacccgtcataagacagaacattcacagtctctcaccgcaggagcgagaacagtttctgggggccctggacctggctaaaaagcgggtgcatcctgattatgttatcacaactcaacattggcttggcttgctgggccccaacggaactcagccccagtttgccaactgttctgtctacgacttctttgtctggctccactactattcggtgagagacaccctgctcggacctggcaggccatatcgtgcgattgacttctctcaccaggggcccgcatttgtaacatggcaccgctaccacctgttgtgcctggaacgtgacttacagaggttaattggcaacgagagttttgcccttccctattggaactttgctactggtcggaacgagtgcgacgtttgcacagaccagctgtttggggctgccaggccagacgatccaactcttatctcgcgaaacagtagattctcttcttgggaaaccgtttgtgatagcctggatgattataaccacctggtaacactgtgtaacggcacctatgagggcttgctgcggcgcaaccaaatgggacgaaactctatgaaactgcccacactaaaggacatccgggattgccttagtctgcaaaagttcgacaaccctcccttctttcagaactctacatttagcttccgaaatgccctcgagggatttgataaggccgatggcacactcgatagtcaagtgatgagccttcacaatctggttcacagcttcttaaacggcactaatgccctgccccatagcgcagccaacgacccaattttcgtcgtgcttcactcctttactgacgccatcttcgacgagtggatgaagcgctttaatccacctgctgacgcatggccgcaggagctcgcaccaattggtcataataggatgtacaatatggttcctttctttccacccgtgactaacgaagagctttttttgacttctgaccagctcgggtacagctacgcaatcgatttacccgtctctgtcgaggagaccccgggatggcccacgactctgttggtggttatgggcaccctggtagctctggtgggtctgttcgttctcttggctttcctacagtatcgtcgcttgcgcaagggatatactccactgatggaaacccatctgtcaagtaagagatacaccgaggaggcctag

SEQ ID NO: 122150 - DNA, 1560 bp, Artificial Sequence
  derived and/or modified sequence
atgagccccctgtggtggggcttcctgctgagctgcctgggctgcaagatcctgcccggggcccagggccagttcccccgggtgtgcatgacagtggacagcctggtgaacaaggagtgctgcccccggctgggcgctgagagcgccaacgtgtgtggcagccagcagggccggggccagtgcacagaggtgcgggctgacacccggccctggagcggcccctacatcctgaggaaccaggatgaccgggagctgtggcccaggaagttcttccacaggacctgcaagtgcaccggcaactttgctggctacaactgtggggactgcaagtttggctggacaggccccaactgtgagaggaagaagccccctgtgatccggcagaacatccacagcctgagcccccaggagcgggagcagttcctgggcgccctggacctggccaagaagagggtgcacccagactatgtgatcaccacccagcactggctgggcctgctgggccccaacggcacccagccccagtttgccaactgcagcgtgtatgacttctttgtgtggctgcactactacagcgtgcgggacaccctgctgggccctggccggccctaccgggccatcgacttcagccaccagggccctgcctttgtgacctggcaccgctaccacctgctgtgcctggagcgggacctgcagaggctgattggaaatgaaagctttgccctgccctactggaactttgccactggaagaaatgaatgtgatgtgtgcacagaccagctgtttggagctgcccggccagatgaccccaccctcatcagcaggaacagccgcttcagctcctgggagaccgtgtgtgacagcctggatgactacaaccacctggtgaccctgtgcaatggcacctatgagggcctgctgcggaggaaccagatgggcaggaacagcatgaagctgcccaccctgaaggacatccgggactgcctgagcctgcagaagtttgacaacccccccttcttccagaacagcaccttctccttcagaaatgccctggagggctttgacaaggcagatggcaccctggacagccaggtgatgagcctgcacaacctggtgcacagcttcctgaatggcaccaatgccctgccccacagcgctgccaatgaccccatctttgtggtgctgcacagcttcacagatgccatctttgatgagtggatgaagcgcttcaaccccccagcagatgcctggccccaggagctggcccccatcggccacaacaggatgtacaacatggtgcccttcttcccccctgtgaccaatgaggagctgttcctgaccagtgaccagctgggctacagctatgccatcgacctgcctgtgtctgtggaggagaccccaggctggcccaccaccctgctggtggtgatgggcaccctggtggccctggtgggcctgtttgtgctgctggccttcctgcagtaccgccgcctgaggaagggctacacccccctgatggagacccacctgagcagcaagcgctacacagaggaggcctag

SEQ ID NO: 122151 - DNA, 1560 bp, Artificial Sequence
  derived and/or modified sequence
atgagccccctgtggtggggcttcctgctgagctgcctgggctgcaagatcctacctggtgcgcaaggccagttccctcgagtgtgtatgaccgtggattctctggtaaataaggaatgctgtccgaggctcggggcggagagtgctaatgtatgtggatcccagcagggccgtggtcagtgcaccgaggtccgagcggataccagaccatggtctgggccgtacattctcaggaaccaggacgacagagagctctggcccaggaagttcttccatcggacttgcaagtgcacaggcaatttcgccggctacaactgtggcgattgtaagttcggctggaccggacctaactgcgagagaaagaaaccccctgtgattcggcagaacatccatagcctttctccccaggagcgtgagcagttccttggggcacttgacctcgccaagaaaagggtgcatccagactatgtcattacaacccagcactggctcggcttgcttggaccaaatgggacccagccccaatttgcgaactgctctgtttacgatttcttcgtttggcttcactattactctgtcagggatacccttctgggccctggaaggccctacagggcaatcgacttttcgcaccagggacctgcgtttgtgacctggcacaggtatcatctcctgtgcctcgagagggacttgcagcggctaatcgggaacgagtcttttgctctcccttattggaattttgccactgggcgtaatgaatgcgacgtatgcacggatcagctgtttggcgcggctcgacccgatgatccgacactcatttctagaaactcaagatttagctcatgggaaactgtctgtgacagcctcgacgactacaaccacctcgtgaccttgtgtaatggtacatacgagggcctactgcggcgcaaccagatgggaagaaatagtatgaaattgcccactctgaaggatattcgtgactgcctgtccctgcagaaattcgacaatccgccttttttccaaaactcaaccttcagctttaggaatgctctggaaggtttcgataaagccgatggtacattggattcccaggtgatgtcacttcacaacctggtccacagctttctgaacggcactaacgccttaccccattctgcagccaacgaccctattttcgtggttctacacagcttcacagacgctatttttgacgagtggatgaagcggttcaatcctcccgccgatgcttggccacaagaactggcacccattggccacaatcgcatgtataacatggtacctttctttccccctgtgacgaacgaggagctctttctgacttcagaccagttgggatactcttatgctattgacctcccagtgagtgttgaggagacgcctggctggccaaccactctcttggtagtcatggggaccctggtcgccctagtgggactgtttgtgctcctggcatttctgcagtatcgaaggctccggaagggctatacacctctcatggagactcacctgtcctccaagcgatacactgaggaagcgtag

SEQ ID NO: 122152 - DNA, 1560 bp, Artificial Sequence
  derived and/or modified sequence
atgagcccgctgtggtggggctttttactgtcatgcttgggttgtaagatcttaccaggcgctcaaggccagttccctagagtgtgtatgaccgttgatagtctagtcaataaagaatgttgcccacggctgggtgcagagtctgcaaacgtgtgcggatcgcagcagggcagaggtcagtgcacagaggtcagggcagatactcgaccatggtccggaccctacattttaagaaaccaggatgaccgcgaactgtggcctaggaagttctttcaccgaacctgcaagtgtacgggtaactttgccggatacaattgcggcgactgcaaatttggctggactggccctaactgtgaacgcaagaaaccccctgttatccggcagaacattcacagtctaagcccacaggagcgggagcagtttctgggggcactcgatctggccaaaaaacgggtacaccccgactatgttatcaccacacagcattggctgggcctgttaggtccgaacggaacccagcctcaattcgctaactgttcagtatatgatttttttgtgtggctgcactattacagtgttagagacaccctgctcggcccagggaggccttaccgtgctattgatttttcccatcagggcccagctttcgtcacatggcaccgttaccatctgctctgtttagaacgggacttgcagcgcctgatcggaaacgaatcctttgcactaccttactggaacttcgctactggtcggaacgagtgcgacgtgtgcaccgatcagctttttggcgctgctcggccagacgatccgaccctgatctcgaggaacagccgattttcctcctgggagactgtgtgcgatagcctcgatgactacaaccacctggtaacgctttgcaacggaacgtacgagggccttctgcgcaggaaccagatgggtagaaactcgatgaaattacctactctgaaagatatcagagactgcctgagcttacagaaatttgacaacccccctttcttccaaaactcaacatttagctttcgaaacgccctggagggatttgacaaagccgatggaacattggactcccaagttatgtcactgcacaacctggttcattcatttctgaatggcacgaacgcactaccacactctgccgctaatgacccgatctttgtcgttcttcactcctttaccgatgctatcttcgatgagtggatgaaacggttcaacccaccggctgatgcctggcctcaggaattggccccaatagggcataatcgcatgtacaacatggtgcctttctttccacccgtcaccaacgaagagttgttcttaacctcagaccagctgggatatagctacgctattgacttgcccgtcagcgtggaggaaacccccggatggccaacaactttgcttgtggtcatgggtactctggtggccctcgtaggtctcttcgtcctgctggcctttttgcagtataggcgtctcaggaaaggctatactcccctgatggagacccatctctcttctaaacggtataccgaggaagcgtag

SEQ ID NO: 122153 - DNA, 2291 bp, Artificial Sequence
  derived and/or modified sequence
gcaattaaagtcaagagctaaggagggagggagagggtttagaaataccagcataataagtagtatgactgggtgctctgtaaattaactcaattagacaaagcctgacttaacgggggaagatggtgagaagcgctaccctcattaaatttggttgttagaggcgcttctaaggaaattaagtctgttagttgtttgaatcacataaaattgtgtgtgcacgttcatgtacacatgtgcacacatgtaacctctgtgattcttgtgggtatttttttaagaagaaaggaatagaaagcaaagaaaaataaaaaatactgaaaagaaaagactgaaagagtagaagataaggagaaaagtacgacagagacaaggaaagtaagagagagagagagctctcccaattataaagccatgagccccctttggtgggggtttctgctcagttgcttgggctgcaaaatcctgccaggagcccagggtcagttcccccgagtctgcatgacggtggacagcctagtgaacaaggagtgctgcccacgcctgggtgcagagtcggccaatgtctgtggctctcagcaaggccgggggcagtgcacagaggtgcgagccgacacaaggccctggagtggtccctacatcctacgaaaccaggatgaccgtgagctgtggccaagaaaattcttccaccggacctgcaagtgcacaggaaactttgccggctataattgtggagactgcaagtttggctggaccggtcccaactgcgagcggaagaaaccaccagtgattcggcagaacatccattccttgagtcctcaggaaagagagcagttcttgggcgccttagatctcgcgaagaagagagtacaccccgactacgtgatcaccacacaacactggctgggcctgcttgggcccaatggaacccagccgcagtttgccaactgcagtgtttatgatttttttgtgtggctccattattattctgttagagatacattattaggaccaggacgcccctacagggccatagatttctcacatcaaggacctgcatttgttacctggcaccggtaccatttgttgtgtctggaaagagatctccagcgactcattggcaatgagtcttttgctttgccctactggaactttgccactgggaggaacgagtgtgatgtgtgtacagaccagctgtttggggcagcgagaccagacgatccgactctgattagtcggaactcaagattctccagctgggaaactgtctgtgatagcttggatgactacaaccacctggtcaccttgtgcaatggaacctatgaaggtttgctgagaagaaatcaaatgggaagaaacagcatgaaattgccaaccttaaaagacatacgagattgcctgtctctccagaagtttgacaatcctcccttcttccagaactctaccttcagtttcaggaatgctttggaagggtttgataaagcagatgggactctggattctcaagtgatgagccttcataatttggttcattccttcctgaacgggacaaacgctttgccacattcagccgccaatgatcccatttttgtggttcttcattcctttactgatgccatctttgatgagtggatgaaaagatttaatcctcctgcagatgcctggcctcaggagctggcccctattggtcacaatcggatgtacaacatggttcctttcttccctccagtgactaatgaagaactctttttaacctcagaccaacttggctacagctatgccatcgatctgccagtttcagttgaagaaactccaggttggcccacaactctcttagtagtcatgggaacactggtggctttggttggtctttttgtgctgttggcttttcttcaatatagaagacttcgaaaaggatatacacccctaatggagacacatttaagcagcaagagatacacagaagaagcctagggtgctcatgccttacctaagagaagaggctggccaagccacagttctgacgctgacaataaaggaactaatcctcactgttccttcttgagttgaagatctttgacataggttcttctatagtgatgatgatctcattcagaagatgcttagctgtagtttccgctttgcttgcttgtttaacaaacccaactaaagtgcttgaggctacctctaccttcaaataaagatagacctgacaatttgtgatatctaataataaccccccccccaatattgattaagcctcctccttttctgaaagcatttaaaaaaaa

SEQ ID NO: 122154 - protein, 1140 aa, Artificial Sequence [sequence omitted]

SEQ ID NO: 122155 - protein, 451 aa, Artificial Sequence
  derived and/or modified sequence
MSYNYVVTAQKPTAVNGCVTGHFTSAEDLNLLIAKNTRLEIYVVTAEGLRPVKEVGMYGKIAVMELFRPKALSSSVSSSKLFSSSTAPHETSFGEEVEVHNLLIIDQHTFEVLHAHQFLQNEYALSLVSCKLGKDPNTYFIVGTAMVYPEEAEPKQGRIVVFQYSDGKLQTVAEKEVKGAVYSMVEFNGKLLASINSTVRLYEWTTEKELRTECNHYNNIMALYLKTKGDFILVGDLMRSVLLLAYKPMEGNFEEIARDFNPNWMSAVEILDDDNFLGAENAFNLFVCQKDSAATTDEERQHLQEVGLFHLGEFVNVFCHGSLVMQNLGETSTPTQGSVLFGTVNGMIGLVTSLSESWYNLLLDMQNRLNKVIKSVGKIEHSFWRSFHTERKTEPATGFIDGDLIESFLDISRPKMQEVVANLQYDDGSGMKREATADDLIKVVEELTRIH

SEQ ID NO: 122156 - protein, 146 aa, Artificial Sequence
  derived and/or modified sequence
MSYNYVVTAQKPTAVNGCVTGHFTSAEDLNLLIAKNTRLEIYVVTAEGLRPVKEVGMYGKIAVMELFRPKGESKDLLFILTAKYNACILEYKQSGESIDIITRAHGNVQDRIGRPSETGIIGIIDPECRMIGLRLYDGLFKVIPLD

SEQ ID NO: 122157 - protein, 109 aa, Artificial Sequence
  derived and/or modified sequence
MSYNYVVTAQKPTAVNGCVTGHFTSAEDLNLLIAKNTRLEIYVVTAEGLRPVKEVGMYGKIAVMELFRPKGESKDLLFILTAKYNACILEYKQSGESIDIITRAHGNVQ

SEQ ID NO: 122158 - DNA, 3423 bp, Artificial Sequence
  derived and/or modified sequence
atgagctacaactacgtggtgaccgcccagaagcccaccgccgtgaacggctgcgtgaccggccacttcaccagcgccgaggacctgaacctgctgatcgccaagaacaccagactggagatctacgtggtgaccgccgagggcctgagacccgtgaaggaggtgggcatgtacggcaagatcgccgtgatggagctgttcagacccaagggcgagagcaaggacctgctgttcatcctgaccgccaagtacaacgcctgcatcctggagtacaagcagagcggcgagagcatcgacatcatcaccagagcccacggcaacgtgcaggacagaatcggcagacccagcgagaccggcatcatcggcatcatcgaccccgagtgcagaatgatcggcctgagactgtacgacggcctgttcaaggtgatccccctggacagagacaacaaggagctgaaggccttcaacatcagactggaggagctgcacgtgatcgacgtgaagttcctgtacggctgccaggcccccaccatctgcttcgtgtaccaggacccccagggcagacacgtgaagacctacgaggtgagcctgagagagaaggagttcaacaagggcccctggaagcaggagaacgtggaggccgaggccagcatggtgatcgccgtgcccgagcccttcggcggcgccatcatcatcggccaggagagcatcacctaccacaacggcgacaagtacctggccatcgccccccccatcatcaagcagagcaccatcgtgtgccacaacagagtggaccccaacggcagcagatacctgctgggcgacatggagggcagactgttcatgctgctgctggagaaggaggagcagatggacggcaccgtgaccctgaaggacctgagagtggagctgctgggcgagaccagcatcgccgagtgcctgacctacctggacaacggcgtggtgttcgtgggcagcagactgggcgacagccagctggtgaagctgaacgtggacagcaacgagcagggcagctacgtggtggccatggagaccttcaccaacctgggccccatcgtggacatgtgcgtggtggacctggagagacagggccagggccagctggtgacctgcagcggcgccttcaaggagggcagcctgagaatcatcagaaacggcatcggcatccacgagcacgccagcatcgacctgcccggcatcaagggcctgtggcccctgagaagcgaccccaacagagagaccgacgacaccctggtgctgagcttcgtgggccagaccagagtgctgatgctgaacggcgaggaggtggaggagaccgagctgatgggcttcgtggacgaccagcagaccttcttctgcggcaacgtggcccaccagcagctgatccagatcaccagcgccagcgtgagactggtgagccaggagcccaaggccctggtgagcgagtggaaggagccccaggccaagaacatcagcgtggccagctgcaacagcagccaggtggtggtggccgtgggcagagccctgtactacctgcagatccacccccaggagctgagacagatcagccacaccgagatggagcacgaggtggcctgcctggacatcacccccctgggcgacagcaacggcctgagccccctgtgcgccatcggcctgtggaccgacatcagcgccagaatcctgaagctgcccagcttcgagctgctgcacaaggagatgctgggcggcgagatcatccccagaagcatcctgatgaccaccttcgagagcagccactacctgctgtgcgccctgggcgacggcgccctgttctacttcggcctgaacatcgagaccggcctgctgagcgacagaaagaaggtgaccctgggcacccagcccaccgtgctgagaaccttcagaagcctgagcaccaccaacgtgttcgcctgcagcgacagacccaccgtgatctacagcagcaaccacaagctggtgttcagcaacgtgaacctgaaggaggtgaactacatgtgccccctgaacagcgacggctaccccgacagcctggccctggccaacaacagcaccctgaccatcggcaccatcgacgagatccagaagctgcacatcagaaccgtgcccctgtacgagagccccagaaagatctgctaccaggaggtgagccagtgcttcggcgtgctgagcagcagaatcgaggtgcaggacaccagcggcggcaccaccgccctgagacccagcgccagcacccaggccctgagcagcagcgtgagcagcagcaagctgttcagcagcagcaccgccccccacgagaccagcttcggcgaggaggtggaggtgcacaacctgctgatcatcgaccagcacaccttcgaggtgctgcacgcccaccagttcctgcagaacgagtacgccctgagcctggtgagctgcaagctgggcaaggaccccaacacctacttcatcgtgggcaccgccatggtgtaccccgaggaggccgagcccaagcagggcagaatcgtggtgttccagtacagcgacggcaagctgcagaccgtggccgagaaggaggtgaagggcgccgtgtacagcatggtggagttcaacggcaagctgctggccagcatcaacagcaccgtgagactgtacgagtggaccaccgagaaggagctgagaaccgagtgcaaccactacaacaacatcatggccctgtacctgaagaccaagggcgacttcatcctggtgggcgacctgatgagaagcgtgctgctgctggcctacaagcccatggagggcaacttcgaggagatcgccagagacttcaaccccaactggatgagcgccgtggagatcctggacgacgacaacttcctgggcgccgagaacgccttcaacctgttcgtgtgccagaaggacagcgccgccaccaccgacgaggagagacagcacctgcaggaggtgggcctgttccacctgggcgagttcgtgaacgtgttctgccacggcagcctggtgatgcagaacctgggcgagaccagcacccccacccagggcagcgtgctgttcggcaccgtgaacggcatgatcggcctggtgaccagcctgagcgagagctggtacaacctgctgctggacatgcagaacagactgaacaaggtgatcaagagcgtgggcaagatcgagcacagcttctggagaagcttccacaccgagagaaagaccgagcccgccaccggcttcatcgacggcgacctgatcgagagcttcctggacatcagcagacccaagatgcaggaggtggtggccaacctgcagtacgacgacggcagcggcatgaagagagaggccaccgccgacgacctgatcaaggtggtggaggagctgaccagaatccactag

SEQ ID NO: 122159 - DNA, 1356 bp, Artificial Sequence
  derived and/or modified sequence
atgagctacaactacgtggtgaccgcccagaagcccaccgccgtgaacggctgcgtgaccggccacttcaccagcgccgaggacctgaacctgctgatcgccaagaacaccagactggagatctacgtggtgaccgccgagggcctgagacccgtgaaggaggtgggcatgtacggcaagatcgccgtgatggagctgttcagacccaaggccctgagcagcagcgtgagcagcagcaagctgttcagcagcagcaccgccccccacgagaccagcttcggcgaggaggtggaggtgcacaacctgctgatcatcgaccagcacaccttcgaggtgctgcacgcccaccagttcctgcagaacgagtacgccctgagcctggtgagctgcaagctgggcaaggaccccaacacctacttcatcgtgggcaccgccatggtgtaccccgaggaggccgagcccaagcagggcagaatcgtggtgttccagtacagcgacggcaagctgcagaccgtggccgagaaggaggtgaagggcgccgtgtacagcatggtggagttcaacggcaagctgctggccagcatcaacagcaccgtgagactgtacgagtggaccaccgagaaggagctgagaaccgagtgcaaccactacaacaacatcatggccctgtacctgaagaccaagggcgacttcatcctggtgggcgacctgatgagaagcgtgctgctgctggcctacaagcccatggagggcaacttcgaggagatcgccagagacttcaaccccaactggatgagcgccgtggagatcctggacgacgacaacttcctgggcgccgagaacgccttcaacctgttcgtgtgccagaaggacagcgccgccaccaccgacgaggagagacagcacctgcaggaggtgggcctgttccacctgggcgagttcgtgaacgtgttctgccacggcagcctggtgatgcagaacctgggcgagaccagcacccccacccagggcagcgtgctgttcggcaccgtgaacggcatgatcggcctggtgaccagcctgagcgagagctggtacaacctgctgctggacatgcagaacagactgaacaaggtgatcaagagcgtgggcaagatcgagcacagcttctggagaagcttccacaccgagagaaagaccgagcccgccaccggcttcatcgacggcgacctgatcgagagcttcctggacatcagcagacccaagatgcaggaggtggtggccaacctgcagtacgacgacggcagcggcatgaagagagaggccaccgccgacgacctgatcaaggtggtggaggagctgaccagaatccactag

SEQ ID NO: 122160 - DNA, 441 bp, Artificial Sequence
  derived and/or modified sequence
atgagctacaactacgtggtgaccgcccagaagcccaccgccgtgaacggctgcgtgaccggccacttcaccagcgccgaggacctgaacctgctgatcgccaagaacaccagactggagatctacgtggtgaccgccgagggcctgagacccgtgaaggaggtgggcatgtacggcaagatcgccgtgatggagctgttcagacccaagggcgagagcaaggacctgctgttcatcctgaccgccaagtacaacgcctgcatcctggagtacaagcagagcggcgagagcatcgacatcatcaccagagcccacggcaacgtgcaggacagaatcggcagacccagcgagaccggcatcatcggcatcatcgaccccgagtgcagaatgatcggcctgagactgtacgacggcctgttcaaggtgatccccctggactag

SEQ ID NO: 122161 - DNA, 330 bp, Artificial Sequence
  derived and/or modified sequence
atgagctacaactacgtggtgaccgcccagaagcccaccgccgtgaacggctgcgtgaccggccacttcaccagcgccgaggacctgaacctgctgatcgccaagaacaccagactggagatctacgtggtgaccgccgagggcctgagacccgtgaaggaggtgggcatgtacggcaagatcgccgtgatggagctgttcagacccaagggcgagagcaaggacctgctgttcatcctgaccgccaagtacaacgcctgcatcctggagtacaagcagagcggcgagagcatcgacatcatcaccagagcccacggcaacgtgcagtag

SEQ ID NO: 122162 - DNA, 4506 bp, Artificial Sequence
  derived and/or modified sequence
gggagtctgcgggcgagctcggaggacactggcgcacctcccccgccggctcacggccgcatccgccacatccgaaggcgccgcgacttcccggagaccccgaagcgtgcgctctcatccgggtcctgcgggcgctggcggaaagaggcgaggcggtgcctccgggggcggggcctccttcggttggcggcctcgggcttcgggagtcctccaagaggccaggtgaggccgtcccgtgatgccccgcgccccggccgctctggcctgcaacgtgtctctggggcggaggcagcggcagtggagttcgctgcgcgctgttgggggccacctgtcttttcgcttgtgtccctctttctagtgtcgcgctcgagtcccgacgggccgctccaagcctcgacatgtcgtacaactacgtggtaacggcccagaagcccaccgccgtgaacggctgcgtgaccggacactttacttcggccgaagacttaaacctgttgattgccaaaaacacgagattagagatctatgtggtcaccgccgaggggcttcggcccgtcaaagaggtgggcatgtatgggaagattgcggtcatggagcttttcaggcccaagggggagagcaaggacctgctgtttatcttgacagcgaagtacaatgcctgcatcctggagtataaacagagtggcgagagcattgacatcattacgcgagcccatggcaatgtccaggaccgcattggccgcccctcagagaccggcattattggcatcattgaccctgagtgccggatgattggcctgcgtctctatgatggccttttcaaggttattccactagatcgcgataataaagaactcaaggccttcaacatccgcctggaggagctgcatgtcattgatgtcaagttcctatatggttgccaagcacctactatttgctttgtctaccaggaccctcaggggcggcacgtaaaaacctatgaggtgtctctccgagaaaaggaattcaataagggcccttggaaacaggaaaatgtcgaagctgaagcttccatggtgatcgcagtcccagagccctttgggggggccatcatcattggacaggagtcaatcacctatcacaatggtgacaaatacctggctattgcccctcctatcatcaagcaaagcacgattgtgtgccacaatcgagtggaccctaatggctcaagatacctgctgggagacatggaaggccggctcttcatgctgcttttggagaaggaggaacagatggatggcaccgtcactctcaaggatctccgtgtagaactccttggagagacctctattgctgagtgcttgacataccttgataatggtgttgtgtttgtcgggtctcgcctgggtgactcccagcttgtgaagctcaacgttgacagtaatgaacaaggctcctatgtagtggccatggaaacctttaccaacttaggacccattgtcgatatgtgcgtggtggacctggagaggcaggggcaggggcagctggtcacttgctctggggctttcaaggaaggttctttgcggatcatccggaatggaattggaatccacgagcatgccagcattgacttaccaggcatcaaaggattatggccactgcggtctgaccctaatcgtgagactgatgacactttggtgctctcttttgtgggccagacaagagttctcatgttaaatggagaggaggtagaagaaaccgaactgatgggtttcgtggatgatcagcagactttcttctgtggcaacgtggctcatcagcagcttatccagatcacttcagcatcggtgaggttggtctctcaagaacccaaagctctggtcagtgaatggaaggagcctcaggccaagaacatcagtgtggcctcctgcaatagcagccaggtggtggtggctgtaggcagggccctctactatctgcagatccatcctcaggagctccggcagatcagccacacagagatggaacatgaagtggcttgcttggacatcaccccattaggagacagcaatggactgtcccctctttgtgccattggcctctggacggacatctcggctcgtatcttgaagttgccctcttttgaactactgcacaaggagatgctgggtggagagatcattcctcgctccatcctgatgaccacctttgagagtagccattacctcctttgtgccttgggagatggagcgcttttctactttgggctcaacattgagacaggtctgttgagcgaccgtaagaaggtgactttgggcacccagcccaccgtattgaggacttttcgttctctttctaccaccaacgtctttgcttgttctgaccgccccactgtcatctatagcagcaaccacaaattggtcttctcaaatgtcaacctcaaggaagtgaactacatgtgtcccctcaattcagatggctatcctgacagcctggcgctggccaacaatagcaccctcaccattggcaccatcgatgagatccagaagctgcacattcgcacagttcccctctatgagtctccaaggaagatctgctaccaggaagtgtcccagtgtttcggggtcctctccagccgcattgaagtccaagacacgagtgggggcacgacagccttgaggcccagcgctagcacccaggctctgtccagcagtgtaagctccagcaagctgttctccagcagcactgctcctcatgagacctcctttggagaagaggtggaggtgcacaacctacttatcattgaccaacacacctttgaagtgcttcatgcccaccagtttctgcagaatgaatatgccctcagtctggtttcctgcaagctgggcaaagaccccaacacttacttcattgtgggcacagcaatggtgtatcctgaagaggcagagcccaagcagggtcgcattgtggtctttcagtattcggatggaaaactacagactgtggctgaaaaggaagtgaaaggggccgtgtactctatggtggaatttaacgggaagctgttagccagcatcaatagcacggtgcggctctatgagtggacaacagagaaggagctgcgcactgagtgcaaccactacaacaacatcatggccctctacctgaagaccaagggcgacttcatcctggtgggcgaccttatgcgctcagtgctgctgcttgcctacaagcccatggaaggaaactttgaagagattgctcgagactttaatcccaactggatgagtgctgtggaaatcttggatgatgacaattttctgggggctgaaaatgcctttaacttgtttgtgtgtcaaaaggatagcgctgccaccactgacgaggagcggcagcacctccaggaggttggtcttttccacctgggcgagtttgtcaatgtcttttgccacggctctctggtaatgcagaatctgggtgagacttccacccccacacaaggctcggtgctcttcggcacggtcaacggcatgatagggctggtgacctcactgtcagagagctggtacaacctcctgctggacatgcagaatcgactcaataaagtcatcaaaagtgtggggaagatcgagcactccttctggagatcctttcacaccgagcggaagacagaaccagccacaggtttcatcgacggtgacttgattgagagtttcctggatattagccgccccaagatgcaggaggtggtggcaaacctacagtatgacgatggcagcggtatgaagcgagaggccactgcagacgacctcatcaaggttgtggaggagctaactcggatccattagccaagggcagggggcccctttgctgaccctccccaaaggctttgccctgctgccctccccctcctctccaccatcgtcttcttggccatgggaggcctttccctaagccagctgcccccagagccacagttcccctatgtggaagtggggcgggcttcatagagacttgggaatgagctgaaggtgaaacattttctccctggatttttaccagtctcacatgattccagccatcaccttagaccaccaagccttgattggtgttgccagttgtcctccttccggggaaggattttgcagttctttggctgaaaggaagctgtgcgtgtgtgtgtgtgtatgtgtgtgtgtgtatgtgtatctcacactcatgcattgtcctctttttatttagattggcagtgtagggagttgtgggtagtggggaagagggttaggagggtttcattgtctgtgaagtgagaccttccttttacttttcttctattgcctctgagagcatcaggcctagaggcctgactgccaagccatgggtagcctgggtgtaaaacctggagatggtggatgatccccacgccacagcccttttgtctctgcaaactgccttcttcggaaagaagaaggtgggaggatgtgaattgttagtttctgagttttaccaaataaagtagaatataagaagaaa

SEQ ID NO: 122163 - DNA, 1801 bp, Artificial Sequence
  derived and/or modified sequence
gctgttgggggccacctgtcttttcgcttgtgtccctctttctagtgtcgcgctcgagtcccgacgggccgctccaagcctcgacatgtcgtacaactacgtggtaacggcccagaagcccaccgccgtgaacggctgcgtgaccggacactttacttcggccgaagacttaaacctgttgattgccaaaaacacgagattagagatctatgtggtcaccgccgaggggcttcggcccgtcaaagaggtgggcatgtatgggaagattgcggtcatggagcttttcaggcccaaggctctgtccagcagtgtaagctccagcaagctgttctccagcagcactgctcctcatgagacctcctttggagaagaggtggaggtgcacaacctacttatcattgaccaacacacctttgaagtgcttcatgcccaccagtttctgcagaatgaatatgccctcagtctggtttcctgcaagctgggcaaagaccccaacacttacttcattgtgggcacagcaatggtgtatcctgaagaggcagagcccaagcagggtcgcattgtggtctttcagtattcggatggaaaactacagactgtggctgaaaaggaagtgaaaggggccgtgtactctatggtggaatttaacgggaagctgttagccagcatcaatagcacggtgcggctctatgagtggacaacagagaaggagctgcgcactgagtgcaaccactacaacaacatcatggccctctacctgaagaccaagggcgacttcatcctggtgggcgaccttatgcgctcagtgctgctgcttgcctacaagcccatggaaggaaactttgaagagattgctcgagactttaatcccaactggatgagtgctgtggaaatcttggatgatgacaattttctgggggctgaaaatgcctttaacttgtttgtgtgtcaaaaggatagcgctgccaccactgacgaggagcggcagcacctccaggaggttggtcttttccacctgggcgagtttgtcaatgtcttttgccacggctctctggtaatgcagaatctgggtgagacttccacccccacacaaggctcggtgctcttcggcacggtcaacggcatgatagggctggtgacctcactgtcagagagctggtacaacctcctgctggacatgcagaatcgactcaataaagtcatcaaaagtgtggggaagatcgagcactccttctggagatcctttcacaccgagcggaagacagaaccagccacaggtttcatcgacggtgacttgattgagagtttcctggatattagccgccccaagatgcaggaggtggtggcaaacctacagtatgacgatggcagcggtatgaagcgagaggccactgcagacgacctcatcaaggttgtggaggagctaactcggatccattagccaagggcagggggcccctttgctgaccctccccaaaggctttgccctgctgccctccccctcctctccaccatcgtcttcttggccatgggaggcctttccctaagccagctgcccccagagccacagttcccctatgtggaagtggggcgggcttcatagagacttgggaatgagctgaaggtgaaacattttctccctggatttttaccagtctcacatgattccagccatcaccttagaccaccaagccttgattggtgttgccagttgtcctccttccggggaaggattttgcagttctttggctgaaaggaagctgtgcgtgtgtgtgtgtgtatgtgtgtgtgtgtatgtgta

SEQ ID NO: 122164 - DNA, 558 bp, Artificial Sequence
  derived and/or modified sequence
aagaggcgaggcggtgcctccgggggcggggcctccttcggttggcggcctcgggcttcgggagtcctccaagaggccagtgtcgcgctcgagtcccgacgggccgctccaagcctcgacatgtcgtacaactacgtggtaacggcccagaagcccaccgccgtgaacggctgcgtgaccggacactttacttcggccgaagacttaaacctgttgattgccaaaaacacgagattagagatctatgtggtcaccgccgaggggcttcggcccgtcaaagaggtgggcatgtatgggaagattgcggtcatggagcttttcaggcccaagggggagagcaaggacctgctgtttatcttgacagcgaagtacaatgcctgcatcctggagtataaacagagtggcgagagcattgacatcattacgcgagcccatggcaatgtccaggaccgcattggccgcccctcagagaccggcattattggcatcattgaccctgagtgccggatgattggcctgcgtctctatgatggccttttcaaggttattccactagat

SEQ ID NO: 122165 - DNA, 540 bp, Artificial Sequence
  derived and/or modified sequence
ctggaggctgcagggctgacggctctcctggctcattaaggttccctacggagaaatactggttttgtgtttgaggttcgaatttgtagagcaataggggcactaataacgttgggcaagcagaccggtgggccctttgaagtctgaagaatcaacgcgcaaaagggaggagtgtcgcgctcgagtcccgacgggccgctccaagcctcgacatgtcgtacaactacgtggtaacggcccagaagcccaccgccgtgaacggctgcgtgaccggacactttacttcggccgaagacttaaacctgttgattgccaaaaacacgagattagagatctatgtggtcaccgccgaggggcttcggcccgtcaaagaggtgggcatgtatgggaagattgcggtcatggagcttttcaggcccaagggggagagcaaggacctgctgtttatcttgacagcgaagtacaatgcctgcatcctggagtataaacagagtggcgagagcattgacatcattacgcgagcccatggcaatgtccagg

SEQ ID NO: 122166 - DNA, 3423 bp, Artificial Sequence
  derived and/or modified sequence
atgagttacaactatgtggtgaccgcccagaagcccacggcggtcaatggctgcgtcaccggtcatttcacaagtgctgaggacttaaacctcctgatcgccaagaatacacggctcgagatatacgtagtcactgcagaggggctgcgccccgtaaaagaagtcggaatgtacgggaaaatagcagttatggagctgttccggcccaagggagaatccaaagatctgctctttatactgacggccaagtataacgcctgcattctagagtataagcagtccggagagtccatagacattatcacccgagctcacggaaacgtgcaagacagaataggaaggcctagcgagaccggcattatcgggatcatcgacccagaatgtcgaatgattgggttacgcctgtacgatgggctgtttaaggtgattcctctggaccgggataacaaagagttaaaggcttttaatatacgacttgaggaactccacgttatagatgtcaagttcctatatggttgtcaggccccaacaatttgcttcgtgtaccaggacccccagggcaggcacgtgaaaacgtatgaggtgtctcttcgggaaaaggaatttaataaaggtccgtggaagcaagagaatgtggaggccgaagcgagtatggtgattgccgtgccagaaccttttggaggtgccatcattattggccaagagtctattacataccacaatggcgataaatatctggccattgcccccccgatcataaagcagtcaaccattgtttgccacaacagagtcgaccctaacggttcacggtacctgcttggagatatggagggtagattattcatgttgctgctcgagaaggaagagcagatggatggaacagtgaccttgaaagacctgcgcgtcgagcttctgggggaaaccagtatcgctgaatgtcttacctatctggataatggtgttgtgtttgtggggagccggctgggcgactctcagttagtgaagctgaacgtggacagtaacgaacagggctcttacgtggtggccatggagacctttactaatctgggtcccattgtggatatgtgcgtggtagacttggagagacagggtcagggccagttggtgacctgctctggcgcctttaaggaagggtcattgaggattatacgcaacggtatcggtatccacgaacatgcctcaatagacttgcccggcatcaaaggactatggcctttaagatcagatccgaatagagaaacagatgacaccttagtactatcattcgtgggtcagactcgtgttctcatgttgaatggcgaggaggtggaggaaactgaactaatgggcttcgtcgacgatcagcagacttttttctgtggaaatgtcgctcatcaacagttgatacagatcacctctgctagtgtgcgtcttgtcagccaggagccaaaggcgttagtcagtgaatggaaagaaccccaggccaagaacatttccgttgcaagttgtaactcgagccaagtggtagtggctgtgggcagagctctttactacctacagatccacccccaggaactgcgacagataagtcacacagaaatggagcacgaggttgcttgcctcgacatcactcccctcggggatagcaatgggctgtcacctttgtgcgctatcggcttatggactgacatctccgctaggatattaaagctcccctcctttgaactcctccataaagaaatgctcggaggcgagatcatcccccgctccattctcatgacgacgtttgagtcctcccattacctcctctgtgctctcggggacggagccttattctattttggccttaacattgaaactggtctcctgtccgacagaaagaaggtaacactcggaacgcagcccactgtgttgcgcactttccggtccttgagtactactaacgtctttgcatgttccgatcgtcccaccgtgatctacagctctaaccacaagctggtgttcagtaacgtgaatctgaaggaagtcaactacatgtgccccctgaactctgacggatatcccgacagtctagccctcgctaacaattctacactaactatcggaaccattgatgaaatccagaaactccacatacggaccgtgcctctgtacgagtcgccccgtaagatctgttaccaggaagtcagccaatgttttggagtattatcctcaaggatcgaagttcaggacacttccgggggcactaccgcactccgcccctcggccagcacacaggccctgtcctctagcgtgtctagtagcaaactgttttcatcaagcaccgccccacacgagacaagttttggtgaggaggtggaggtgcataatctattaattatcgatcagcacaccttcgaagtgctgcacgcccaccaattcctacagaacgagtacgccttgagcctcgtctcatgcaagctgggcaaagaccctaacacttatttcatcgtgggaacagcaatggtataccctgaggaggctgagcccaagcaaggccggatcgttgtcttccagtacagtgatggtaagctacagacagtagctgaaaaggaggtaaaaggggccgtatattccatggttgagttcaacgggaagttactcgcttctatcaatagcaccgtccgtctttatgagtggaccacagagaaggaacttaggaccgaatgcaaccattacaataatattatggccctctacctcaaaaccaagggggacttcattttagttggagatctcatgagaagcgtgcttttactcgcgtacaaaccaatggaaggcaacttcgaggagattgcgagagatttcaaccccaactggatgtccgctgtggagattctggatgacgacaattttcttggggccgaaaatgccttcaatctctttgtttgccaaaaagacagtgctgctacaacggatgaagaaagacagcacctgcaggaggtggggctgtttcatctcggtgagtttgtcaacgtattttgccacggatccctggttatgcagaatctgggggaaacgtctaccccgacacaggggtctgtgttgtttggaacagtcaatgggatgattggcctggttacgagcctctctgaaagctggtacaacctcctcctggacatgcaaaaccgcttgaataaggtaatcaagtcagtggggaagattgaacactctttctggagatctttccatacggaacgcaagaccgagccggcaactggatttatcgacggcgacctgattgaaagttttttggacatctcccgcccaaaaatgcaggaggtcgtggctaacctgcagtatgatgacgggagtgggatgaaacgggaggcaacagccgacgatctaattaaggttgtcgaagagttaacccggattcactag

SEQ ID NO: 122167 - DNA, 1356 bp, Artificial Sequence
  derived and/or modified sequence
atgagctacaattacgttgtgactgcacagaagcccaccgccgtgaatggttgcgtaacaggccattttacaagcgccgaggatctcaatctgctgatcgccaagaatactcgcctggagatctacgtggtgactgccgaggggctgcgtccggtaaaggaggtgggcatgtacgggaagattgcagtgatggagttgtttagacccaaagccctgagcagctcggtcagcagttccaagctgtttagcagctccaccgctccccacgagacttcctttggcgaggaagtagaggtccacaatctgcttatcatcgatcagcatacattcgaggttctgcacgcccaccagttcctccagaacgagtacgctctctccttggtatcctgcaagctcgggaaagatcccaacacatattttatagtgggtactgcaatggtgtaccctgaagaagctgagcccaaacaggggcggattgtggtcttccaatattccgacgggaaactgcagaccgttgcggagaaggaggttaaaggcgctgtgtactccatggtggaatttaatggtaagctgctggccagtattaattccaccgttcgtctgtatgagtggacgacagagaaggagcttcggactgagtgcaatcactacaacaatatcatggccctgtatctgaagacgaagggagactttatactggtcggtgacctgatgaggagcgtgctccttctcgcctacaagcctatggaggggaatttcgaggagatagctcgggattttaatcctaactggatgtctgcggtcgaaatcttggatgatgacaactttctgggcgcagaaaatgcatttaatctgttcgtctgccaaaaggactctgccgcgaccactgatgaagagaggcaacacttacaggaggtgggtctgtttcatttaggggagttcgtgaatgtgttctgtcatgggagcctggtgatgcagaacctgggagagacatccactcctacccagggctcggtgttgtttggcaccgtgaatgggatgatagggctcgtcaccagtctgtcagaaagttggtataacctgctgctggacatgcagaatcggctgaacaaagttataaaatcagtgggtaagattgagcatagtttctggcggagcttccacacggagcggaaaaccgagccggcgacaggatttattgacggagatctgatcgagtcctttctggatatcagtcgccccaagatgcaggaagtcgtggccaacctgcaatacgatgacggcagtgggatgaaacgagaggccaccgccgacgatctcatcaaggtggtagaggaactaacgcggattcactag

SEQ ID NO: 122168 - DNA, 441 bp, Artificial Sequence
  derived and/or modified sequence
atgtcctacaattacgtagtgacggcccagaagcccaccgcagtgaatggatgcgtgacgggccactttacaagcgctgaagatctgaatttgttaattgccaagaacacacggctagagatctacgtggttaccgccgaaggtctccgacccgtgaaagaagtgggtatgtacggaaagattgcagtaatggaattgttccgccctaagggagagtctaaagacttgttgtttatactaaccgctaaatacaacgcttgcatcctggaatataaacagtcaggagaaagtatagacatcatcaccagagcccacgggaacgtccaggaccgcattggtcgacccagcgaaacagggatcattgggattatagaccccgaatgtaggatgattggactgagactgtacgacggcctcttcaaagtgatcccactggactag

SEQ ID NO: 122169 - DNA, 330 bp, Artificial Sequence
  derived and/or modified sequence
atgtcctacaactacgtagtgaccgcacagaagcccactgctgttaatggatgcgtgaccggccactttacaagcgccgaagatctcaacctccttatagcgaaaaatactcgattagaaatatacgtggtgacggctgagggtttgcgccccgtcaaggaggtcgggatgtatggcaagattgccgtcatggagctgttcagaccgaagggagaatcaaaagacctgctgttcatccttaccgccaagtacaatgcttgcatcctggagtacaagcagtcaggtgaatctatcgacattataacccgagcgcacggaaacgtgcagtag

SEQ ID NO: 122170 - DNA, 3423 bp, Artificial Sequence
  derived and/or modified sequence
atgagctacaactacgtggtgacagcccagaagcccacagctgtgaatggctgtgtgacaggccacttcaccagcgctgaggacctgaacctgctgattgccaagaacacccggctggagatctacgtggtgacagctgagggcctgcggcctgtgaaggaggtgggcatgtatggcaagattgctgtgatggagctgttccggcccaagggggagagcaaggacctgctcttcatcctgacagccaagtacaatgcctgcatcctggagtacaagcagagcggggagagcattgacatcatcacccgggcccatggaaatgtgcaggaccgcatcggccggcccagcgagaccggcatcatcggcatcatcgaccctgaatgtaggatgattggcctgcggctgtatgatggcctcttcaaggtgatccccctggaccgggacaacaaggagctgaaggccttcaacatccggctggaggagctgcacgtgattgatgtgaagttcctgtatggctgccaggcccccaccatctgctttgtgtaccaggacccccagggcagacatgtgaagacctatgaggtgtccctgcgggagaaggagttcaacaagggcccctggaagcaggagaatgtggaggccgaggcctccatggtgattgctgtgcctgagccctttggaggagccatcatcatcggccaggagagcatcacctaccacaatggagacaagtacctggccatcgccccacccatcatcaagcagagcaccatcgtgtgccacaacagagtggaccccaacggcagccgctacctgctgggggacatggagggccgcctcttcatgctgctgctggagaaggaggagcagatggatggcaccgtgaccctgaaggacctgcgggtggagctgctgggggagaccagcattgctgagtgcctgacctacctggacaatggagtggtgtttgtgggcagccggctgggggacagccagctggtgaagctgaatgtggacagcaatgagcagggcagctatgtggtggccatggagaccttcaccaacctgggccccatcgtggacatgtgtgtggtggacctggagcggcagggccagggccagctggtgacctgcagcggggccttcaaggagggcagcctgcgcatcatcagaaatggcatcggcatccatgaacatgccagcattgacctgcccggcatcaagggcctgtggcccctgcggagtgaccccaaccgggagacagatgacaccctggtgctgagctttgtgggccagaccagggtgctgatgctgaatggagaggaggtggaggagacagagctgatgggctttgtggatgaccagcagaccttcttctgtggaaatgtggcccaccagcagctgatccagatcaccagcgcctctgtgcggctggtgtcccaggagcccaaggccctggtgtctgagtggaaggagccccaggccaagaacatctctgtggccagctgcaacagcagccaggtggtggtggccgtgggccgggccctgtactacctgcagatccacccccaggagctgcggcagatcagccacacagagatggagcacgaggtggcctgcctggacatcacccccctgggggacagcaatggcctgagccccctgtgtgccatcggcctgtggacagacatcagcgcccgcatcctgaagctgcccagctttgagctgctgcacaaggagatgctgggcggggagatcatccccaggagcatcctgatgaccacctttgagagcagccactacctgctgtgtgccctgggagatggagccctcttctacttcggcctgaacatcgagaccggcctgctgagtgacaggaagaaggtgaccctgggcacccagcccaccgtgctgcggaccttccgcagcctgagcaccaccaacgtgtttgcctgcagcgaccggcccaccgtcatctacagcagcaaccacaagctggtgttcagcaatgtgaacctgaaggaggtgaactacatgtgccccctgaacagtgatggctacccagacagcctggccctggccaacaacagcaccctgaccatcggcaccattgatgagatccagaagctgcacatcagaacagtgcccctgtatgagagccccaggaagatctgctaccaggaggtgtcccagtgctttggagtgctgagcagccgcatcgaggtgcaggacaccagcggcggcaccacagccctgcggcccagcgccagcacccaggccctgagcagctctgtgagcagcagcaagctgttcagcagcagcacagcccctcatgagaccagctttggagaggaggtggaggtgcacaacctgctgatcatcgaccagcacacctttgaggtgctgcacgcccaccagttcctgcagaatgaatatgccctgagcctggtgtcctgcaagctgggcaaggaccccaacacctacttcatcgtgggcacagccatggtgtacccagaggaggccgagcccaagcagggccgcatcgtggtgttccagtacagtgatggcaagctgcagacagtggccgagaaggaggtgaagggagctgtgtacagcatggtggagttcaacgggaagctgctggccagcatcaacagcacagtgcggctgtatgagtggaccacagagaaggagctgaggacagagtgcaaccactacaacaacatcatggccctgtacctgaagaccaagggggacttcatcctggtgggggacctgatgaggtctgtgctgctgctggcctacaagcccatggagggcaactttgaggagatcgcccgggacttcaaccccaactggatgtctgctgtggagatcctggatgatgacaacttcctgggcgcagaaaatgccttcaacctgtttgtgtgccagaaggacagcgctgccaccacagatgaggagcggcagcacctgcaggaggtgggcctcttccacctgggggagtttgtgaatgtgttctgccacggcagcctggtgatgcagaacctgggggagaccagcacccccacccagggctctgtgctgtttggcaccgtgaatggcatgattggcctggtgaccagcctgtctgagagctggtacaacctgctgctggacatgcagaaccggctgaacaaggtgatcaagtctgtgggcaagattgagcacagcttctggaggagcttccacacagagaggaagacagagcccgccaccggcttcattgatggagacctgattgagagcttcctggacatcagccggcccaagatgcaggaggtggtggccaacctgcagtatgatgatggcagcggcatgaagcgggaggccacagcagatgacctgatcaaggtggtggaggagctgacccgcatccactag

SEQ ID NO: 122171 - DNA, 1356 bp, Artificial Sequence
  derived and/or modified sequence
atgagctacaactacgtggtgacagcccagaagcccacagctgtgaatggctgtgtgacaggccacttcaccagcgctgaggacctgaacctgctgattgccaagaacacccggctggagatctacgtggtgacagctgagggcctgcggcctgtgaaggaggtgggcatgtatggcaagattgctgtgatggagctgttccggcccaaggccctgagcagctctgtgagcagcagcaagctgttcagcagcagcacagcccctcatgagaccagctttggagaggaggtggaggtgcacaacctgctgatcatcgaccagcacacctttgaggtgctgcacgcccaccagttcctgcagaatgaatatgccctgagcctggtgtcctgcaagctgggcaaggaccccaacacctacttcatcgtgggcacagccatggtgtacccagaggaggccgagcccaagcagggcagaattgtggtgttccagtacagtgatggcaagctgcagacagtggccgagaaggaggtgaagggagctgtgtacagcatggtggagttcaacgggaagctgctggccagcatcaacagcacagtgcggctgtatgagtggaccacagagaaggagctgaggacagagtgcaaccactacaacaacatcatggccctgtacctgaagaccaagggggacttcatcctggtgggggacctgatgaggtctgtgctgctgctggcctacaagcccatggagggcaactttgaggagatcgcccgggacttcaaccccaactggatgtctgctgtggagatcctggatgatgacaacttcctgggcgcagaaaatgccttcaacctgtttgtgtgccagaaggacagcgctgccaccacagatgaggagcggcagcacctgcaggaggtgggcctcttccacctgggggagtttgtgaatgtgttctgccacggcagcctggtgatgcagaacctgggggagaccagcacccccacccagggctctgtgctgtttggaacagtgaatggcatgattggcctggtgaccagcctgtctgagagctggtacaacctgctgctggacatgcagaaccggctgaacaaggtgatcaagtctgtgggcaagattgagcacagcttctggaggagcttccacacagagaggaagacagagcccgccaccggcttcattgatggagacctgattgagagcttcctggacatcagccggcccaagatgcaggaggtggtggccaacctgcagtatgatgatggcagcggcatgaagcgggaggccacagcagatgacctgatcaaggtggtggaggagctgacccgcatccactag

SEQ ID NO: 122172 - DNA, 441 bp, Artificial Sequence
  derived and/or modified sequence
atgagctacaactacgtggtgacagcccagaagcccacagctgtgaatggctgtgtgacaggccacttcaccagcgctgaggacctgaacctgctgattgccaagaacacccggctggagatctacgtggtgacagctgagggcctgcggcctgtgaaggaggtgggcatgtatggcaagattgctgtgatggagctgttccggcccaagggggagagcaaggacctgctcttcatcctgacagccaagtacaatgcctgcatcctggagtacaagcagagcggggagagcattgacatcatcacccgggcccatggaaatgtgcaggaccgcatcggccggcccagcgagaccggcatcatcggcatcatcgaccctgaatgtaggatgattggcctgcggctgtatgatggcctcttcaaggtgatccccctggactag

SEQ ID NO: 122173 - DNA, 330 bp, Artificial Sequence
  derived and/or modified sequence
atgagctacaactacgtggtgacagcccagaagcccacagctgtgaatggctgtgtgacaggccacttcaccagcgctgaggacctgaacctgctgattgccaagaacacccggctggagatctacgtggtgacagctgagggcctgcggcctgtgaaggaggtgggcatgtatggcaagattgctgtgatggagctgttccggcccaagggggagagcaaggacctgctcttcatcctgacagccaagtacaatgcctgcatcctggagtacaagcagagcggggagagcattgacatcatcacccgggcccatggaaatgtgcagtag

SEQ ID NO: 122174 - DNA, 3423 bp, Artificial Sequence
  derived and/or modified sequence
atgagctacaactacgtggtgaccgcccagaagcccaccgccgtgaacggctgtgtcactgggcactttacgtcggcagaggacctgaatttactcattgcaaaaaacacccggctggaaatttacgtagttactgccgaagggttgagacctgtaaaggaggtgggcatgtacggaaaaatcgccgtgatggagcttttccgacccaagggcgaaagcaaagacctcctcttcatcctgaccgctaagtacaacgcttgcatcctcgagtacaagcagagtggggagtctatagacataattacgagggcccacggcaacgtacaggacaggattgggaggccttccgagaccgggatcatcggcattatcgatcccgagtgcagaatgattggcctgaggctttacgatggactgttcaaggtgatacctttggacagagacaacaaagagttgaaggcctttaacatccgattagaagaactacacgttatagacgtgaaattcctctacggttgtcaggcaccaactatctgctttgtgtatcaggacccacagggtcgccatgtgaagacctatgaggtttcccttcgtgagaaagaattcaacaaagggccatggaagcaagaaaatgtcgaagctgaggccagcatggtgatcgccgtgcccgaaccttttgggggtgcaataatcattggtcaagagagtatcacatatcacaatggggacaagtacttggcaatcgccccaccaatcatcaaacaatccacgattgtgtgccataaccgggttgaccccaacggcagtaggtacctgttaggtgacatggaggggagactgtttatgctgctgctggagaaggaagaacagatggacggcacggtaaccttgaaagacctgagagttgaacttcttggggagacctcaatcgctgaatgcctgacgtatttggataacggagtcgtattcgttggaagccgcttgggtgactcacaacttgtaaagctcaatgttgactcaaacgaacagggaagctacgtagtagctatggaaacatttacgaatctgggccctattgtagacatgtgcgtggtcgaccttgagaggcaaggacagggacagctcgtcacttgctcgggggcttttaaagaaggctctctgagaatcattagaaatggaatcggaatccacgagcacgcttctatcgacttgcccggaattaaaggcctgtggccactgcgtagtgacccaaaccgcgagaccgacgacaccctggtgctaagtttcgtcggacagacacgggtactgatgctgaatggggaagaggtggaagaaactgagctcatgggctttgttgatgatcaacagacattcttttgcggtaatgtcgcccatcaacagctgatacaaattacctcagcctctgtcagactcgtaagtcaggagccaaaagcgttagtctcagagtggaaagagccccaagcaaagaacatatctgtagctagctgtaatagtagtcaggtggttgttgcagtcgggagggccctgtattaccttcagatccacccccaggaactcaggcagatttcccacaccgagatggagcacgaagtggcttgcctggatatcactccgcttggggactccaacgggctgtccccattgtgcgcaatcggactctggactgatatatctgcacgcatcctcaagctgccttcttttgagttgttgcataaggaaatgctcggcggtgagatcatcccacgctccatattgatgaccacgttcgagtcctcgcactacctcctgtgtgctttgggggacggtgcactgttttatttcggactgaacatcgaaaccggacttctgtccgatcgtaaaaaggtcactctcggtacccagcccactgtgctgcggacattcaggtcactatccacaaccaacgtgttcgcctgctcagataggcctactgtaatctatagttctaaccataagctggtgttcagtaatgttaatttaaaggaggtgaactatatgtgcccgctgaactccgacgggtatccagactcactggccttggcgaacaattcaacacttacaatcggaacaatcgatgaaatccagaaactacacattcggaccgtgcccttgtacgagtctccgcgaaagatctgctaccaggaggtgtctcagtgcttcggagttctctcatctcgcattgaggtccaggatacttctggcgggactacagcactgaggccatcggcaagtactcaggccctcagttcttcggtgagcagctcgaagctgttctccagtagcaccgcccctcatgaaacatctttcggcgaagaggtggaagtgcataatttgctgataatcgatcaacacaccttcgaagtccttcacgctcatcagtttctgcagaacgagtatgccctaagcctcgtgagctgcaaacttgggaaggaccccaatacttacttcattgtcggtacagccatggtgtaccccgaggaggcagaacccaagcaggggagaatagtcgtgttccaatacagcgacggtaaactgcagaccgtggctgagaaagaggtcaagggtgccgtttactccatggtcgagtttaatgggaagctgctcgcatcaatcaatagcacagtacgactgtatgaatggactaccgaaaaggagctgcgaaccgagtgcaatcactacaataatataatggccttgtacctgaagaccaaaggggactttatcctggtgggggatctcatgaggagtgtcttactcctggcttataaaccgatggaaggcaacttcgaagaaattgctagggacttcaacccgaactggatgagtgctgtcgagatcttagacgacgataacttcctaggggctgaaaatgccttcaacctctttgtttgccagaaagattctgccgccactaccgacgaggaacgtcaacacttgcaggaggtgggactgtttcaccttggcgagtttgtgaacgtgttctgtcacggatctctggtaatgcaaaatttgggcgagacctccacacctacccagggaagtgtattgtttggaaccgtgaacggaatgatcggcctcgtgacgagcctgtccgaaagctggtacaacctgctactggacatgcagaatagactgaacaaggttattaagtccgtaggtaagatagagcactccttttggagatctttccatactgagcgcaaaaccgagccagctacgggatttatagatggtgacctcattgaatccttcttggacatcagtagacccaagatgcaagaggttgtggcaaacctgcagtatgatgacggcagtggaatgaaacgtgaggctacagcagatgatctcattaaggtggtagaggaactgacgcggattcactag

SEQ ID NO: 122175 - DNA, 1356 bp, Artificial Sequence
  derived and/or modified sequence
atgagctacaactacgtggtgaccgcccagaagcccaccgccgtgaacggttgcgttactggccattttacaagcgcagaagaccttaacctcttgattgccaaaaatacccgtttagagatttacgtagttaccgccgaaggcctgaggcccgttaaggaggtgggaatgtacggaaagatcgccgtgatggaattattccggcctaaagctctgagttcctcagtcagttctagcaagttgttttcttcctcaacagcaccccacgaaacatcatttggggaggaggtcgaggtgcacaatctcctgataatcgaccagcacacattcgaggttctacatgcccaccagttcctgcagaatgagtacgcactgtccctggttagttgcaagctgggtaaggaccctaacacatacttcatcgtgggtacggccatggtgtatccagaagaggcagagcccaagcaggggcgtattgtggtttttcagtattccgacggcaagctacaaacagtggccgagaaggaggtgaaaggggcggtgtattccatggtggagttcaatgggaaattgctggcctccatcaattctaccgtgaggctatacgagtggaccacagagaaggaattgagaactgagtgtaaccattacaacaatatcatggccctgtacctgaaaactaagggggattttatcctagtcggagacctgatgagatctgttctcctactggcctataaaccaatggaaggcaacttcgaagagatcgcccgcgatttcaaccccaattggatgtccgctgtcgaaatcctggatgacgacaacttcctcggcgccgaaaacgctttcaacctgtttgtctgtcagaaggattccgcagcaaccaccgatgaggagcggcaacacctccaggaagtgggcttgttccacctgggcgaatttgtaaatgtattttgccacggttcactcgtaatgcagaacctgggggagactagcaccccaacccaaggatctgtactattcggcacagtcaacggcatgatcgggttggttactagcttgagtgagtcatggtacaacctcctactagatatgcaaaatagacttaacaaagtcatcaagtccgtgggtaagattgagcactctttttggcggtcattccatacggaaaggaagaccgagcctgccaccggatttattgacggagatctgattgaaagctttctggacatttctcgacccaagatgcaggaggtggtcgctaatctccaatatgacgacgggtccggtatgaagcgtgaggccacggctgatgacctgattaaagtggtggaggaattgacgcgcattcactag

SEQ ID NO: 122176 - DNA, 441 bp, Artificial Sequence
  derived and/or modified sequence
atgagctacaactacgtggtgaccgcccagaagcccaccgccgtgaatgggtgcgtgacaggccatttcacgagcgcagaggatttaaacttgctgattgcaaaaaacacgcgcctagaaatttacgtcgttaccgccgaaggactcagaccagtgaaagaggtgggtatgtacggcaaaatcgccgtgatggagcttttcagacccaagggggaaagcaaagacctgctgttcattctcactgcgaagtataatgcctgtattctggaatacaaacaaagcggcgagagcatcgacataattactcgcgctcatggaaacgtgcaagaccgcattggtcggccatcagagactggcatcattgggatcattgaccctgagtgccggatgatcgggctcaggctctatgatggactgtttaaggttatccctctggattag

SEQ ID NO: 122177 - DNA, 330 bp, Artificial Sequence
  derived and/or modified sequence
atgagctacaactacgtggtgaccgcccagaagcccaccgccgtgaacggctgtgtgaccggccactttacaagcgcagaggacttaaatttgctcattgctaaaaatactcgcctggagatctacgtggttacggcagaaggcctgcgcccggtgaaagaggtcggcatgtacgggaaaatcgcggtgatggaattatttaggcccaaaggagagtcgaaggacctgctttttatccttacggcgaagtacaatgcctgcattctggagtacaagcagtctggcgaatcaatcgacatcattactagggcccacggcaacgtgcaatag

SEQ ID NO: 122178 - DNA, 3423 bp, Artificial Sequence
  derived and/or modified sequence
atgagctacaattatgtcgttactgcccaaaagcctaccgcagtcaacggatgcgtcaccgggcatttcacatccgctgaagatttaaacctactcattgccaaaaacacgcggctggagatttacgttgttactgctgaaggtctgcggcctgtgaaggaagtgggaatgtacggaaaaatcgcggtgatggaacttttccgcccaaagggcgagtccaaagatcttctttttatcctgaccgcaaaatacaacgcatgcattctcgaatacaaacagagtggagagagcatcgatatcattacacgtgctcatggaaacgtgcaggacaggataggtcgtccatctgagaccggaattatcgggattatagatcctgagtgtcggatgatcgggttacggttgtacgatgggctcttcaaggtaatcccactggaccgagataataaggagctgaaagcatttaatatccggctggaagagctgcacgtaatcgacgtgaagttcctttatggttgccaggctcccacaatttgttttgtatatcaagatccccaggggaggcatgtcaagacctacgaagtttctctgcgcgagaaggagttcaataaaggaccttggaagcaggagaacgttgaggcagaagctagtatggtgatcgccgtgcctgagccatttgggggtgccattattattggtcaggaatcaatcacgtatcacaacggggataagtacttagccatagcgccacccatcatcaaacagtccaccatcgtctgtcacaatagggtggatcccaacggttcacggtatttactgggagatatggaggggcgtctctttatgctgctgctggagaaagaggagcagatggacggcaccgtcactttgaaggacctccgagtcgaactcctgggagagacctctattgccgagtgcctcacgtacttagataacggggtcgtgttcgtcggctctagactaggagactcacagctggttaaactgaatgttgacagtaacgaacagggcagctacgtcgttgcaatggagacgtttactaatctaggcccaatagtggatatgtgtgtggtggatttagagcgacaggggcagggccagctggtgacctgtagcggtgcttttaaggaaggttctctaagaataattagaaatggtattggcatccatgagcacgctagcattgatctgcccggaatcaagggactgtggccacttagaagtgatcctaatcgggagaccgatgacacgttggtactctcctttgtgggacagacacgggtcctcatgctgaacggcgaggaagtggaggaaacagagctcatgggcttcgtggacgatcaacagacgttcttctgcggtaatgtcgcacatcagcagctcattcaaataaccagcgcttccgtgcgtctggtgtcacaggaacccaaggccctggtcagcgagtggaaggagccccaggcgaagaatatctcagtcgctagctgcaattcaagccaagtggtggttgccgtgggcagagccttgtattacctgcaaatccatcctcaggagctgcgtcagatttcacatacagagatggagcacgaggttgcctgtctggatatcactccccttggcgactccaacggcttaagccctctctgtgccattggcctctggaccgatatctccgcaagaatcctcaaattgcccagctttgagctcctccacaaggagatgctcggaggagaaattatacctcgttcaattttaatgacaaccttcgaatcatctcactacctactgtgtgctctgggcgacggggctcttttttacttcggcttgaatattgaaacgggactgttatccgataggaaaaaggtcacgctgggaactcagccaaccgttctgcgaacttttcgaagtttaagcacgaccaacgtcttcgcgtgcagcgatcggccaaccgtcatttactcgtcgaaccacaagttagttttttccaatgtcaacctcaaagaggtaaactacatgtgccctcttaatagtgatggataccccgacagtctggccctggccaataattcaactctgaccataggaactatcgatgaaatacaaaagctgcacattcgtacagtgcccttgtatgagtcgcccaggaaaatatgctatcaggaggtgagtcagtgttttggggtgctgagctctagaatcgaggtgcaggataccagtggtggaaccactgctctgcggccaagtgcgagcacacaggccctgtcttcctcagtttcatccagcaaattatttagctcttcaactgcaccacatgagacatcattcggtgaggaggttgaggtgcataatctgctgattatcgatcagcacaccttcgaggtccttcacgctcatcagtttttgcagaacgaatacgctctgagcctggtatcttgtaaactcggaaaggacccgaacacatactttattgtggggaccgccatggtttatccagaggaggcggagcccaagcaaggtaggatagttgttttccagtacagcgatggcaagttacagactgtggccgagaaggaggtgaaaggagccgtgtactcaatggtagaattcaacggaaaattgctggcttccatcaatagtactgtccgcctctacgagtggaccaccgaaaaagagctccgtactgagtgcaaccactacaataacattatggcgctgtacctgaagacgaagggggatttcatcttggtgggcgatttaatgcgtagtgtgcttctgctggcatacaaacccatggaaggcaatttcgaggagatcgctcgagatttcaaccctaattggatgtctgcagttgagattttagatgatgacaacttcctcggtgcagaaaacgcttttaatctattcgtctgtcagaaagactctgcagcaacgaccgatgaagagcgacagcatctccaggaggtcgggctcttccatctgggagagtttgtgaatgtcttctgtcatgggtcactggtgatgcagaacttgggtgaaacctctacccccactcaggggagcgtcctattcggcacggtgaacgggatgatagggttagtgacatctttatccgaaagttggtataatcttcttttggatatgcaaaatcggcttaataaagtgatcaagtccgtcggtaagatcgagcactcattttggaggtcttttcacacagagagaaaaaccgaaccagccactggcttcattgacggcgacttaattgaatctttcctggatatttcccgcccaaagatgcaagaagtcgtggccaatcttcagtacgatgatgggagcggaatgaagcgcgaagccactgccgacgatctgattaaggtcgtggaggaattaactcgcatccattag

SEQ ID NO: 122179 - DNA, 1356 bp, Artificial Sequence
  derived and/or modified sequence
atgagctacaattacgtggtgaccgctcagaagccaaccgcagttaacggctgtgtgaccgggcacttcacatcagccgaagatctgaatctgttgatcgcgaaaaatacaaggctcgagatctacgttgtaacagctgagggtttacgccctgtgaaggaggtaggaatgtacgggaaaattgccgtcatggaactgttccggccaaaggccttatcttcttcagtgagtagttccaagttgttcagtagctctacggcccctcacgaaacatccttcggagaagaagtggaggtgcataacttgctcattattgatcagcataccttcgaggtactgcacgcccaccagtttctgcagaatgagtacgcgctctcactggtaagctgtaagctggggaaagatccaaatacttactttatagtcggcacggcaatggtgtaccctgaagaggctgagcctaagcagggacgaattgtcgtatttcaatacagtgacggtaagctccaaactgtagcagaaaaggaggtaaagggagcggtctacagtatggtagagttcaacggaaagttgttggcctcaatcaattctactgtacgcctgtacgagtggaccaccgagaaggagctccgcacggaatgtaatcattacaataacataatggccctgtacctcaagaccaaaggagacttcatacttgtgggagatctcatgcgcagtgtcctgctccttgcgtacaagcccatggaggggaatttcgaagagattgctagagacttcaaccccaattggatgagcgctgtagaaattctcgacgacgataacttcctgggtgctgagaacgcctttaacctatttgtgtgccagaaggattctgccgcaactaccgacgaggagcgacaacaccttcaagaagtggggctgttccatttaggtgagtttgtgaatgtcttttgccacggctctctggttatgcaaaatctgggggagacctccacacctactcaaggatccgtgctcttcggaaccgtgaacggcatgattggcctcgtcacgtccctgtcagagtcgtggtacaatttgctcctggatatgcagaatagactgaacaaggtcattaagagcgtcggtaaaatcgagcacagcttctggcgttcctttcacaccgaacggaagactgaaccagctacgggattcatcgacggcgacctgattgagtccttcctggatattagccgcccaaagatgcaggaggtcgtcgctaacctccagtacgacgacggctcgggtatgaaacgggaggctactgcagatgacctcattaaggtggtggaggagctgacgagaattcattag

SEQ ID NO: 122180 - DNA, 441 bp, Artificial Sequence
  derived and/or modified sequence
atgtcgtacaactatgttgttacggcccaaaagcctactgccgtgaacgggtgtgtgaccggccacttcacgagcgccgaggatctgaatctgttgattgcgaagaatacgcgcctcgagatttatgtggtcacagctgaagggctgcggcctgtaaaagaagtgggcatgtacggtaagatcgcagtcatggagctgtttaggccaaagggagagtcgaaagaccttctgttcattcttacagccaagtacaatgcctgtatcctggagtacaagcagagtggcgaaagcattgatattattacgagggcgcacggcaacgtccaggaccggattggacgccctagtgaaacaggcatcattggaataatagaccctgagtgccggatgatcgggttgagactgtatgacggactcttcaaggtgatccctcttgattag

SEQ ID NO: 122181 - DNA, 330 bp, Artificial Sequence
  derived and/or modified sequence
atgagttacaattatgtggtgacagctcagaagcccacagccgtgaatgggtgtgtaaccgggcactttacctcggccgaggaccttaacctcttgattgcgaaaaacacgagactggaaatatacgttgtgaccgccgaagggctgcgccctgtgaaagaggttggcatgtatggtaagatagcagtcatggagctctttcgccctaagggcgagtctaaagatttattgttcatcctgacggcgaaatacaatgcctgtattctggaatacaaacagtccggtgagagcattgatatcatcactagagcccatgggaacgtacagtag

SEQ ID NO: 122182 - protein, 34 aa, Artificial Sequence
  derived and/or modified sequence
VCSCRLVFCRRTELRVGNCLIGGVSFTYCCTRVD

SEQ ID NO: 122183 - protein, 59 aa, Artificial Sequence
  derived and/or modified sequence
AQAEPLQARADEAAAQEQPGADDQEMAHAFTWHESAALPLSDSARGLRCICGRGICRLL

SEQ ID NO: 122184 - protein, 97 aa, Artificial Sequence
  derived and/or modified sequence
MRIIALLAAILLVALQVRAGPLQARGDEAPGQEQRGPEDQDISISFAWDKSSALQVSGSTRGMVCSCRLVFCRRTELRVGNCLIGGVSFTYCCTRVD

SEQ ID NO: 122185 - protein, 33 aa, Artificial Sequence
  derived and/or modified sequence
VCSCRLVFCRRTELRVGNCLIGGVSFTYCCTRV

SEQ ID NO: 122186 - protein, 75 aa, Artificial Sequence
  derived and/or modified sequence
EPLQARADEMPAQKQPPADDQDVVIYFSGDDSSSLQVPGSTKGLICHCRVLYCLFGEHLGGTSFIHGERYPICCY

SEQ ID NO: 122187 - DNA, 294 bp, Artificial Sequence
  derived and/or modified sequence
atgcggataatagctctcttggccgcgattttgctggttgcacttcaggtccgtgccgggccattacaggctcggggtgacgaagctcctgggcaagagcagagaggacccgaggaccaggatatcagtattagcttcgcatgggacaagagctctgcactgcaagtgtccggaagcacgcgagggatggtctgtagctgccggttggtattctgtagaagaactgaattaagagtcggaaattgtcttatagggggcgtctctttcacctactgctgtacaagagtcgattag

SEQ ID NO: 122188 - DNA, 294 bp, Artificial Sequence
  derived and/or modified sequence
atgaggatcatcgccctgctggccgccatcctgctggtggccctgcaggtgcgggccggccccctgcaggcccggggagatgaggcccctggccaggagcagaggggccctgaggaccaggacatcagcatcagctttgcctgggacaagagcagcgccctgcaggtgtctggcagcacccggggcatggtgtgcagctgccgcctggtgttctgcagaagaacagagctgcgggtgggcaactgcctgattggaggagtgtccttcacctactgctgcaccagggtggactag

SEQ ID NO: 122189 - DNA, 294 bp, Artificial Sequence
  derived and/or modified sequence
atgcggatcatcgccctgctggccgccatcctgctggtggccctgcaggtgcgagcaggtcccctacaggccaggggagacgaggcccccggccaggaacagagggggcccgaggatcaagacatctctatctccttcgcctgggataaaagctctgccctgcaggttagcggatctacaagaggaatggtgtgttcatgtcgtttggtgttttgcagaagaactgagctgagagtgggaaattgtctgatagggggcgtctcattcacgtattgttgtactcgagttgattag

SEQ ID NO: 122190 - DNA, 294 bp, Artificial Sequence
  derived and/or modified sequence
atgcgcattatcgccctgctcgccgcaatacttctggttgcattgcaggtgcgcgcaggcccactccaggcgcgtggtgacgaggcccctggacaagaacagagaggaccagaagatcaggatatctcaatatcctttgcatgggacaagagcagcgcccttcaggtctccgggtctactagagggatggtgtgctcctgtagattagtgttctgccggagaacagaactgagggttggtaattgtttgataggtggggtgtcatttacttattgctgcactcgtgtcgactag

SEQ ID NO: 122191 - DNA, 294 bp, Artificial Sequence
  derived and/or modified sequence
atgagaatcatcgccctgctggccgccatcctgctggtggccctgcaggtgagagccggccccctgcaggccagaggcgacgaggcccccggccaggagcagagaggccccgaggaccaggacatcagcatcagcttcgcctgggacaagagcagcgccctgcaggtgagcggcagcaccagaggcatggtgtgcagctgcagactggtgttctgcagaagaaccgagctgagagtgggcaactgcctgatcggcggcgtgagcttcacctactgctgcaccagagtggactag

SEQ ID NO: 122192 - DNA, 617 bp, Artificial Sequence
  derived and/or modified sequence
ccttaaataaggaagtcctctcctctgtgtgcatggctgctcttgctacataagacctggaacacaggactgctgtctgccctctctgctcgccctgcctagcttgaggatctgtcaccccagccatgaggattatcgccctcctcgctgctattctcttggtagccctccaggtccgggcaggcccactccaggcaagaggtgatgaggctccaggccaggagcagcgtgggccagaagaccaggacatatctatttcctttgcatgggataaaagctctgctcttcaggtttcaggctcaacaaggggcatggtctgctcttgcagattagtattctgccggcgaacagaacttcgtgttgggaactgcctcattggtggtgtgagtttcacatactgctgcacgcgtgtcgattaacgttctgctgtccaagagaatgtcatgctgggaacgccatcatcggtggtgttagcttcacatgcttctgcagctgagcttgcagaatagagaaaaatgagctcataatttgctttgagagctacaggaaatggttgtttctcctatactttgtccttaacatctttcttgatcctaaatatatatctcgtaacaaga

SEQ ID NO: 122193 - protein, 32 aa, Artificial Sequence
  derived and/or modified sequence
AFTCHCRRSCYSTEYSYGTCTVMGINHRFCCL

SEQ ID NO: 122194 - protein, 35 aa, Artificial Sequence
  derived and/or modified sequence
STRAFTCHCRRSCYSTEYSYGTCTVMGINHRFCCL

SEQ ID NO: 122195 - protein, 100 aa, Artificial Sequence
  derived and/or modified sequence
MRTLTILTAVLLVALQAKAEPLQAEDDPLQAKAYEADAQEQRGANDQDFAVSFAEDASSSLRALGSTRAFTCHCRRSCYSTEYSYGTCTVMGINHRFCCL

SEQ ID NO: 122196 - DNA, 303 bp, Artificial Sequence
  derived and/or modified sequence
atgcgaacgcttactattttaactgccgtgctactcgtggctctccaggcaaaggccgagcccctccaggcggaggacgatcctttgcaagcgaaggcttatgaggccgacgcccaggagcagaggggcgccaatgatcaagacttcgccgtgtcttttgcagaggatgccagttcctcgctgagagccctgggctctacaagggcattcacatgccactgtcgtcggagttgctacagtactgagtactcctatggaacttgcactgtgatgggcattaaccataggttctgctgcctgtag

SEQ ID NO: 122197 - DNA, 303 bp, Artificial Sequence
  derived and/or modified sequence
atgaggaccctgaccatcctgacagctgtgctgctggtggccctgcaggccaaggccgagcccctgcaggctgaagatgaccccctgcaggccaaggcctatgaagcagatgcccaggagcagagaggagccaatgaccaggactttgctgtgtcctttgctgaagatgccagcagcagcctgcgggccctgggcagcacccgggccttcacctgccactgcagaagaagctgctacagcacagagtacagctatggcacctgcaccgtgatgggcatcaaccaccgcttctgctgcctgtag

SEQ ID NO: 122198 - DNA, 303 bp, Artificial Sequence
  derived and/or modified sequence
atgcggaccctgaccatcctgaccgccgtgctgctggtggccctgcaagcaaaagcagaaccgttgcaggctgaggacgatccactccaggccaaagcttacgaggctgacgcccaagaacagcggggcgcaaatgatcaggacttcgccgtaagctttgcagaagatgcctccagcagcttacgagcccttggttcaaccagagcctttacgtgccattgcaggcggtcatgctacagcaccgagtactcctatgggacgtgcactgtaatgggaatcaaccatcgattttgctgtctgtag

SEQ ID NO: 122199 - DNA, 303 bp, Artificial Sequence
  derived and/or modified sequence
atgcgaacccttactatactcacggcagtattactggtggctctgcaggccaaagccgagcccctccaggctgaagacgaccctcttcaggccaaggcctacgaggcggacgctcaagagcagaggggtgctaacgaccaggatttcgcagtctcgtttgctgaagatgcctcgagtagcctgagggccctgggtagcacgcgcgcttttacgtgtcactgccggcgtagctgttactccactgagtactcttatggtacctgtacagtcatgggaattaatcaccgtttttgctgcctatag

SEQ ID NO: 122200 - DNA, 303 bp, Artificial Sequence
  derived and/or modified sequence
atgagaaccctgaccatcctgaccgccgtgctgctggtggccctgcaggccaaggccgagcccctgcaggccgaggacgaccccctgcaggccaaggcctacgaggccgacgcccaggagcagagaggcgccaacgaccaggacttcgccgtgagcttcgccgaggacgccagcagcagcctgagagccctgggcagcaccagagccttcacctgccactgcagaagaagctgctacagcaccgagtacagctacggcacctgcaccgtgatgggcatcaaccacagattctgctgcctgtag

SEQ ID NO: 122201 - DNA, 469 bp, Artificial Sequence
  derived and/or modified sequence
acacatctgctcctgctctctctcctccagcgaccctagccatgagaaccctcaccatcctcactgctgttctcctcgtggccctccaggccaaggctgagccactccaagctgaggatgatccactgcaggcaaaagcttatgaggctgatgcccaggagcagcgtggggcaaatgaccaggactttgccgtctcctttgcagaggatgcaagctcaagtcttagagctttgggctcaacaagggctttcacttgccattgcagaaggtcctgttattcaacagaatattcctatgggacctgcactgtcatgggtattaaccacagattctgctgcctctgagggatgagaacagagagaaatatattcataatttactttatgacctagaaggaaactgtcgtgtgtcctatacattgccatcaactttgtttcctcatctcaaataaagtcctttcagcaagttc

SEQ ID NO: 122202 - protein, 470 aa, Artificial Sequence
  derived and/or modified sequence
MSQAYSSSQRVSSYRRTFGGAPGFPLGSPLSSPVFPRAGFGSKGSSSSVTSRVYQVSRTSGGAGGLGSLRASRLGTTRTPSSYGAGELLDFSLADAVNQEFLTTRTNEKVELQELNDRFANYIEKVRFLEQQNAALAAEVNRLKGREPTRVAELYEEELRELRRQVEVLTNQRARVDVERDNLLDDLQRLKAKLQEEIQLKEEAENNLAAFRADVDAATLARIDLERRIESLNEEIAFLKKVHEEEIRELQAQLQEQQVQVEMDMSKPDLTAALRDIRAQYETIAAKNISEAEEWYKSKVSDLTQAANKNNDALRQAKQEMMEYRHQIQSYTCEIDALKGTNDSLMRQMRELEDRFASEASGYQDNIARLEEEIRHLKDEMARHLREYQDLLNVKMALDVEIATYRKLLEGEESRINLPIQTYSALNFRETSPEQRGSEVHTKKTVMIKTIETRDGEVVSEATQQQHEVL

SEQ ID NO: 122203 - DNA, 2268 bp, Artificial Sequence
  derived and/or modified sequence
gtctcccctcgccgcatccactctccggccggccgcctgcccgccgcctcctccgtgcgcccgccagcctcgcccgcgccgtcaccatgagccaggcctactcgtccagccagcgcgtgtcctcctaccgccgcaccttcggcggggccccgggcttcccactcggctccccgctgagttcgcccgtgttcccgcgggcgggtttcggctctaagggctcctccagctcggtgacgtcccgcgtgtaccaggtgtcgcgcacgtcgggcggggccgggggcctggggtcgctgcgggccagccggctggggaccacccgcacgccctcctcctacggcgcaggcgagctgctggacttctcactggccgacgcggtgaaccaggagtttctgaccacgcgcaccaacgagaaggtggagctgcaggagctcaatgaccgcttcgccaactacatcgagaaggtgcgcttcctggagcagcagaacgcggcgctcgccgccgaagtgaaccggctcaagggccgcgagccgacgcgagtggccgagctctacgaggaggagctgcgggagctgcggcgccaggtggaggtgctcactaaccagcgcgcgcgcgtcgacgtcgagcgcgacaacctgctcgacgacctgcagcggctcaaggccaagctgcaggaggagattcagttgaaggaagaagcagagaacaatttggctgccttccgagcggacgtggatgcagctactctagctcgcattgacctggagcgcagaattgaatctctcaacgaggagatcgcgttccttaagaaagtgcatgaagaggagatccgtgagttgcaggctcagcttcaggaacagcaggtccaggtggagatggacatgtctaagccagacctcactgccgccctcagggacatccgggctcagtatgagaccatcgcggctaagaacatttctgaagctgaggagtggtacaagtcgaaggtgtcagacctgacccaggcagccaacaagaacaacgacgccctgcgccaggccaagcaggagatgatggaataccgacaccagatccagtcctacacctgcgagattgacgccctgaagggcactaacgattccctgatgaggcagatgcgggaattggaggaccgatttgccagtgaggccagtggctaccaggacaacattgcgcgcctggaggaggaaatccggcacctcaaggatgagatggcccgccatctgcgcgagtaccaggacctgctcaacgtgaagatggccctggatgtggagattgccacctaccggaagctgctggagggagaggagagccggatcaatctccccatccagacctactctgccctcaacttccgagaaaccagccctgagcaaaggggttctgaggtccataccaagaagacggtgatgatcaagaccatcgagacacgggatggggaggtcgtcagtgaggccacacagcagcagcatgaagtgctctaaagacagagaccctctgccaccagagaccgtcctcacccctgtcctcactgctccctgaagccagccttcttccatcccaggacaccacacccagcctcagtcctcccctcacagcctctgacccctcctcactggccatccctcgtggtccccaacagcgacatagcccatccctgcctggtcacagggcatgccccggccacctctgcggaccccagctgtgagccttggctgttggcagtgagtgagcctggctcttgtgctggatggagcccaggcgggagcggtggccctgtccctcccacctctgtgacctcaggcactagcctttggctctggagacagccccagagcagggtgttgggatactgcagggccaggactgagccccgcagacctccccagcccctagcccaggagagagaaagccaggcaggtagccagggggactagcccctgtggagactggggggcttgaaattgtccccgtggtctcttactttcctttccccagcccagggtggacttagaaagcaggggctacaagagggaatccccgaaggtgctggaggtgggagcaggagattgagaaggagagaaagtgggtgagatgctggagaagagaggagaggagagaggcagagagcggtctcaggctggtgggaggggcgcccacctccccacgccctcccctcccctgctgcaggggctctggagagaaacaataaagagattcacacacaagccaaaaaaaaaaaaaaaaaaaaaa

SEQ ID NO: 122204 - DNA, 1413 bp, Artificial Sequence
  derived and/or modified sequence
atgagccaggcttacagttcctctcagagagtttcgagttacaggagaactttcggcggggctcccgggttccctttaggctccccgctcagtagtccagtttttccacgagctgggtttggctcaaaagggtcttcttcctctgttacaagtcgggtgtaccaggtctcccggaccagcgggggagctggaggccttgggtctctgcgcgcctcacggttaggtactactcgcacaccgtcctcctacggcgccggagagctcctggattttagtttggccgacgccgtcaatcaagaattcctgaccacacgtactaatgaaaaggtcgaacttcaagaactgaacgacagattcgcaaattacattgaaaaggtgcggttcctggagcagcagaacgcagctcttgctgccgaagtgaatagactgaaaggcagggaaccaacccgggtggcagagctgtacgaggaagagctgcgcgagctgcgtcgtcaggtggaggtgcttaccaatcagagggctcgagtggatgttgaaagggataacctgttggacgacctgcagcggctaaaagctaagcttcaggaagagattcagctcaaggaggaagccgagaataatttggccgcctttagggccgacgtcgatgcagccacattggcccggattgacctcgagcgtcgcattgagtcactaaacgaggaaatcgccttcttgaagaaggtgcacgaggaagagattcgggaactgcaggcacagctccaagaacagcaagttcaagtagaaatggacatgtccaagcccgacctcaccgcagccctcagggacatccgggctcagtacgaaactatcgctgccaagaatattagtgaggccgaggagtggtataaatccaaggtgtcagatttgactcaagccgcgaataagaacaatgacgccctgaggcaggcgaaacaggagatgatggagtaccggcaccagatccagagctatacgtgtgaaatcgacgctctcaagggcaccaatgatagtttgatgaggcagatgagagagctggaggataggtttgcctctgaggcaagcggctatcaggataacatcgcacgcctggaagaagagataaggcatctaaaggacgaaatggcacggcacctgagagagtatcaagacttattgaatgtgaagatggccctcgatgttgagattgccacatatcggaaactgctcgagggggaagagtcacgcatcaatttaccaatacagacctactccgcactgaacttcagagagacctcgccagaacaacgcggcagtgaggttcataccaaaaagaccgtgatgatcaagacaattgaaaccagagatggggaggtcgtctctgaagccacccagcagcaacacgaggtgctgtag

SEQ ID NO: 122205 - DNA, 1413 bp, Artificial Sequence
  derived and/or modified sequence
atgagccaggcctacagcagcagccagagggtgtcctcctacagaaggaccttcggcggggcccctggcttccccctgggcagccccctgagcagccctgtgttcccccgggccggcttcggcagcaagggcagcagcagctctgtgaccagccgggtgtaccaggtgtccaggaccagcggcggggccggcggcctgggcagcctgcgggccagccggctgggcaccaccaggacccccagcagctatggagctggggagctgctggacttcagcctggctgatgctgtgaaccaggagttcctgaccaccaggaccaatgagaaggtggagctgcaggagctgaatgacagatttgccaactacatcgagaaggtgcgcttcctggagcagcagaatgctgccctggccgctgaggtgaaccggctgaagggccgggagcccaccagggtggccgagctgtatgaggaggagctgcgggagctgcggcggcaggtggaggtgctgaccaaccagagggcccgggtggatgtggagcgggacaacctgctggatgacctgcagaggctgaaggccaagctgcaggaggagatccagctgaaggaggaggccgagaacaacctggccgccttccgggcagatgtggatgctgccaccctggccagaattgacctggagaggagaattgagagcctgaatgaggagatcgccttcctgaagaaggtgcatgaggaggagatccgggagctgcaggcccagctgcaggagcagcaggtgcaggtggagatggacatgagcaagccagacctgacagctgccctgcgggacatccgggcccagtatgagaccatcgccgccaagaacatcagcgaggccgaggagtggtacaagagcaaggtgtctgacctgacccaggccgccaacaagaacaatgatgccctgcggcaggccaagcaggagatgatggagtaccgccaccagatccagagctacacctgtgaaattgatgccctgaagggcaccaatgacagcctgatgaggcagatgagggagctggaggacagatttgccagcgaggccagcggctaccaggacaacatcgcccggctggaggaggagatccgccacctgaaggatgagatggcccggcacctgcgggagtaccaggacctgctgaatgtgaagatggccctggatgtggagatcgccacctacaggaagctgctggagggggaggagagccgcatcaacctgcccatccagacctacagcgccctgaacttccgggagaccagccctgagcagaggggcagcgaggtgcacaccaagaagacagtgatgatcaagaccatcgagaccagagatggagaggtggtgtctgaggccacccagcagcagcacgaggtgctgtag

SEQ ID NO: 122206 - DNA, 1413 bp, Artificial Sequence
  derived and/or modified sequence
atgagccaggcctacagcagcagccagcgggtgagcagctaccggcgtacgttcggcggtgcacctggcttccccctgggaagtcccctctcttcacccgtcttcccccgcgcaggctttgggagtaagggaagtagtagcagcgtaacatcccgtgtttatcaagtttcccggacctccgggggtgcagggggcctcgggtcacttcgggctagccgactggggacgacacgcaccccctcatcttacggggctggcgagctgctggattttagccttgcagacgcggtcaaccaggagttcctgactactagaactaacgagaaagtggagctgcaggagctaaacgatcgcttcgcgaactacattgaaaaagtgagatttttggaacagcagaatgcagctcttgctgccgaggtgaatcgacttaaaggacgggagcccactcgcgtcgctgaactgtatgaggaagagctcagagaactccgtcggcaggtagaggtgttaacaaatcagagagccagagtggacgttgagagagacaatttactcgacgacctccagaggctgaaagccaagctgcaggaggagatccagttgaaagaagaggcggagaacaacctcgctgctttccgggcagatgtggatgccgctacgttagcaagaattgacttagagcgtcgaatcgaatccctcaacgaagagatagccttcctcaagaaggtgcatgaagaagagatcagagaactgcaggcccagctacaagagcaacaggtccaggtagaaatggacatgtccaagccagaccttacagctgcattacgcgatattcgtgcccagtatgagacaattgccgccaagaatatttctgaggctgaggagtggtacaagagcaaggtgagtgacctaacacaggctgccaacaaaaacaacgacgctctgcgccaggcaaagcaagagatgatggaatatcgacaccagatccagagttacacatgtgagatcgatgcgcttaaaggaacaaatgattctctaatgaggcaaatgcgcgaattggaagatcgttttgcctccgaggcttctggctaccaggataatatagctcgactcgaggaagaaatccgacacctgaaagacgagatggcaagacacctgcgagagtatcaggatctgttgaatgtgaaaatggccctggatgttgagatcgctacttatcggaagctgttggagggtgaggagtctcggatcaacttacccatacagacctacagcgccttgaactttcgtgagacttcgccggagcagagaggatctgaggtacacaccaagaagaccgtgatgattaaaactatcgaaactcgagatggggaggtggtgtccgaggccactcagcaacaacatgaagtcctgtag

SEQ ID NO: 122207 - DNA, 1413 bp, Artificial Sequence
  derived and/or modified sequence
atgtctcaagcgtactctagcagccagcgcgtctcctcttataggcgaacctttggcggagccccagggtttcctcttggatcccctctgtcctctcctgtgtttccgagggcaggctttggtagtaaaggtagttcctccagcgtcacctcacgcgtgtatcaggtctctaggacttcaggaggtgcagggggactcggcagcctccgcgcatctcgcctagggactacaaggacaccctctagttatggagcaggcgaacttctggatttcagtcttgctgacgccgtcaaccaggagttcctgaccacacggacgaatgagaaggtggagctccaggaacttaatgatcggtttgcgaattatatcgaaaaggtgaggtttcttgagcagcagaacgccgcactggctgccgaggtgaatagactgaaaggaagggagccaacacgggttgctgagctctatgaggaagagctgcgtgaactgcgcaggcaagttgaggtcctgacaaaccaacgagccagggttgatgttgaaagagataacctgctagacgatctgcagcggctgaaagccaagctccaggaagaaatccaactgaaggaggaggccgaaaataacctggccgctttcagggccgacgtggatgcagctactctcgcacgtatcgacctggagcgcagaattgagtcactgaacgaagagattgcctttctaaagaaagtgcacgaggaagagatccgcgaactgcaggctcagctgcaggaacagcaggttcaggtagaaatggatatgtcaaagcccgacctcacagctgcgctgagggacatcagagctcagtacgagactatcgccgcaaagaacattagcgaggcagaggaatggtacaagagcaaggtatccgacctgactcaagctgctaacaagaacaacgacgcccttcgccaagcgaagcaagagatgatggagtaccggcaccagatacagtcgtacacgtgcgaaatcgacgccctgaaaggaacaaacgatagcctgatgagacagatgcgcgaattggaagatcgttttgcatcagaagcgagcggataccaggacaatatcgctagactcgaggaggagatcaggcacctgaaagacgaaatggcacggcatctacgagagtatcaggacctgcttaatgtaaagatggctctagatgtcgagattgcgacataccgaaagctcttagaaggcgaggaatcacggatcaacctgcccatccagacatattcagctctgaattttagagaaacctctccagaacagcgagggtctgaggtacatacgaagaagacggtgatgataaaaaccatcgagacacgcgatggagaagtagtgtccgaggctacacagcagcaacatgaagtcctgtag

SEQ ID NO: 122208 - DNA, 1413 bp, Artificial Sequence
  derived and/or modified sequence
atgagccaggcctacagcagcagccagagagtgagcagctacagaagaaccttcggcggcgcccccggcttccccctgggcagccccctgagcagccccgtgttccccagagccggcttcggcagcaagggcagcagcagcagcgtgaccagcagagtgtaccaggtgagcagaaccagcggcggcgccggcggcctgggcagcctgagagccagcagactgggcaccaccagaacccccagcagctacggcgccggcgagctgctggacttcagcctggccgacgccgtgaaccaggagttcctgaccaccagaaccaacgagaaggtggagctgcaggagctgaacgacagattcgccaactacatcgagaaggtgagattcctggagcagcagaacgccgccctggccgccgaggtgaacagactgaagggcagagagcccaccagagtggccgagctgtacgaggaggagctgagagagctgagaagacaggtggaggtgctgaccaaccagagagccagagtggacgtggagagagacaacctgctggacgacctgcagagactgaaggccaagctgcaggaggagatccagctgaaggaggaggccgagaacaacctggccgccttcagagccgacgtggacgccgccaccctggccagaatcgacctggagagaagaatcgagagcctgaacgaggagatcgccttcctgaagaaggtgcacgaggaggagatcagagagctgcaggcccagctgcaggagcagcaggtgcaggtggagatggacatgagcaagcccgacctgaccgccgccctgagagacatcagagcccagtacgagaccatcgccgccaagaacatcagcgaggccgaggagtggtacaagagcaaggtgagcgacctgacccaggccgccaacaagaacaacgacgccctgagacaggccaagcaggagatgatggagtacagacaccagatccagagctacacctgcgagatcgacgccctgaagggcaccaacgacagcctgatgagacagatgagagagctggaggacagattcgccagcgaggccagcggctaccaggacaacatcgccagactggaggaggagatcagacacctgaaggacgagatggccagacacctgagagagtaccaggacctgctgaacgtgaagatggccctggacgtggagatcgccacctacagaaagctgctggagggcgaggagagcagaatcaacctgcccatccagacctacagcgccctgaacttcagagagaccagccccgagcagagaggcagcgaggtgcacaccaagaagaccgtgatgatcaagaccatcgagaccagagacggcgaggtggtgagcgaggccacccagcagcagcacgaggtgctgtag

SEQ ID NO: 122209 - DNA, 2248 bp, Artificial Sequence
  derived and/or modified sequence
gtctcccctcgccgcatccactctccggccggccgcctgcccgccgcctcctccgtgcgcccgccagcctcgcccgcgccgtcaccatgagccaggcctactcgtccagccagcgcgtgtcctcctaccgccgcaccttcggcggggccccgggcttcccactcggctccccgctgagttcgcccgtgttcccgcgggcgggtttcggctctaagggctcctccagctcggtgacgtcccgcgtgtaccaggtgtcgcgcacgtcgggcggggccgggggcctggggtcgctgcgggccagccggctggggaccacccgcacgccctcctcctacggcgcaggcgagctgctggacttctcactggccgacgcggtgaaccaggagtttctgaccacgcgcaccaacgagaaggtggagctgcaggagctcaatgaccgcttcgccaactacatcgagaaggtgcgcttcctggagcagcagaacgcggcgctcgccgccgaagtgaaccggctcaagggccgcgagccgacgcgagtggccgagctctacgaggaggagctgcgggagctgcggcgccaggtggaggtgctcactaaccagcgcgcgcgcgtcgacgtcgagcgcgacaacctgctcgacgacctgcagcggctcaaggccaagctgcaggaggagattcagttgaaggaagaagcagagaacaatttggctgccttccgagcggacgtggatgcagctactctagctcgcattgacctggagcgcagaattgaatctctcaacgaggagatcgcgttccttaagaaagtgcatgaagaggagatccgtgagttgcaggctcagcttcaggaacagcaggtccaggtggagatggacatgtctaagccagacctcactgccgccctcagggacatccgggctcagtatgagaccatcgcggctaagaacatttctgaagctgaggagtggtacaagtcgaaggtgtcagacctgacccaggcagccaacaagaacaacgacgccctgcgccaggccaagcaggagatgatggaataccgacaccagatccagtcctacacctgcgagattgacgccctgaagggcactaacgattccctgatgaggcagatgcgggaattggaggaccgatttgccagtgaggccagtggctaccaggacaacattgcgcgcctggaggaggaaatccggcacctcaaggatgagatggcccgccatctgcgcgagtaccaggacctgctcaacgtgaagatggccctggatgtggagattgccacctaccggaagctgctggagggagaggagagccggatcaatctccccatccagacctactctgccctcaacttccgagaaaccagccctgagcaaaggggttctgaggtccataccaagaagacggtgatgatcaagaccatcgagacacgggatggggaggtcgtcagtgaggccacacagcagcagcatgaagtgctctaaagacagagaccctctgccaccagagaccgtcctcacccctgtcctcactgctccctgaagccagccttcttccatcccaggacaccacacccagcctcagtcctcccctcacagcctctgacccctcctcactggccatccctcgtggtccccaacagcgacatagcccatccctgcctggtcacagggcatgccccggccacctctgcggaccccagctgtgagccttggctgttggcagtgagtgagcctggctcttgtgctggatggagcccaggcgggagcggtggccctgtccctcccacctctgtgacctcaggcactagcctttggctctggagacagccccagagcagggtgttgggatactgcagggccaggactgagccccgcagacctccccagcccctagcccaggagagagaaagccaggcaggtagccagggggactagcccctgtggagactggggggcttgaaattgtccccgtggtctcttactttcctttccccagcccagggtggacttagaaagcaggggctacaagagggaatccccgaaggtgctggaggtgggagcaggagattgagaaggagagaaagtgggtgagatgctggagaagagaggagaggagagaggcagagagcggtctcaggctggtgggaggggcgcccacctccccacgccctcccctcccctgctgcaggggctctggagagaaacaataaagagattcacacacaagccaa

SEQ ID NO: 122210 - protein, 253 aa, Artificial Sequence
  derived and/or modified sequence
MHSWERLAVLVLLGAAACAAPPRGRILGGREAEAHARPYMASVQLNGAHLCGGVLVAEQWVLSAAHCLEDAADGKVQVLLGAHSLSQPEPSKRLYDVLRAVPHPDSQPDTIDHDLLLLQLSEKATLGPAVRPLPWQRVDRDVAPGTLCDVAGWGIVNHAGRRPDSLQHVLLPVLDRATCNRRTHHDGAITERLMCAESNRRDSCKGDSGGPLVCGGVLEGVVTSGSRVCGNRKKPGIYTRVASYAAWIDSVLA

SEQ ID NO: 122211 - DNA, 762 bp, Artificial Sequence
  derived and/or modified sequence
atgcattcatgggagcggttggcagtgctcgttctattaggcgctgccgcatgcgctgcgccgcctcgggggaggatcttgggagggcgtgaagcagaagcgcacgccagaccctacatggcttctgttcagctgaatggtgcccacctctgtggcggtgttttggtggccgaacagtgggtgttgagcgctgcccattgtctcgaggacgcagccgacggaaaggtgcaggttctgctgggggcgcactctttgagccagcccgaaccatcaaagaggctttacgacgtgctgcgggcagtcccccaccctgactctcagccggacacaatcgaccacgatttgctgctgctgcaactttcagaaaaggccactcttggcccagcagttaggccactgccttggcagagggtggatcgcgatgttgccccaggcactctgtgtgatgtggccgggtgggggatcgtgaaccacgcaggccggagacccgacagtctgcagcacgtcctgctgccagttctcgaccgcgcaacttgcaacagaagaacccaccacgacggtgcaataaccgaaaggctgatgtgtgctgagtccaaccggcgcgacagctgtaagggggacagtggaggcccactggtttgcggaggcgtgctcgagggtgtggtgacaagtggatctcgggtgtgtggaaataggaaaaagcctggcatctacactcgggtggcgagctatgccgcctggatagacagcgtgctagcctag

SEQ ID NO: 122212 - DNA, 762 bp, Artificial Sequence
  derived and/or modified sequence
atgcacagctgggagcggctggccgtgctggtgctgctgggcgccgccgcctgtgccgccccaccccggggccgcatcctgggcggccgggaggccgaggcccacgcccggccctacatggcctctgtgcagctgaatggagcccacctgtgtggcggcgtgctggtggccgagcagtgggtgctgtctgctgcccactgcctggaggatgctgctgatggcaaggtgcaggtgctgctgggcgcccacagcctgagccagcctgagcccagcaagaggctgtatgatgtgctgcgggctgtgccccacccagacagccagcctgacaccatcgaccatgacctgctgctgctgcagctgtctgagaaggccaccctgggccctgctgtgcggcccctgccctggcagagggtggacagagatgtggcccctggcaccctgtgtgatgtggccggctggggcatcgtgaaccacgccggcagaagaccagacagcctgcagcacgtgctgctgcctgtgctggaccgggccacctgcaacagaaggacccaccatgatggagccatcacagagcggctgatgtgtgccgagagcaacagaagagacagctgcaagggggacagcggcggccccctggtgtgtggcggcgtgctggagggcgtggtgaccagcggcagccgggtgtgtggcaacaggaagaagccaggcatctacaccagggtggccagctatgctgcctggattgacagcgtgctggcctag

SEQ ID NO: 122213 - DNA, 762 bp, Artificial Sequence
  derived and/or modified sequence
atgcacagctgggagcggctggccgtgctggtgctgctgggcgccgccgcctgcgctgctccccccagaggtcggattttgggcgggcgtgaggctgaagcccacgcacgcccatacatggcctcggtccagcttaacggggcgcatctgtgcgggggggtcctggtggctgagcagtgggtgctgagcgccgctcactgccttgaagacgcggcagatggcaaagttcaggtactgcttggcgcacactccctgagccaacctgagccttccaagcggctatacgacgtgctcagagcagttccacaccccgattcacaacctgatactatagatcacgatctcctgttactacagctctccgaaaaggccaccctgggacctgccgtgaggccactcccttggcagcgtgtcgaccgggacgtcgccccaggtacactttgtgatgtcgccggctgggggattgttaaccacgcaggcagacgacctgatagtctgcagcatgtccttctcccagtccttgaccgcgccacctgcaaccgcagaacacatcacgacggagcaattactgagaggctgatgtgtgctgagagtaaccgcagagactcatgcaaaggtgattcagggggaccactggtgtgcggaggggtcctggagggggtggtgacatccggaagccgtgtttgtggaaacagaaaaaagccagggatatacacacgggtcgctagctatgccgcctggatcgatagcgtgctggcatag

SEQ ID NO: 122214 - DNA, 762 bp, Artificial Sequence
  derived and/or modified sequence
atgcattcatgggaaaggctggcggtgcttgtgctgctgggtgcagccgcttgcgccgctcccccaagggggaggattttgggcggaagagaagccgaggcacacgcgcgaccctatatggcgtctgtgcagttgaatggggctcatctgtgcggcggagtacttgtggctgaacagtgggttctctcggcagcccactgtctggaggatgcggcagatggaaaagtacaggttctactgggagcccattcgttgtcacagccagagccttccaagcgcttgtacgacgtgttacgggcagtgccgcaccctgactcgcagcccgataccatcgaccatgatcttctgctgctgcagctttccgaaaaggcaacgttaggtcccgcagtacggcctcttccttggcagcgagtcgaccgggatgtggcccctggcactctgtgcgatgtggcagggtggggtattgtgaatcatgccggacggagaccagattccctccagcatgtgctcctcccagtcttagacagggctacttgtaatcggcgtacacaccacgatggcgctattacggaacgtctcatgtgtgccgagtccaataggcgtgattcatgtaagggggacagcggtgggccactggtatgtggaggtgttctggagggggtggtcacatctggttccagggtgtgcggcaacagaaaaaaaccaggcatatacacgcgcgtggcctcttacgcagcatggatcgactccgttctcgcctag

SEQ ID NO: 122215 - DNA, 1155 bp, Artificial Sequence
  derived and/or modified sequence
gtgtctcagccacagcggcttcaccatgcacagctgggagcgcctggcagttctggtcctcctaggagcggccgcctgcgcggcgccgccccgtggtcggatcctgggcggcagagaggccgaggcgcacgcgcggccctacatggcgtcggtgcagctgaacggcgcgcacctgtgcggcggcgtcctggtggcggagcagtgggtgctgagcgcggcgcactgcctggaggacgcggccgacgggaaggtgcaggttctcctgggcgcgcactccctgtcgcagccggagccctccaagcgcctgtacgacgtgctccgcgcagtgccccacccggacagccagcccgacaccatcgaccacgacctcctgctgctacagctgtcggagaaggccacactgggccctgctgtgcgccccctgccctggcagcgcgtggaccgcgacgtggcaccgggaactctctgcgacgtggccggctggggcatagtcaaccacgcgggccgccgcccggacagcctgcagcacgtgctcttgccagtgctggaccgcgccacctgcaaccggcgcacgcaccacgacggcgccatcaccgagcgcttgatgtgcgcggagagcaatcgccgggacagctgcaagggtgactccgggggcccgctggtgtgcgggggcgtgctcgagggcgtggtcacctcgggctcgcgcgtttgcggcaaccgcaagaagcccgggatctacacccgcgtggcgagctatgcggcctggatcgacagcgtcctggcctagggtgccggggcctgaaggtcagggtcacccaagcaacaaagtcccgagcaatgaagtcatccactcctgcatctggttggtctttattgagcacctactatatgcagaaggggaggccgaggtgggaggatcattggatctcaggagttcgagatcagcatgggccacgtagcgcgactccatctctacaaataaataaaaaattagctgggcaattggcgggcatggaggtgggtgcttgtagttccagctactcaggaggctgaggtgggaggatgacttgaacgcaggaggctgaggctgcagtgagttgtgattgcaccactgccctccagcctgggcaacagagtgaaaccttgtctctctct

SEQ ID NO: 122216 - DNA, 762 bp, Artificial Sequence
  derived and/or modified sequence
atgcacagctgggagagactggccgtgctggtgctgctgggcgccgccgcctgcgccgccccccccagaggcagaatcctgggcggcagagaggccgaggcccacgccagaccctacatggccagcgtgcagctgaacggcgcccacctgtgcggcggcgtgctggtggccgagcagtgggtgctgagcgccgcccactgcctggaggacgccgccgacggcaaggtgcaggtgctgctgggcgcccacagcctgagccagcccgagcccagcaagagactgtacgacgtgctgagagccgtgccccaccccgacagccagcccgacaccatcgaccacgacctgctgctgctgcagctgagcgagaaggccaccctgggccccgccgtgagacccctgccctggcagagagtggacagagacgtggcccccggcaccctgtgcgacgtggccggctggggcatcgtgaaccacgccggcagaagacccgacagcctgcagcacgtgctgctgcccgtgctggacagagccacctgcaacagaagaacccaccacgacggcgccatcaccgagagactgatgtgcgccgagagcaacagaagagacagctgcaagggcgacagcggcggccccctggtgtgcggcggcgtgctggagggcgtggtgaccagcggcagcagagtgtgcggcaacagaaagaagcccggcatctacaccagagtggccagctacgccgcctggatcgacagcgtgctggcctag

SEQ ID NO: 122217 - protein, 647 aa, Artificial Sequence
  derived and/or modified sequence
MWRVCARRAQNVAPWAGLEARWTALQEVPGTPRVTSRSGPAPARRNSVTTGYGGVRALCGWTPSSGATPRNRLLLQLLGSPGRRYYSLPPHQKVPLPSLSPTMQAGTIARWEKKEGDKINEGDLIAEVETDKATVGFESLEECYMAKILVAEGTRDVPIGAIICITVGKPEDIEAFKNYTLDSSAAPTPQAAPAPTPAATASPPTPSAQAPGSSYPPHMQVLLPALSPTMTMGTVQRWEKKVGEKLSEGDLLAEIETDKATIGFEVQEEGYLAKILVPEGTRDVPLGTPLCIIVEKEADISAFADYRPTEVTDLKPQVPPPTPPPVAAVPPTPQPLAPTPSAPCPATPAGPKGRVFVSPLAKKLAVEKGIDLTQVKGTGPDGRITKKDIDSFVPSKVAPAPAAVVPPTGPGMAPVPTGVFTDIPISNIRRVIAQRLMQSKQTIPHYYLSIDVNMGEVLLVRKELNKILEGRSKISVNDFIIKASALACLKVPEANSSWMDTVIRQNHVVDVSVAVSTPAGLITPIVFNAHIKGVETIANDVVSLATKAREGKLQPHEFQGGTFTISNLGMFGIKNFSAIINPPQACILAIGASEDKLVPADNEKGFDVASMMSVTLSCDHRVVDGAVGAQWLAEFRKYLEKPITMLL

SEQ ID NO: 122218 - protein, 225 aa, Artificial Sequence
  derived and/or modified sequence
MWRVCARRAQNVAPWAGLEARWTALQEVPGTPRVTSRSGPAPARRNSVTTGYGGVRALCGWTPSSGATPRNRLLLQLLGSPGRRYYSLPPHQKVPLPSLSPTMQAGTIARWEKKEGDKINEGDLIAEVETDKATVGKPEDIEAFKNYTLDSSAAPTPQAAPAPTPAATASPPTPSAQAPGSSYPPHMQVLLPALSPTMTMGTVQRWEKKVGEKLSEGDLLAEMSL

SEQ ID NO: 122219 - protein, 418 aa, Artificial Sequence
  derived and/or modified sequence
MQAGTIARWEKKEGDKINEGDLLAEIETDKATIGFEVQEEGYLAKILVPEGTRDVPLGTPLCIIVEKEADISAFADYRPTEVTDLKPQVPPPTPPPVAAVPPTPQPLAPTPSAPCPATPAGPKGRVFVSPLAKKLAVEKGIDLTQVKGTGPDGRITKKDIDSFVPSKVAPAPAAVVPPTGPGMAPVPTGVFTDIPISNIRRVIAQRLMQSKQTIPHYYLSIDVNMGEVLLVRKELNKILEGRSKISVNDFIIKASALACLKVPEANSSWMDTVIRQNHVVDVSVAVSTPAGLITPIVFNAHIKGVETIANDVVSLATKAREGKLQPHEFQGGTFTISNLGMFGIKNFSAIINPPQACILAIGASEDKLVPADNEKGFDVASMMSVTLSCDHRVVDGAVGAQWLAEFRKYLEKPITMLL

SEQ ID NO: 122220 - DNA, 1944 bp, Artificial Sequence
  derived and/or modified sequence
atgtggagagtctgcgctcgccgggcacagaatgtcgctccctgggccggtctagaggcacggtggacagcgctgcaggaagtacctgggacaccgcgggtgaccagcagatccggaccggcgccggcgcgcaggaattcggtgactacaggctacggcggcgttcgcgctctttgtggttggacccccagctccggcgccaccccacgtaacaggttgttactccaactgctgggatcaccaggccggagatactactctctaccgccacaccagaaggtccccctgccatctctctctcccactatgcaggccggtacaatcgccagatgggagaaaaaggaaggtgataagattaacgagggcgatctgatcgcagaagttgaaacagacaaggctacagtaggcttcgagtccctggaagaatgctatatggctaaaatcctagtggcagagggtacaagggacgtacctataggagctatcatctgcatcacggtcggcaaacctgaggacatcgaagcctttaaaaactacactcttgactcttctgcggccccaacaccacaggcagcacccgctccaaccccagccgctaccgcaagtccacccactcctagcgctcaagcccctggatcatcctatccgccccatatgcaagtcttgttgcccgccttatctcccaccatgaccatgggcactgtgcaaaggtgggaaaagaaagtgggcgagaaactgagtgagggagatttgctggccgagatagaaactgacaaggcaacaataggcttcgaagtgcaggaagaaggctaccttgctaagatattggtaccggagggtactagggatgtccctttgggcacacccttgtgtatcatcgttgagaaggaagccgatatctcagcatttgctgactaccggcccactgaggtgaccgacttgaagccccaggtaccaccccctacccctcctcccgtggcagctgtccctcccacaccgcagcctctcgccccaaccccgagcgctccatgcccggcgaccccggcaggacccaagggtagagtgtttgtgtctcccctggccaagaaactggccgtcgaaaagggaatcgatctgacccaggttaagggtacgggccctgacggccggatcacaaagaaagacattgactcctttgtgcctagcaaagttgctccagctccagctgctgtcgtgcccccgacaggccccggcatggctccggtgcccaccggggttttcactgatatccctatctccaatattagacgtgtcatcgctcagcgtctgatgcaatcaaaacagacgataccccactattacctgtctatcgatgttaatatgggcgaagtgctgctcgtccgaaaagagttaaataagatccttgagggaaggtctaagatttccgtcaatgactttattattaaagcttctgctttggcctgtctgaaagtcccagaagccaattcctcatggatggatacggtgatcaggcaaaaccacgtggtcgacgtgtctgtggcggtgtcgacaccagctggcctaattaccccaatcgtgttcaatgcacatatcaaaggtgtggaaaccatcgccaacgacgtggtgagcctagccacgaaagcccgcgaagggaagctgcagccccatgagttccagggaggaactttcactatcagtaatctgggaatgtttggaatcaagaacttctccgcaattatcaatcctcctcaggcttgtatcctcgctattggagctagcgaggataaactggttccagcagataatgagaagggctttgacgtcgcatccatgatgagtgtgacgctgtcgtgcgatcaccgggtcgtggatggagccgttggtgcccagtggctagcagaatttcgaaagtatctcgaaaaacctatcacgatgctgttgtag

SEQ ID NO: 122221 - DNA, 1257 bp, Artificial Sequence
  derived and/or modified sequence
atgcaggccggcacaatcgccaggtgggaaaaaaaagagggtgacaagatcaacgaaggcgatttgttggcagagattgaaaccgacaaagccacaatcgggttcgaggtgcaggaggaaggttacttggccaagatcctagtgcccgagggaaccagagatgtccctctgggaacgcccctctgtattatcgtggagaaggaagcagacatctcagccttcgccgactacaggcctacagaagtcaccgatctgaagccacaagtcccacctcccacccctcctcccgtcgctgccgtgccaccaacaccccagccattggctcccacccctagcgccccctgtcccgccacgccagccgggccaaaggggcgggttttcgtctccccgcttgccaaaaagcttgccgtggaaaagggcatcgacctcactcaggtcaaggggactggccctgatgggcggattacaaagaaagatattgatagcttcgtgccctcgaaggtagccccagctccagctgcggtagtccctcctacagggcctggcatggcccccgttcccaccggcgtctttactgatattcctatttctaatataaggcgcgtcattgcccagcgactcatgcagtctaagcagacaatcccgcattattacctctctatcgacgtgaacatgggcgaagtcctgctcgttcgtaaggagctaaacaagatccttgagggtaggagcaagatctccgtcaacgatttcatcattaaagcatctgccctggcatgcctgaaggtccctgaagcgaatagctcatggatggacaccgtgattcggcagaaccacgtagtggacgtatccgtcgcggtctccacgcctgccgggttaatcacccccattgtattcaacgcccatattaagggagtggagacgatcgcaaatgatgtggtgagcctagccactaaagccagagaagggaaattacagcctcacgagtttcaaggcggaacattcaccattagcaatcttggaatgtttggaattaaaaatttttctgcgatcattaatcccccgcaagcctgcatcctcgccatcggggcgtctgaagacaagctcgtcccagccgataatgaaaagggctttgacgtggcaagcatgatgtctgtgacactgtcctgcgaccatcgtgtcgtcgacggggctgtgggagcccagtggctggcagaattcaggaaataccttgagaagcccataaccatgctgctctag

SEQ ID NO: 122222 - DNA, 1944 bp, Artificial Sequence
  derived and/or modified sequence
atgtggagggtgtgtgcccggcgggcccagaatgtggccccctgggccggcctggaggcccgctggacagccctgcaggaggtgcccggcaccccccgggtgaccagccgcagcggccctgccccagccaggagaaattctgtgaccaccggctacggcggcgtgcgggccctgtgtggctggacccccagcagcggggccacccccaggaaccggctgctgctgcagctgctgggcagccctggaagacgctactacagcctgcccccccaccagaaggtgcccctgcccagcctgagccccaccatgcaggccggcaccatcgcccgctgggagaagaaggagggggacaagatcaatgaaggagacctgattgctgaggtggagacagacaaggccaccgtgggctttgagagcctggaggagtgctacatggccaagatcctggtggccgagggcaccagagatgtgcccatcggggccatcatctgcatcaccgtgggcaagccagaagatattgaggccttcaagaactacaccctggacagcagcgctgcccccaccccccaggccgccccagcccccaccccagctgccacagccagcccccccaccccatctgcccaggcccctggcagcagctacccaccccacatgcaggtgctgctgcctgccctgagccccaccatgaccatgggcaccgtgcagcgctgggagaagaaggtgggggagaagctgtctgagggggacctgctggccgagattgaaacagacaaggccaccatcggctttgaggtgcaggaggagggctacctggccaagatcctggtgcctgagggcaccagagatgtgcccctgggcacccccctgtgcatcatcgtggagaaggaggccgacatcagcgcctttgctgactaccggcccacagaggtgacagacctgaagccccaggtgcccccacccaccccacctcctgtggccgctgtgccccccaccccccagcccctggcccccaccccatctgccccctgcccagccaccccagctggccccaagggccgggtgtttgtgagccccctggccaagaagctggccgtggagaagggcatcgacctgacccaggtgaagggcaccggcccagatggccgcatcaccaagaaggacatcgacagctttgtgcccagcaaggtggccccagccccagctgctgtggtgccccccaccggccctggcatggcccctgtgcccactggagtcttcacagacatccccatcagcaacatcagaagagtcatcgcccagaggctgatgcagagcaagcagaccatcccccactactacctgagcattgatgtgaacatgggagaggtgctgctggtgaggaaggagctgaacaagatcctggagggccgcagcaagatctctgtgaatgacttcatcatcaaggccagcgccctggcctgcctgaaggtgcctgaggccaacagctcctggatggacaccgtcatccggcagaaccacgtggtggatgtgtctgtggccgtgtccaccccagctggcctcatcacccccatcgtgttcaatgcccacatcaagggcgtggagaccatcgccaatgatgtggtgtccctggccaccaaggcccgggagggcaagctgcagccccatgagttccagggcggcaccttcaccatcagcaacctgggcatgtttggcatcaagaacttcagcgccatcatcaaccccccccaggcctgcatcctggccatcggggccagcgaggacaagctggtgcctgctgacaatgagaagggctttgatgtggcctccatgatgtctgtgaccctgagctgtgaccaccgggtggtggatggagctgtgggcgcccagtggctggccgagttcaggaagtacctggagaagcccatcaccatgctgctgtag

SEQ ID NO: 122223 - DNA, 1257 bp, Artificial Sequence
  derived and/or modified sequence
atgcaggccggcaccatcgcccgctgggagaagaaggagggggacaagatcaatgaaggagacctgctggccgagattgaaacagacaaggccaccatcggctttgaggtgcaggaggagggctacctggccaagatcctggtgcctgagggcaccagagatgtgcccctgggcacccccctgtgcatcatcgtggagaaggaggccgacatcagcgcctttgctgactaccggcccacagaggtgacagacctgaagccccaggtgcccccacccaccccacctcctgtggccgctgtgccccccaccccccagcccctggcccccacccccagcgccccctgcccagccaccccagctggccccaagggccgggtgtttgtgagccccctggccaagaagctggccgtggagaagggcatcgacctgacccaggtgaagggcactggaccagatggccgcatcaccaagaaggacatcgacagctttgtgcccagcaaggtggccccagccccagctgctgtggtgcccccaactggacctggcatggcccctgtgcccaccggggtcttcacagacatccccatcagcaacatccggcgggtgattgcccagaggctgatgcagagcaagcagaccatcccccactactacctgagcattgatgtgaacatgggagaggtgctgctggtgaggaaggagctgaacaagatcctggagggccgcagcaagatctctgtgaatgacttcatcatcaaggccagcgccctggcctgcctgaaggtgcctgaggccaacagctcctggatggacaccgtcatccggcagaaccacgtggtggatgtgtctgtggccgtgtccaccccagctggcctcatcacccccatcgtgttcaatgcccacatcaagggcgtggagaccatcgccaatgatgtggtgtccctggccaccaaggcccgggagggcaagctgcagccccatgagttccagggcggcaccttcaccatcagcaacctgggcatgtttggcatcaagaacttcagcgccatcatcaaccccccccaggcctgcatcctggccatcggggccagcgaggacaagctggtgcctgctgacaatgaaaaaggatttgatgtggcctccatgatgtctgtgaccctgagctgtgaccaccgggtggtggatggagctgtgggcgcccagtggctggccgagttcaggaagtacctggagaagcccatcaccatgctgctgtag

SEQ ID NO: 122224 - DNA, 1944 bp, Artificial Sequence
  derived and/or modified sequence
atgtggcgggtgtgcgcccggcgggcccagaacgtggccccctgggccgggctggaggcgcgctggactgccctgcaggaggtgcccggtaccccccgggtgacttcccgttccggtcccgccccggccaggcggaactcagtgaccacaggatacgggggcgtgcgcgctctgtgcggctggacacccagcagtggggctaccccccgcaataggctcctgctccaactgctaggctcacctggaaggaggtattattcgctgcccccccaccagaaagtcccgctgccaagcctgagtccaaccatgcaggctggaactattgcacggtgggaaaagaaggagggagacaagataaatgaaggagatttaatcgctgaagtggaaaccgacaaggctactgtaggattcgagtcacttgaggaatgctatatggcgaagatcctcgtagcagaaggaaccagagacgtgcctattggtgccataatctgcataacggtcggaaaacctgaggatatcgaggccttcaagaactataccttggatagtagtgccgcacctacaccacaggcagcgcctgctcctacccccgccgctaccgcttctccaccaaccccgagcgcccaggcaccagggagttcataccctccgcatatgcaggttctgctgcccgcgctgtcacctacaatgacaatgggaactgtgcaaaggtgggaaaaaaaggttggggagaagctctctgagggagacctgctcgccgagatcgagaccgacaaggctacgatcggtttcgaggtgcaggaagaaggctatctagccaaaattttggtgcctgaggggaccagagacgttcctttaggcactcctctgtgtatcatcgtcgagaaagaggcagatatttctgccttcgcggattatcgcccaacggaagttactgacctgaaaccccaggtccccccgcccacgccccccccggttgccgcagtcccaccaacccctcagccactggcacccacccccagcgccccctgtcccgctacgcctgcggggcctaagggccgggtatttgtctcccccctcgctaagaaactggctgttgagaaagggatagatttgacccaggtcaaaggaacaggtcctgacggtcgcatcaccaaaaaggatattgattcgtttgttccatctaaggtcgcaccagccccagccgccgtcgtgcctccaaccgggcccgggatggctcctgtccctacaggagttttcactgacatcccaatcagcaatatcaggcgcgtcatagcgcaacggctgatgcaatccaaacaaaccattccccactactacctatccattgacgtcaatatgggagaagtgttattggtcaggaaggagcttaataagatcttggaaggcagatctaaaatatcagtcaacgacttcattatcaaggcatcagctctggcctgcttgaaggtccccgaggctaactccagttggatggatacagttatccgtcagaatcacgtggtcgacgtgtcggtggccgtctcaacacccgcaggcctcataacccctatagtcttcaacgcacatattaaaggggtggagactattgcgaacgacgtggtgtcactggcgaccaaagctagggaaggcaaactccagccgcatgagttccaaggcggaacattcactatttccaatctcggtatgttcggcatcaagaatttctcagcaatcatcaacccaccacaggcttgtattctggcgataggcgcatccgaggacaaactggtgcccgctgataacgagaagggttttgatgtcgccagcatgatgagtgtgactctcagttgtgatcaccgggtggttgacggggctgtgggagcccagtggctcgccgagttccgcaagtatcttgagaaaccgatcactatgcttctctag

SEQ ID NO: 122225 - DNA, 1257 bp, Artificial Sequence
  derived and/or modified sequence
atgcaggccggcaccatcgcccggtgggagaagaaggagggcgacaagataaatgagggcgatcttctggcagaaatcgagacagataaagcaacgatcggctttgaggtgcaagaggaaggatatctggccaaaatcctggtgccagagggtacacgagatgtccctttggggactccactttgcattatagtcgaaaaggaggctgatatttcggcctttgcggattacaggcccaccgaagtcactgaccttaaaccacaagtcccacctcccacacctccacccgtggccgcggtgcctcccacaccgcagccccttgcccccacaccatctgcaccctgccccgctacaccagcaggacccaaaggcagagtgttcgtgagccctttggcaaagaagcttgccgttgaaaaaggcattgatctcactcaggtcaagggcacaggtcccgacggtagaataacaaaaaaggacattgattcttttgtgcccagcaaggttgctcccgcaccagccgccgtagtcccaccaacagggcctggtatggctcctgtccccactggtgtgttcactgacatccctatcagtaatatacggagagtcatagcacagagactgatgcaatccaagcagactattcctcactactatctctcaattgatgtaaatatgggcgaggttctattagtgcgtaaagaactgaataaaatacttgagggacggtccaagatctccgtgaacgattttatcatcaaagcctctgccctggcctgccttaaggtcccagaagctaacagttcttggatggatactgtaatcagacagaaccacgtggtggatgtgtccgtcgcagtgtcaacccctgccggcctcattacgcctatcgtcttcaacgcccacattaagggggtcgagactatcgcaaacgatgtggtgtccctcgctacaaaagcacgtgaggggaagcttcagcctcatgagtttcaaggcggcaccttcacaatctcaaaccttgggatgttcggtattaaaaatttcagtgctatcataaacccaccccaagcttgcattctggcgattggggcgagcgaagataaactggttccagccgataacgaaaagggattcgacgtcgccagcatgatgtcagtgaccctgtcttgtgaccatcgggtcgtggacggcgcagtaggcgctcagtggttagccgaattccgtaagtatctagagaaacctatcacaatgcttctctag

SEQ ID NO: 122226 - DNA, 1944 bp, Artificial Sequence
  derived and/or modified sequence
atgtggcgggtatgcgcccgacgagctcagaacgttgcaccctgggctgggctggaagcaaggtggacagccctccaggaggtccctgggacgcccagggtcacaagtcgctccgggcctgcccctgctcgcagaaattccgtgacaacggggtacggaggcgtgagggctctctgcggatggactccgtctagcggagccacccccaggaaccgactgcttcttcagctccttgggtctcctggcaggaggtactattccctgcccccacatcaaaaggttcctctgccctctctcagcccgacaatgcaagccggaactatcgcccgatgggagaaaaaggagggtgacaagattaatgaaggcgatctgattgcggaggttgagaccgataaggccacggtcggattcgagtcactcgaggagtgttatatggccaaaattctcgtggcggagggcactagagatgtgccaattggagctatcatttgcattacggtggggaagccagaggacattgaggccttcaaaaattacactctcgactcctctgccgcacctacaccacaggccgcacccgctcctaccccagctgctaccgcctcgcctccaaccccatccgcccaggcgcctggcagctcatatccaccccacatgcaggtgctgttaccggctctgtctccaacaatgacgatgggtaccgtccaacgctgggagaagaaggtcggcgagaagttgtccgagggcgaccttttggctgagattgaaaccgataaggcaaccatcggcttcgaggtccaggaagaaggatacctcgctaagatcttggtacctgaggggaccagagacgtacctctgggcacccctttatgcataattgtggagaaagaagcagatatttccgcctttgccgattataggcccactgaggtcacagacctcaaacctcaggtccctccccctacaccccctcctgtcgctgctgttcctcccacccctcagcccctggccccaactccttctgccccttgtccggctacccctgccggacctaagggcagagtgtttgtgtccccactggccaagaagttagccgtggagaagggcatagatctcacacaggtgaaaggaaccggcccagatgggaggataacaaagaaggatatcgactcattcgttcctagcaaggtggctcccgcacctgccgcagtagttccgccaaccggacccggtatggccccagtgccaaccggtgttttcaccgacatcccaatctccaacatcaggagggttattgcacagcgcttaatgcagagtaagcagacaattccccattattatttgtctatcgacgtgaacatgggagaggtcttgctagtgcggaaagagctcaacaaaatcttggaaggacgcagtaagattagcgttaacgatttcatcatcaaggcttccgctttggcttgcctgaaggttcccgaagcaaactcctcttggatggataccgtcattcgacagaaccacgtggtggacgtctctgttgctgtatctacccccgcagggctgataacgcccatcgtgttcaacgctcacatcaagggggtggagaccatcgcaaatgatgtggtgagcctcgctactaaggcccgagaggggaagcttcaaccacacgagttccagggaggcactttcaccatttctaatctcgggatgtttggcattaaaaactttagcgctataatcaaccccccacaagcctgtattctggccatcggcgcatccgaggataagctagtccctgccgacaacgaaaagggctttgacgtggcttcaatgatgtctgtcactttgtcctgtgaccaccgcgtggtcgatggggctgtgggcgcacaatggctggctgaattcaggaagtaccttgagaagcctatcaccatgctcttatag

SEQ ID NO: 122227 - DNA, 1257 bp, Artificial Sequence
  derived and/or modified sequence
atgcaggcgggaaccatagcccgttgggagaaaaaagagggggataaaattaacgagggcgatttactggcagagatcgaaacagataaggctacaattgggttcgaagtgcaggaagaagggtatctggccaagatccttgtgcccgagggcacacgagacgtgccacttgggacacctctctgtatcatcgtggaaaaggaggccgacatatccgcttttgcagattacaggcccactgaggttacggatcttaagcctcaggttccacctccaacccctccaccagtcgccgctgtgccacccacacctcagcccctggctcctacgccatcagccccttgccctgcaacccctgctgggccaaaaggaagagtcttcgtgtctcccctcgcaaaaaaactcgcggtagaaaagggcattgatcttacgcaagtgaaaggcaccggccctgatggtcgtattaccaaaaaggacatagacagcttcgttccttcaaaagttgctccagcaccagccgctgtggtcccccctactggacctggtatggccccagtgcccactggtgtttttaccgacatcccaatcagcaacataaggagagtgatagctcagaggctcatgcagtccaagcagactatccctcactactatctaagtatcgacgtaaatatgggcgaggtcctgctggtgaggaaggagcttaacaagatcctggaaggaaggtccaaaatttcagtgaacgactttattatcaaggctagcgcccttgcctgtctgaaggtcccagaggccaattcctcctggatggacactgtgattaggcaaaatcatgtcgtggacgtgagtgtcgccgtgagtacgccagcaggtcttattacacccattgtgttcaatgcccacattaagggggtggagactatcgctaatgacgtagtcagccttgccacgaaggctagagaaggcaaacttcagccacacgaattccagggaggaacattcacaatctccaatctggggatgttcgggatcaagaatttcagtgcaattattaacccccctcaggcctgcattctcgccataggcgctagcgaggacaaactcgtgcctgctgacaacgagaaggggttcgacgtggccagcatgatgagcgtaacactgtcctgtgatcacagggtagtcgatggcgcagtgggagcccagtggctggccgaatttcgcaagtatctggagaaacccatcacaatgctgctgtag

SEQ ID NO: 122228 - DNA, 1944 bp, Artificial Sequence
  derived and/or modified sequence
atgtggagagtgtgcgccagaagagcccagaacgtggccccctgggccggcctggaggccagatggaccgccctgcaggaggtgcccggcacccccagagtgaccagcagaagcggccccgcccccgccagaagaaacagcgtgaccaccggctacggcggcgtgagagccctgtgcggctggacccccagcagcggcgccacccccagaaacagactgctgctgcagctgctgggcagccccggcagaagatactacagcctgcccccccaccagaaggtgcccctgcccagcctgagccccaccatgcaggccggcaccatcgccagatgggagaagaaggagggcgacaagatcaacgagggcgacctgatcgccgaggtggagaccgacaaggccaccgtgggcttcgagagcctggaggagtgctacatggccaagatcctggtggccgagggcaccagagacgtgcccatcggcgccatcatctgcatcaccgtgggcaagcccgaggacatcgaggccttcaagaactacaccctggacagcagcgccgcccccaccccccaggccgcccccgcccccacccccgccgccaccgccagcccccccacccccagcgcccaggcccccggcagcagctaccccccccacatgcaggtgctgctgcccgccctgagccccaccatgaccatgggcaccgtgcagagatgggagaagaaggtgggcgagaagctgagcgagggcgacctgctggccgagatcgagaccgacaaggccaccatcggcttcgaggtgcaggaggagggctacctggccaagatcctggtgcccgagggcaccagagacgtgcccctgggcacccccctgtgcatcatcgtggagaaggaggccgacatcagcgccttcgccgactacagacccaccgaggtgaccgacctgaagccccaggtgcccccccccacccccccccccgtggccgccgtgccccccaccccccagcccctggcccccacccccagcgccccctgccccgccacccccgccggccccaagggcagagtgttcgtgagccccctggccaagaagctggccgtggagaagggcatcgacctgacccaggtgaagggcaccggccccgacggcagaatcaccaagaaggacatcgacagcttcgtgcccagcaaggtggcccccgcccccgccgccgtggtgccccccaccggccccggcatggcccccgtgcccaccggcgtgttcaccgacatccccatcagcaacatcagaagagtgatcgcccagagactgatgcagagcaagcagaccatcccccactactacctgagcatcgacgtgaacatgggcgaggtgctgctggtgagaaaggagctgaacaagatcctggagggcagaagcaagatcagcgtgaacgacttcatcatcaaggccagcgccctggcctgcctgaaggtgcccgaggccaacagcagctggatggacaccgtgatcagacagaaccacgtggtggacgtgagcgtggccgtgagcacccccgccggcctgatcacccccatcgtgttcaacgcccacatcaagggcgtggagaccatcgccaacgacgtggtgagcctggccaccaaggccagagagggcaagctgcagccccacgagttccagggcggcaccttcaccatcagcaacctgggcatgttcggcatcaagaacttcagcgccatcatcaaccccccccaggcctgcatcctggccatcggcgccagcgaggacaagctggtgcccgccgacaacgagaagggcttcgacgtggccagcatgatgagcgtgaccctgagctgcgaccacagagtggtggacggcgccgtgggcgcccagtggctggccgagttcagaaagtacctggagaagcccatcaccatgctgctgtag

SEQ ID NO: 122229 - DNA, 1257 bp, Artificial Sequence
  derived and/or modified sequence
atgcaggccggcaccatcgccagatgggagaagaaggagggcgacaagatcaacgagggcgacctgctggccgagatcgagaccgacaaggccaccatcggcttcgaggtgcaggaggagggctacctggccaagatcctggtgcccgagggcaccagagacgtgcccctgggcacccccctgtgcatcatcgtggagaaggaggccgacatcagcgccttcgccgactacagacccaccgaggtgaccgacctgaagccccaggtgcccccccccacccccccccccgtggccgccgtgccccccaccccccagcccctggcccccacccccagcgccccctgccccgccacccccgccggccccaagggcagagtgttcgtgagccccctggccaagaagctggccgtggagaagggcatcgacctgacccaggtgaagggcaccggccccgacggcagaatcaccaagaaggacatcgacagcttcgtgcccagcaaggtggcccccgcccccgccgccgtggtgccccccaccggccccggcatggcccccgtgcccaccggcgtgttcaccgacatccccatcagcaacatcagaagagtgatcgcccagagactgatgcagagcaagcagaccatcccccactactacctgagcatcgacgtgaacatgggcgaggtgctgctggtgagaaaggagctgaacaagatcctggagggcagaagcaagatcagcgtgaacgacttcatcatcaaggccagcgccctggcctgcctgaaggtgcccgaggccaacagcagctggatggacaccgtgatcagacagaaccacgtggtggacgtgagcgtggccgtgagcacccccgccggcctgatcacccccatcgtgttcaacgcccacatcaagggcgtggagaccatcgccaacgacgtggtgagcctggccaccaaggccagagagggcaagctgcagccccacgagttccagggcggcaccttcaccatcagcaacctgggcatgttcggcatcaagaacttcagcgccatcatcaaccccccccaggcctgcatcctggccatcggcgccagcgaggacaagctggtgcccgccgacaacgagaagggcttcgacgtggccagcatgatgagcgtgaccctgagctgcgaccacagagtggtggacggcgccgtgggcgcccagtggctggccgagttcagaaagtacctggagaagcccatcaccatgctgctgtag

SEQ ID NO: 122230 - DNA, 4458 bp, Artificial Sequence
  derived and/or modified sequence
acaaacctgaaacgaaatctttgcaaccagtacagcctgcgcggggcgcggcccagtccatcccccttcggatgcgcagaagcagaggtcaccacgccggacccctcgattccctcgcgggcgattcctggctccttcaccaccccagcactccaagacccccgccctttggcctgaggctcccactgccctagccagttcccgggctcacttccagcttttccagaaagcttggccacgcccctcggcccagactctcaggccactcggccgcaattaacccgcgtctctgcgcctttttaggcccctccccctcggtcgtgcccttgtcatctcttaggccccgtctcaccctttcggatgcctcccctagaaccctaccactttccacccctttccgtctgttatttctcccaaacttgcgcccgcacaggcccctctggaacactcctgccccgtagtgcccctcgtccccgctccgtagagaaagagcgtgcgtgccgcgcatttctggcctggggagcgggtggagtaaacctgcgggaaccattttacgacaacgtgcggctgtgcggtgtggctgacggcaacgccgctgctcttggagaggtcactccggagacggcgttggttttggggtgtggggggttggtggcactatgtggcgcgtctgtgcgcgacgggctcagaatgtagccccatgggcgggactcgaggctcggtggacggccttgcaggaggtacccggaactccacgagtgacctcgcgatctggcccggctcccgctcgtcgcaacagcgtgactacagggtatggcggggtccgggcactgtgcggctggacccccagttctggggccacgccgcggaaccgcttactgctgcagcttttggggtcgcccggccgccgctattacagtcttcccccgcatcagaaggttccattgccttctctttcccccacaatgcaggcaggcaccatagcccgttgggaaaaaaaagagggggacaaaatcaatgaaggtgacctaattgcagaggttgaaactgataaagccactgttggatttgagagcctggaggagtgttatatggcaaagatacttgttgctgaaggtaccagggatgttcccatcggagcgatcatctgtatcacagttggcaagcctgaggatattgaggcctttaaaaattatacactggattcctcagcagcacctaccccacaagcggccccagcaccaacccctgctgccactgcttcgccacctacaccttctgctcaggctcctggtagctcatatccccctcacatgcaggtacttcttcctgccctctctcccaccatgaccatgggcacagttcagagatgggaaaaaaaagtgggtgagaagctaagtgaaggagacttactggcagagatagaaactgacaaagccactataggttttgaagtacaggaagaaggttatctggcaaaaatcctggtccctgaaggcacaagagatgtccctctaggaaccccactctgtatcattgtagaaaaagaggcagatatatcagcatttgctgactataggccaaccgaagtaacagatttaaaaccacaagtgccaccacctaccccacccccggtggccgctgttcctccaactccccagcctttagctcctacaccttcagcaccctgcccagctactcctgctggaccaaagggaagggtgtttgttagccctcttgcaaagaagttggcagtagagaaagggattgatcttacacaagtaaaagggacaggaccagatggtagaatcaccaagaaggatatcgactcttttgtgcctagtaaagttgctcctgctccggcagctgttgtgcctcccacaggtcctggaatggcaccagttcctacaggtgtcttcacagatatcccaatcagcaacattcgtcgggttattgcacagcgattaatgcaatcaaagcaaaccatacctcattattacctttctatcgatgtaaatatgggagaagttttgttggtacggaaagaacttaataagatattagaagggagaagcaaaatttctgtcaatgacttcatcataaaagcttcagctttggcatgtttaaaagttcccgaagcaaattcttcttggatggacacagttataagacaaaatcatgttgttgatgtcagtgttgcggtcagtactcctgcaggactcatcacacctattgtgtttaatgcacatataaaaggagtggaaaccattgctaatgatgttgtttctttagcaaccaaagcaagagagggtaaactacagccacatgaattccagggtggcacttttacgatctccaatttaggaatgtttggaattaagaatttctctgctattattaacccacctcaagcatgtattttggcaattggtgcttcagaggataaactggtccctgcagataatgaaaaagggtttgatgtggctagcatgatgtctgttacactcagttgtgatcaccgggtggtggatggagcagttggagcccagtggcttgctgagtttagaaagtaccttgaaaaacctatcactatgttgttgtaactaactcaagaatttctaaactctcccaggtcacactgattcattcttaacaagatatttatatgttattaaacaggtggttctttttattttaaccagttatttttattattgagtctgtccagataagttatttataatgggcattactgaatttttaaaatgccgattacacccaaatattgtgcacatttaataatcagacaccagatttttagctctgtactcctaattaagggacatgtatgtggccttgcctagccctttggtgataagtacttcctctaggaaatgtacgataggtagaattgtggttccctaaagacaagtacataaaggtgaccctgatgaaaccttgaagttctgaaatttaactgcctaaaatgttctccttagatgtgagagaaagagaaatcagaaaaattaattctcttgggggaagggcttgaattgaagctttactttagaatttagccctggtttgaaattttccattacatgatcttggtttatcatcgatgggaagggtagaaaacttcaaggaaaataagtgaaattttaaaagtcagcattttcttagacctcttcagctgattgtttatttttctatgaattcctacacatggttattcccccctacttgagataatctaaatataaaccagctacttgatgtaactgagaatttgtgtggatatttatttaaacaaatgtgtaattttgagtacagaattcaacagttacctccaaaaaagaaacattgttaatataatttaacagaagttgtgaaactaaaattttctaagattaactggtagttcattgtaaatgaacataatgaacagaatttatgactccactgtggaaaatgctatcaaataactaaggaatatatatggaataagtgtacatatgtaaaatattgttactagagttagatatgtgccaaagtccatttatcccaaatcctgtctgaaaaggaggggtacattggtaaacattttggagtgcttaaaaatgccaaaaacaaaatggtaatttctactttgataaagtaaaaaagttaaatgtgtgtaaaaaagtgttctgtgtccttctactccagcatcgtctcatgtaaaataagaaagccctaaaatactattggagagaaaaaattaactaggttgctactttatttgcctaaatacttttttctattttgttagattttgcctttcttttggaaggaaggaggcgatattctggattataaaaatgaattgggaacattatcacaattccagactttctattaatatttatgtgttttaataaacgtttgaaattatttatgactacttaaaatgaatctgaccagtgcttcctggtatatgtaatatgtggagttagcccctgaaatttgctttaagtgtttcagtgttgaatctgtttctaaatattcattattacatggtacacaagtgacactccatatattccacacagacttttaccttgctgtattattatgaaaacaatacattaatttgatttttcagtaattagtaattttaggttgaagattatccaaaagaaacaagcttatcacaagggaccatcatcaatatgatccaaatctggttcaaacattcaaaacttcaaagataattcatctttcgctaatgcttgtggttctgttgttcccttgaaaaaaaataaaaacagttgccttctaataaacattgttgagttaaaaattaatctgagctataatctaaatcgattcagtctcttaccagaactgaaagaaaaaagttagaaatagtgtttttggttcatatgattatttaaaaattaaagtataaatcttcaa

SEQ ID NO: 122231 - DNA, 1352 bp, Artificial Sequence
  derived and/or modified sequence
gctgctcttggagaggtcactccggagacggcgttggttttggggtgtggggggttggtggcactatgtggcgcgtctgtgcgcgacgggctcagaatgtagccccatgggcgggactcgaggctcggtggacggccttgcaggaggtacccggaactccacgagtgacctcgcgatctggcccggctcccgctcgtcgcaacagcgtgactacagggtatggcggggtccgggcactgtgcggctggacccccagttctggggccacgccgcggaaccgcttactgctgcagcttttggggtcgcccggccgccgctattacagtcttcccccgcatcagaaggttccattgccttctctttcccccacaatgcaggcaggcaccatagcccgttgggaaaaaaaagagggggacaaaatcaatgaaggtgacctaattgcagaggttgaaactgataaagccacagttggcaagcctgaggatattgaggcctttaaaaattatacactggattcctcagcagcacctaccccacaagcggccccagcaccaacccctgctgccactgcttcgccacctacaccttctgctcaggctcctggtagctcatatccccctcacatgcaggtacttcttcctgccctctctcccaccatgaccatgggcacagttcagagatgggaaaaaaaagtgggtgagaagctaagtgaaggagacttactggcagagatgtccctctaggaaccccactctgtatcattgtagaaaaagaggcagatatatcagcatttgctgactataggccaaccgaagtaacagatttaaaaccacaagtgccaccacctaccccacccccggtggccgctgttcctccaactccccagcctttagctcctacaccttcagcaccctgcccagctactcctgctggaccaaagggaagggtgtttgttagccctcttgcaaagaagttggcagtagagaaagggattgatcttacacaagtaaaagggacaggaccagatggtagaatcaccaagaaggatatcgactcttttgtgcctagtaaagttgctcctgctccggcagctgttgtgcctcccacaggtcctggaatggcaccagttcctacaggtgtcttcacagatatcccaatcagcaacattcgtcgggttattgcacagcgattaatgcaatcaaagcaaaccatacctcattattacctttctatcgatgtaaatatgggagaagttttgttggtacggaaagaacttaataagatattagaagggagaagcaaaatttctgtcaatgacttcatcataaaagcttcagctttggcatgtttaa

SEQ ID NO: 122232 - DNA, 1766 bp, Artificial Sequence
  derived and/or modified sequence
cccgctcgtcgcaacagcgtgactacagggtatggcggggtccgggcactgtgcggctggacccccagttctggggccacgccgcggaaccgcttactgctgcagcttttggggtcgcccggccgccgctattacagtcttcccccgcatcagaaggttccattgccttctctttcccccacaatgcaggcaggcaccatagcccgttgggaaaaaaaagagggggacaaaatcaatgaaggagacttactggcagagatagaaactgacaaagccactataggttttgaagtacaggaagaaggttatctggcaaaaatcctggtccctgaaggcacaagagatgtccctctaggaaccccactctgtatcattgtagaaaaagaggcagatatatcagcatttgctgactataggccaaccgaagtaacagatttaaaaccacaagtgccaccacctaccccacccccggtggccgctgttcctccaactccccagcctttagctcctacaccttcagcaccctgcccagctactcctgctggaccaaagggaagggtgtttgttagccctcttgcaaagaagttggcagtagagaaagggattgatcttacacaagtaaaagggacaggaccagatggtagaatcaccaagaaggatatcgactcttttgtgcctagtaaagttgctcctgctccggcagctgttgtgcctcccacaggtcctggaatggcaccagttcctacaggtgtcttcacagatatcccaatcagcaacattcgtcgggttattgcacagcgattaatgcaatcaaagcaaaccatacctcattattacctttctatcgatgtaaatatgggagaagttttgttggtacggaaagaacttaataagatattagaagggagaagcaaaatttctgtcaatgacttcatcataaaagcttcagctttggcatgtttaaaagttcccgaagcaaattcttcttggatggacacagttataagacaaaatcatgttgttgatgtcagtgttgcggtcagtactcctgcaggactcatcacacctattgtgtttaatgcacatataaaaggagtggaaaccattgctaatgatgttgtttctttagcaaccaaagcaagagagggtaaactacagccacatgaattccagggtggcacttttacgatctccaatttaggaatgtttggaattaagaatttctctgctattattaacccacctcaagcatgtattttggcaattggtgcttcagaggataaactggtccctgcagataatgaaaaagggtttgatgtggctagcatgatgtctgttacactcagttgtgatcaccgggtggtggatggagcagttggagcccagtggcttgctgagtttagaaagtaccttgaaaaacctatcactatgttgttgtaactaactcaagaatttctaaactctcccaggtcacactgattcattcttaacaagatatttatatgttattaaacaggtggttctttttattttaaccagttatttttattattgagtctgtccagataagttatttataatgggcattactgaatttttaaaatgccgattacacccaaatattgtgcacatttaataatcagacaccagatttttagctctgtactcctaattaagggacatgtatgtggccttgcctagccctttggtgataagtacttcctctaggaaatgtacgataggtagaattgtggttccctaaagac

SEQ ID NO: 122233 - protein, 585 aa, Artificial Sequence
  derived and/or modified sequence
MPVLSEDSGLHETLALLTSQLRPDSNHKEEMGFLRDVFSEKSLSYLMKIHEKLRYYERQSPTPVLHSAVALAEDVMEELQAASVHSDERELLQLLSTPHLRAVLMVHDTVAQKNFDPVLPPLPDNIDEDFDEESVKIVRLVKNKEPLGATIRRDEHSGAVVVARIMRGGAADRSGLVHVGDELREVNGIAVLHKRPDEISQILAQSQGSITLKIIPATQEEDRLKESKVFMRALFHYNPREDRAIPCQEAGLPFQRRQVLEVVSQDDPTWWQAKRVGDTNLRAGLIPSKGFQERRLSYRRAAGTLPSPQSLRKPPYDQPCDKETCDCEGYLKGHYVAGLRRSFRLGCRERLGGSQEGKMSSGAESPELLTYEEVARYQHQPGERPRLVVLIGSLGARLHELKQKVVAENPQHFGVAVPHTTRPRKSHEKEGVEYHFVSKQAFEADLHHNKFLEHGEYKENLYGTSLEAIQAVMAKNKVCLVDVEPEALKQLRTSEFKPYIIFVKPAIQEKRKTPPMSPACEDTAAPFDEQQQEMAASAAFIDRHYGHLVDAVLVKEDLQGAYSQLKVVLEKLSKDTHWVPVSWVR

SEQ ID NO: 122234 - DNA, 1758 bp, Artificial Sequence
  derived and/or modified sequence
atgccagtgctgagcgaggactccggactccatgagacactggccctgttaacatcacagctcagacccgatagcaaccacaaggaggaaatgggttttttgagggatgtgttctcggaaaagtcattgtcgtatctgatgaagatccacgaaaaacttcggtactatgagcggcagtctccaactcccgtcctgcactcagccgtggccctcgccgaagatgtaatggaggagttacaagctgccagtgtgcactcagacgagcgagagctcctgcagctgctctcgacgccccacctgcgtgcagtcctcatggtgcacgacacggttgcacaaaagaattttgatccagtcctgcccccgctacctgataacatcgatgaagattttgatgaggaatcagtgaaaatcgttaggttggtgaaaaataaggagccacttggcgccacgatacgcagagacgagcattccggagccgttgtggtcgctcgcatcatgagaggaggcgctgccgacagatctggccttgtacatgtgggcgacgaattacgcgaagtcaatggcattgccgtgcttcataagcgcccagacgagatttcgcagattcttgctcagtcccaaggtagtatcactctgaaaatcatccccgctacacaggaagaagatcggctcaaggagtccaaagtattcatgcgcgcactgttccactataatcctagggaagacagggcaattccatgtcaagaggctggcctccccttccagcgacggcaagtgctcgaggtggtgtctcaggacgacccaacctggtggcaggctaaacgagtgggggataccaacctgcgggcaggactgattccgtctaaaggcttccaggaacgacggctcagctacagacgagcggctggtaccctcccatcaccacagtcgctgaggaaacccccttatgaccagccttgtgataaagagacgtgtgattgtgaagggtaccttaaggggcattatgtagcaggcttgagaagatccttccggctgggttgcagagagcgactgggtggctcacaggagggaaagatgtcttcgggagccgagagccctgagttattgacttatgaggaagtagcaagatatcaacaccaaccgggggagaggcctaggttggtagtcctaataggcagcctgggagcacgactccatgagcttaaacaaaaagttgtggccgagaatccccaacattttggtgtcgctgtgccacacacgacacgaccaaggaagtcgcacgaaaaggaaggcgtggaataccatttcgtgagtaagcaggcatttgaagccgacttgcaccacaataaatttttggagcatggagaatataaagaaaacctgtacgggactagtctggaggccatccaagccgtcatggccaagaacaaagtttgcctcgtggacgtggagcccgaggccttgaagcagctgcgaacaagcgaattcaaaccttacatcattttcgtgaagcctgccatccaggaaaagagaaagaccccccctatgagccctgcctgtgaagacaccgctgcccctttcgatgagcagcagcaggaaatggcggccagcgccgccttcattgaccggcactatggccacttggtggacgcagtgctggttaaggaagatctacagggagcttactcccagctcaaagtggttctggaaaaactgagcaaagacacccattgggttcctgttagctgggtcagatag

SEQ ID NO: 122235 - DNA, 1758 bp, Artificial Sequence
  derived and/or modified sequence
atgcctgtgctgtctgaggacagcggcctgcacgagaccctggccctgctgaccagccagctgcggccagacagcaaccacaaggaggagatgggcttcctgagagatgtgttttctgagaagagcctgagctacctgatgaagatccacgagaagctgcgctactatgaaaggcagagccccacccctgtgctgcacagcgctgtggccctggctgaagatgtgatggaggagctgcaggccgcctctgtgcacagtgatgagcgggagctgctgcagctgctgagcaccccccacctgcgggctgtgctgatggtgcatgacacagtggcccagaagaactttgatcctgtgctgccccccctgcctgacaacattgatgaggactttgatgaggagagcgtgaagatcgtgcggctggtgaagaacaaggagcccctgggcgccaccatcagaagagatgagcacagcggggctgtggtggtggcccgcatcatgaggggcggcgctgctgacaggagcggcctggtgcacgtgggagatgagctgcgggaggtgaatggaattgctgtgctgcacaagaggccagatgagatcagccagatcctggcccagagccagggcagcatcaccctgaagatcatcccagccacccaggaggaggaccggctgaaggagagcaaggtgttcatgagggccctcttccactacaaccccagagaagatcgggccatcccctgccaggaggccggcctgcccttccagaggcggcaggtgctggaggtggtgtcccaggatgaccccacctggtggcaggccaagagggtgggggacaccaacctgcgggccggcctcatccccagcaagggcttccaggagcggcggctgagctacagaagagctgctggcaccctgcccagcccccagagcctgaggaagccaccctatgaccagccctgtgacaaggagacctgtgactgtgagggctacctgaagggccactacgtggccggcctgcggcgctccttccggctgggctgccgggagcggctgggcggcagccaggagggcaagatgagcagtggagctgagagccctgagctgctgacctatgaggaggtggcccgctaccagcaccagcctggagagcggccccggctggtggtgctgattggcagcctgggcgcccggctgcacgagctgaagcagaaggtggtggccgagaacccccagcactttggagtggccgtgccccacaccacccggcccaggaagagccatgagaaggagggcgtggagtaccactttgtgtccaagcaggcctttgaggccgacctgcaccacaacaagttcctggagcacggggagtacaaggagaacctgtatggcaccagcctggaggccatccaggccgtgatggccaagaacaaggtgtgcctggtggatgtggagcctgaggccctgaagcagctgcggaccagcgagttcaagccctacatcatctttgtgaagccagccatccaggagaagaggaagaccccacccatgagccctgcctgtgaggacacagctgccccctttgatgagcagcagcaggagatggccgccagcgctgccttcatcgacagacactacggccacctggtggatgctgtgctggtgaaggaggacctgcagggcgcctacagccagctgaaggtggtgctggagaagctgagcaaggacacccactgggtgcctgtgtcctgggtgaggtag

SEQ ID NO: 122236 - DNA, 1758 bp, Artificial Sequence
  derived and/or modified sequence
atgcccgtgctgagcgaggacagcggcctgcacgagaccctggccctcctgacatcacagctgcgcccagactccaatcacaaagaggagatggggttcctgcgggacgtattcagtgaaaagtctctgagctacctgatgaagatccacgaaaagctgaggtactacgagcgtcagtcgccaaccccagtactccattcagcagtggccctggccgaggatgttatggaagaactgcaggccgcctcggtccatagcgatgaaagagagttattacaacttctctccaccccccatttgcgcgctgtgttgatggtccacgacaccgtcgcacagaaaaactttgaccccgtcttgccaccccttccagataacatcgatgaggatttcgatgaggagagtgtgaagatcgtcaggttagtgaagaacaaagaaccactgggagccacaattcgccgggacgaacactctggcgcagtcgtcgtggcgaggattatgaggggtggcgccgccgatcgctcaggactcgtgcatgtgggggatgaactgagggaggtgaatggtattgcggtactgcataaacgccctgatgaaatttcacagattcttgctcagtcgcagggatctattacgctaaagattataccggccacacaagaagaggacaggctaaaggagagtaaagtgtttatgcgcgccctgttccactacaatcctcgcgaagaccgggctataccttgccaggaagccggactacccttccagcgccggcaggtcttggaagttgtgtcccaggacgatcccacctggtggcaggctaagcgcgtcggagataccaaccttagagccggcctaatccccagcaagggatttcaagagcgacgcttgagctaccgaagggccgccggaacactgccctcgccgcagtccctgcgtaaacctccatacgaccaaccctgtgataaggaaacctgcgactgcgagggatatctgaaaggccactacgtcgcagggctcaggaggagtttccgcttggggtgtcgagagcgcttgggtggcagccaggagggtaaaatgtctagcggcgctgaatccccggaactgctaacgtacgaggaagttgctcgctatcaacatcagcccggcgagcggccccgtcttgtcgtactgataggctcactgggggcgagactccatgagctcaaacagaaagtggtcgccgagaatccacagcattttggtgtggctgtccctcacaccaccagacctaggaaaagtcatgagaaggagggggtggaatatcacttcgtgtctaaacaggcttttgaagctgacctgcatcacaacaagttcctggagcacggagagtataaggagaacctatatggcacatctctcgaggctatacaggccgtaatggctaagaataaggtgtgcctcgtggacgtcgagccagaagccctaaagcaactgagaacaagtgaatttaaaccttacatcatttttgttaagcctgccatccaagagaagagaaagacaccccccatgagtcctgcgtgtgaggacaccgcagccccgtttgatgaacagcagcaggagatggctgcaagcgcagcatttatagatcgccactacgggcacctagtcgatgccgtgctggtgaaagaagatctgcaaggagcctatagccagctgaaggtggtactggagaagctgtcaaaggacacacattgggtacctgtttcctgggtgaggtag

SEQ ID NO: 122237 - DNA, 1758 bp, Artificial Sequence
  derived and/or modified sequence
atgcccgtcctgagcgaagacagtggcttacacgagacattagccctgctaacgtcacaattaagaccggacagtaatcataaggaggagatgggattcctccgtgacgtgttctccgaaaaatctttgtcctaccttatgaaaatacacgagaagctgcgctattatgaaagacagagtcccactccagtgctacattccgcagtggccctagcagaggacgtaatggaggaactgcaggctgccagcgtgcattctgacgagcgcgagttgcttcagctcctctctacacctcacttgagggcagtgctgatggttcacgacaccgttgcccaaaagaactttgacccggtcctcccacccttgcccgacaatattgacgaagacttcgacgaagaatctgtgaagattgtacgtctggtgaaaaacaaggaaccactgggggctactatcaggcgggatgagcactcaggagccgtcgtggttgccaggattatgagagggggagccgcagacaggtcaggcctggtccatgtgggcgacgagctgagagaagttaatggtatcgcagtgcttcataagagacccgacgagatcagccagatcttagcccagagccagggcagcattacactgaagatcatacccgcaacccaagaggaggatcggctaaaagagtctaaggtattcatgcgagcccttttccattataatccaagggaggacagggctattccctgtcaggaagcgggacttcccttccagcgtagacaggtcttagaggtggtgagtcaggacgaccccacatggtggcaggccaaaagggttggggatactaatttgcgggctggcctgatcccgtcaaagggttttcaggagcgtcgcctgtcatatagaagagccgctggtacactgccatctcctcagagcctgcgtaagccgccttatgaccaaccctgcgacaaggagacttgtgactgcgaaggatacttgaagggacactatgtcgctgggctgaggcgcagtttcaggttgggttgcagagaaagactgggaggaagccaagagggtaagatgtcctctggagcagagagccctgaactgctcacctatgaagaggtggcgaggtatcagcaccagcccggtgaaaggcctaggctggttgtgcttattggatccttaggcgcacggctccacgagttaaaacagaaagtcgtagccgagaatccacaacactttggtgtagccgttccccacacaacacggcctcggaagagtcacgagaaggagggagtggaataccacttcgtaagtaagcaagcattcgaggctgacctgcaccacaacaaattcctggaacacggcgagtacaaggaaaacctatacgggaccagcttagaggctattcaagccgtgatggccaaaaataaagtttgccttgtagatgtcgaaccggaggccctcaagcaactgagaacatctgagtttaaaccatacatcatcttcgtgaagcctgccattcaagagaaacgaaaaactccccctatgtctcccgcatgtgaagacaccgccgctccttttgacgaacaacagcaggaaatggctgcatccgccgcttttatcgatcgacattacggtcatttggtggatgccgtgttggtgaaggaagacctgcagggcgcttactctcagttgaaagtggttctggaaaagttatccaaggatacgcactgggtacctgtgtcttgggtccggtag

SEQ ID NO: 122238 - DNA, 1758 bp, Artificial Sequence
  derived and/or modified sequence
atgcccgtgctgagcgaggacagcggcctgcacgagaccctggccctgctgaccagccagctgagacccgacagcaaccacaaggaggagatgggcttcctgagagacgtgttcagcgagaagagcctgagctacctgatgaagatccacgagaagctgagatactacgagagacagagccccacccccgtgctgcacagcgccgtggccctggccgaggacgtgatggaggagctgcaggccgccagcgtgcacagcgacgagagagagctgctgcagctgctgagcaccccccacctgagagccgtgctgatggtgcacgacaccgtggcccagaagaacttcgaccccgtgctgccccccctgcccgacaacatcgacgaggacttcgacgaggagagcgtgaagatcgtgagactggtgaagaacaaggagcccctgggcgccaccatcagaagagacgagcacagcggcgccgtggtggtggccagaatcatgagaggcggcgccgccgacagaagcggcctggtgcacgtgggcgacgagctgagagaggtgaacggcatcgccgtgctgcacaagagacccgacgagatcagccagatcctggcccagagccagggcagcatcaccctgaagatcatccccgccacccaggaggaggacagactgaaggagagcaaggtgttcatgagagccctgttccactacaaccccagagaggacagagccatcccctgccaggaggccggcctgcccttccagagaagacaggtgctggaggtggtgagccaggacgaccccacctggtggcaggccaagagagtgggcgacaccaacctgagagccggcctgatccccagcaagggcttccaggagagaagactgagctacagaagagccgccggcaccctgcccagcccccagagcctgagaaagcccccctacgaccagccctgcgacaaggagacctgcgactgcgagggctacctgaagggccactacgtggccggcctgagaagaagcttcagactgggctgcagagagagactgggcggcagccaggagggcaagatgagcagcggcgccgagagccccgagctgctgacctacgaggaggtggccagataccagcaccagcccggcgagagacccagactggtggtgctgatcggcagcctgggcgccagactgcacgagctgaagcagaaggtggtggccgagaacccccagcacttcggcgtggccgtgccccacaccaccagacccagaaagagccacgagaaggagggcgtggagtaccacttcgtgagcaagcaggccttcgaggccgacctgcaccacaacaagttcctggagcacggcgagtacaaggagaacctgtacggcaccagcctggaggccatccaggccgtgatggccaagaacaaggtgtgcctggtggacgtggagcccgaggccctgaagcagctgagaaccagcgagttcaagccctacatcatcttcgtgaagcccgccatccaggagaagagaaagaccccccccatgagccccgcctgcgaggacaccgccgcccccttcgacgagcagcagcaggagatggccgccagcgccgccttcatcgacagacactacggccacctggtggacgccgtgctggtgaaggaggacctgcagggcgcctacagccagctgaaggtggtgctggagaagctgagcaaggacacccactgggtgcccgtgagctgggtgagatag

SEQ ID NO: 122239 - protein, 367 aa, Artificial Sequence
  derived and/or modified sequence
MTWLQSKPQRLQNLSQREMSGGRKTSVQVPSPANGVIEALLVPDGGKVEGGTPLFTLRKTGAAPAKAKPAEAPAAAAPKAEPTAAAVPPPAAPIPTQMPPVPSPSQPPSGKPVSAVKPTVAPPLAEPGAGKGLRSEHREKMNRMRQRIAQRLKEAQNTCAMLTTFNEIDMSNIQEMRARHKEAFLKKHNLKLGFMSAFVKASAFALQEQPVVNAVIDDTTKEVVYRDYIDISVAVATPRGLVVPVIRNVEAMNFADIERTITELGEKARKNELAIEDMDGGTFTISNGGVFGSLFGTPIINPPQSAILGMHGIFDRPVAIGGKVEVRPMMYVALTYDHRLIDGREAVTFLRKIKAAVEDPRVLLLDL

SEQ ID NO: 122240 - protein, 453 aa, Artificial Sequence
  derived and/or modified sequence
MLSRSRCVSRAFSRSLSAFQKGNCPLGRRSLPGVSLCQGPGYPNSRKVVINNSVFSVRFFRTTAVCKDDLVTVKTPAFAESVTEGDVRWEKAVGDTVAEDEVVCEIETDKTSVQVPSPANGVIEALLVPDGGKVEGGTPLFTLRKTGAAPAKAKPAEAPAAAAPKAEPTAAAVPPPAAPIPTQMPPVPSPSQPPSGKPVSAVKPTVAPPLAEPGAGKGLRSEHREKMNRMRQRIAQRLKEAQNTCAMLTTFNEIDMSNIQEMRARHKEAFLKKHNLKLGFMSAFVKASAFALQEQPVVNAVIDDTTKEVVYRDYIDISVAVATPRGLVVPVIRNVEAMNFADIERTITELGEKARKNELAIEDMDGGTFTISNGGVFGSLFGTPIINPPQSAILGMHGIFDRPVAIGGKVEVRPMMYVALTYDHRLIDGREAVTFLRKIKAAVEDPRVLLLDL

SEQ ID NO: 122241 - DNA, 1104 bp, Artificial Sequence
  derived and/or modified sequence
atgacctggctgcagagtaaaccacagcgcttacagaacctgtcccagagagagatgtcagggggacgcaaaacctccgtacaggtcccatccccagctaatggtgttattgaagcactgcttgtgcccgacggaggaaaagtagaaggaggcacgccactttttactctgcgcaagacaggggccgccccagcaaaagccaagccggccgaagcccctgcagccgctgctcctaaggccgaacctacggccgctgcagtgcctcctcccgctgctcctatccctacgcagatgccaccagtgcccagcccttcacagccacccagtggaaagcctgtgtccgctgtgaagcccacagttgcccccccgctggccgaacctggagcaggaaagggcctgcggtccgagcatcgagagaagatgaatcgcatgaggcagcgcatcgctcagcggctgaaagaggcacagaatacatgtgcgatgctgaccacgttcaacgagatcgatatgtcaaatatccaggaaatgcgagcaaggcataaagaggcattcttgaaaaaacataacctgaaactaggcttcatgtctgcattcgttaaggccagtgcgtttgcccttcaggagcagcccgtggtgaatgccgttatcgatgatacgacaaaggaggtggtctatagggattatatagacatctctgtggcagtcgccacgccgcgcgggctcgtggtgccagtcattaggaacgttgaagccatgaattttgctgatatcgaaagaacaatcactgagctgggcgagaaagctcgaaagaatgaactagctattgaggacatggacggcggcacatttaccatctcaaatgggggggtctttggttctttgtttgggacgcccatcattaaccctccacagtccgccatcttgggcatgcatggcatttttgacagacccgttgctattggcggaaaagtggaagttcgcccgatgatgtacgtggcactcacatatgatcatagactgatcgatggccgggaagcggtcacattcctgaggaagatcaaggctgccgttgaggacccgcgggttttgctgctggatctgtag

SEQ ID NO: 122242 - DNA, 1362 bp, Artificial Sequence
  derived and/or modified sequence
atgctctcccggtcacggtgcgtttccagagcctttagccggagtttgagtgccttccaaaaaggcaactgtccactcggacgccgcagccttccaggtgtcagtctgtgtcaggggccaggatacccgaatagccgcaaggtggtcatcaacaactcagtgtttagtgttcgcttttttagaacaactgcggtgtgtaaagacgacctggtcactgttaagaccccagccttcgcggaaagtgtcactgaaggagacgttcgctgggagaaagccgtgggtgacactgtagcagaggatgaagtggtgtgcgaaatagagactgacaagacctcagtgcaagtgccatcaccagccaacggtgttatcgaagctctcctagtccctgatggagggaaggtagaaggtggaaccccactgttcactcttagaaagactggggctgcccccgctaaggccaagccagcggaggctccggccgccgctgctcctaaggccgagcccacggcagccgcagtccctccacctgcagcccccattcccacccaaatgccaccagtgccaagtccttcacagccgccatccggaaaacctgtgtccgccgtgaagcctacggtagcacctcccctagccgaacccggtgcggggaaaggattgcgcagtgagcacagagaaaaaatgaacagaatgagacagagaatcgcccaacggctcaaagaggcacaaaatacttgcgctatgttgacgacattcaatgagatcgacatgtcgaatattcaggagatgcgcgctaggcacaaagaagctttcctcaaaaagcataacctaaagctcggctttatgagcgcttttgtcaaggcatcagccttcgctctgcaagaacagccagtggttaatgctgtcatcgacgacaccacaaaagaggttgtgtatcgggactacatcgatatttccgtcgccgtcgccactccaagggggttagtcgttccagtaatccgcaatgtagaagccatgaacttcgccgatattgagcgaaccattactgaactgggcgagaaagctagaaagaacgagctcgccatcgaagatatggacggaggtacatttactatatctaacggtggggtgtttggctccctctttgggactccaatcattaatcctcctcagtccgccatactgggaatgcatggcatcttcgacagaccagtggctattggtgggaaagtcgaggtgcggcccatgatgtatgtggccctgacctatgatcatcgtctcatcgacggacgagaggcagtgacctttctgcgtaaaataaaagccgcagtggaagaccctcgggtgttgctgcttgacctgtag

SEQ ID NO: 122243 - DNA, 1104 bp, Artificial Sequence
  derived and/or modified sequence
atgacctggctgcagagcaagccccagaggctgcagaacctgagccagcgggagatgtctgggggcaggaagacctctgtgcaggtgcccagccctgccaacggggtgattgaggccctgctggtgcctgatggcggcaaggtggagggcggcacccccctcttcaccctgaggaagacaggagctgccccagccaaggccaagccagctgaggccccagctgctgctgcccccaaggccgagcccacagctgctgctgtgcccccacctgctgcccccatccccacccagatgcctcctgtgcccagccccagccagcccccatctgggaagcctgtgtctgctgtgaagcccaccgtggccccacccctggccgagcctggagctgggaagggcctgcggtctgagcaccgggagaagatgaacaggatgaggcagagaattgcccagaggctgaaggaggcccagaacacctgtgccatgctgaccaccttcaatgaaattgacatgagcaacatccaggagatgagggcccggcacaaggaggccttcctgaagaagcacaacctgaagctgggcttcatgtctgcctttgtgaaggccagcgcctttgccctgcaggagcagcctgtggtgaatgctgtgattgatgacaccaccaaggaggtggtgtacagagactacatcgacatctctgtggccgtggccaccccccggggcctggtggtgcctgtgatcagaaatgtggaggccatgaactttgctgacattgaaagaaccatcacagagctgggggagaaggccaggaagaatgagctggccatcgaggacatggatggcggcaccttcaccatcagcaatggaggagtgtttggcagcctgtttggcacccccatcatcaaccccccccagagcgccatcctgggcatgcacggcatctttgacaggcctgtggccatcggcggcaaggtggaggtgcggcccatgatgtatgtggccctgacctatgaccaccggctgattgatggccgggaggccgtgaccttcctgaggaagatcaaggctgctgtggaggacccccgggtgctgctgctggacctgtag

SEQ ID NO: 122244 - DNA, 1362 bp, Artificial Sequence
  derived and/or modified sequence
atgctgagccgcagccgctgtgtgtcccgggccttcagccgcagcctgagcgccttccagaagggcaactgccccctgggccgccgcagcctgcccggggtgtccctgtgccagggccctggctaccccaacagcaggaaggtggtgatcaacaacagcgtcttctctgtgcgcttcttccgcaccacagctgtgtgcaaggatgacctggtgacagtgaagaccccagcctttgctgagagcgtgacagaaggagatgtgcgctgggagaaggctgtgggggacacagtggctgaagatgaggtggtgtgtgaaattgaaacagacaagacctctgtgcaggtgcccagccctgccaacggggtgattgaggccctgctggtgcctgatggcggcaaggtggagggcggcacccccctcttcaccctgaggaagacaggagctgccccagccaaggccaagccagctgaggccccagctgctgctgcccccaaggccgagcccacagctgctgctgtgcccccacctgctgcccccatccccacccagatgcctcctgtgcccagccccagccagcccccatctgggaagcctgtgtctgctgtgaagcccaccgtggccccacccctggccgagcctggagctgggaagggcctgcggtctgagcaccgggagaagatgaacaggatgaggcagagaattgcccagaggctgaaggaggcccagaacacctgtgccatgctgaccaccttcaatgaaattgacatgagcaacatccaggagatgagggcccggcacaaggaggccttcctgaagaagcacaacctgaagctgggcttcatgtctgcctttgtgaaggccagcgcctttgccctgcaggagcagcctgtggtgaatgctgtgattgatgacaccaccaaggaggtggtgtacagagactacatcgacatctctgtggccgtggccaccccccggggcctggtggtgcctgtgatcagaaatgtggaggccatgaactttgctgacattgaaagaaccatcacagagctgggggagaaggccaggaagaatgagctggccatcgaggacatggatggcggcaccttcaccatcagcaatggaggagtgtttggcagcctgtttggcacccccatcatcaaccccccccagagcgccatcctgggcatgcacggcatctttgacaggcctgtggccatcggcggcaaggtggaggtgcggcccatgatgtatgtggccctgacctatgaccaccggctgattgatggccgggaggccgtgaccttcctgaggaagatcaaggctgctgtggaggacccccgggtgctgctgctggacctgtag

SEQ ID NO: 122245 - DNA, 1104 bp, Artificial Sequence
  derived and/or modified sequence
atgacctggctgcagagcaagccccagcggctgcagaacctgagccaacgcgagatgagcgggggcagaaagactagcgtgcaagtgccttctcccgccaacggcgtgatcgaagccttgttggtgcctgacggtggcaaagtggagggaggcactcctctgtttacattgcgtaagactggggctgccccggcaaaagctaagcccgcggaggcgccagctgccgcagcccccaaggccgagccgacagcagctgctgtgccccccccagctgcccccattcccacccagatgcccccagtgccttccccgtcgcaacccccctcggggaagccagttagcgccgtaaagccaaccgtggcgccccccctcgcagagccaggagccggaaagggcctccgaagtgaacacagggaaaaaatgaaccggatgcgtcagcgcatcgcccagcgcctgaaggaggcacagaatacttgtgcaatgctgacaacattcaatgagattgacatgtctaatattcaggagatgcgggcacgacacaaagaggcttttttgaaaaagcacaatttgaagctgggatttatgtcagcgtttgtaaaagccagcgcctttgcccttcaagagcagcctgtggtgaatgcagtgattgacgatacaaccaaagaggtagtttacagagactatattgacattagtgttgccgttgcgaccccaagagggctggttgttccagtcatccgcaacgttgaggccatgaatttcgccgatatcgagcgcaccatcacagaactgggcgagaaggctaggaagaacgagctcgccatagaagacatggatggcgggacatttaccatttccaacgggggcgtctttggatcactgtttggcacccccataatcaatcctccgcagtccgccatcctggggatgcatgggattttcgaccggcctgtggccataggaggaaaagtggaagtcagacccatgatgtacgtagcgttaacatatgaccatagactcattgacgggagggaggctgtgaccttcctgaggaagataaaggccgctgtggaggacccgagggtgctgcttctggatctctag

SEQ ID NO: 122246 - DNA, 1362 bp, Artificial Sequence
  derived and/or modified sequence
atgctgagccggagccggtgcgtgagccgggccttcagccggagcctctccgcattccagaagggcaattgccccctggggcgaaggagcctgccaggggtgtccctctgccagggccccgggtacccaaatagccgcaaagtggtaattaacaattcagtgttttccgttcgtttcttccggacaaccgctgtgtgtaaggatgatcttgtgactgtcaaaacgcccgccttcgccgaatctgtgaccgagggagatgtccgatgggagaaggccgtgggagatactgtcgctgaggacgaagtcgtttgtgagatcgaaacagataagacctcagttcaggtgcccagccccgccaacggggtaatcgaagcactactggtacctgatggcggaaaagtcgagggaggaactccgctttttactctaaggaagactggtgcggcgccagccaaggccaagccagcggaggcacccgcagctgccgctccgaaagctgagcctaccgccgctgccgttccaccacccgcagcccccattccaacccagatgcctcccgttccatccccatcccagccaccttccggaaaacctgtgtctgccgtgaaacctaccgtggcacctccactggccgaacccggggccggtaaaggtctacgcagcgaacatcgagagaagatgaatcgaatgaggcagcgtatagcacagcgattgaaggaagctcaaaatacttgtgcaatgctgacaacattcaatgaaatagacatgtccaacattcaagaaatgagggcccgtcacaaggaggcatttctaaagaagcataacctgaaactcggcttcatgtcggcttttgtgaaggctagcgccttcgcgctgcaggagcagccagtggtgaacgcggttatcgacgacactaccaaagaagtggtctatagagattacattgatatatcggtagccgtggctaccccaaggggactcgtggtgccagtcatcagaaacgttgaggctatgaactttgcggatatcgagaggaccatcactgaactgggagaaaaagcgaggaaaaatgagctggcaatcgaggacatggacgggggtactttcacaatatccaacgggggcgtctttggaagcctcttcggtacccccataataaaccccccccagtctgccattcttggtatgcacggcatattcgaccgcccagtcgctattggaggaaaggtggaggtccgaccaatgatgtacgtggccttgacttatgaccaccgtctgatcgatggacgagaagccgtgacatttttgagaaaaatcaaggccgccgtggaagacccacgcgtactacttttagacctgtag

SEQ ID NO: 122247 - DNA, 1104 bp, Artificial Sequence
  derived and/or modified sequence
atgacatggctgcagtcaaagccacaaagactccaaaacctctctcagagggaaatgagcggaggccgaaagacatccgttcaggtaccaagtccagctaacggcgtaatcgaagcgctgctggtgccagacggcggaaaggtagaaggcggaacccccctgtttactctgaggaaaaccggagccgctccagcaaaggcgaagcccgcagaagcccctgcagccgcagcgccaaaggctgaacccacagctgccgcagtgccccctccagcagcacctatccccacccaaatgccccctgtcccgagccccagtcagcccccatctggaaagcccgtgagcgccgtgaaacccaccgtagcaccccctctcgctgagcctggggctggcaagggcttgcgttccgagcacagggagaagatgaaccgcatgaggcagcggattgcccagcgtcttaaggaggcccagaacacctgcgcaatgctcaccacgtttaacgagattgacatgagtaatattcaagaaatgcgagcgcgacacaaggaagccttcctgaaaaagcacaatctcaagctcggctttatgagcgcattcgtgaaggcgagtgcatttgctttacaagaacagcctgtcgtgaatgcggtgatagacgatactacaaaagaagtcgtttatagggactacattgacatcagcgtggcggtcgccactcctaggggtctggtggtgcctgttatccggaatgtggaggctatgaacttcgccgacatagaacggaccattaccgagcttggcgagaaggcgaggaagaacgaactggcaatagaagatatggatggcggtacttttacaattagtaacggaggagttttcgggtccctcttcgggactcctataatcaacccccctcaaagcgccatactgggcatgcacgggatcttcgaccggcctgtagccattggcggaaaggtcgaggtgcgcccaatgatgtacgtggctttgacttatgaccaccgccttatcgacggcagggaagccgtgacttttctgagaaagatcaaagccgctgtcgaagatcccagagtgctgctgttggatctatag

SEQ ID NO: 122248 - DNA, 1362 bp, Artificial Sequence
  derived and/or modified sequence
atgctgagtcgctcacggtgcgtctctagagccttctcacgcagtctgagtgccttccagaagggcaactgccctctgggtagacgttcactgccaggggtgtcactctgtcaggggcctgggtatcctaacagtcgtaaggtggtgatcaacaacagtgtattctctgtgaggttctttcggacaaccgcagtgtgtaaggatgacctggtgacagttaagacgcccgcatttgccgaatcagtcactgaaggcgacgttcgatgggaaaaagctgtaggtgacacagtcgctgaggacgaggtggtatgcgagattgaaaccgataagacctcagtacaggtacctagtcctgccaatggtgttattgaggctctcctggttcccgatggcggaaaggtggaaggcggaacaccgctgtttaccctaagaaagaccggagccgctcctgccaaggcaaagcccgcagaggccccagcggcagcagcaccgaaagcagagcccaccgcggctgcggtgcctcctccagctgcccctatccctacacagatgcctcctgtaccttctccgtctcagcctcctagcggcaagcctgtgtctgcagtgaagcccaccgtcgcaccaccactcgccgaacccggtgcagggaaaggcctgagaagcgagcaccgcgaaaaaatgaataggatgcggcagcgcattgcgcagagactaaaggaggcccagaatacctgtgcaatgctgacgactttcaacgagattgacatgtccaacatacaggagatgagggcaagacataaagaggcgtttctgaagaaacataacctgaaattaggtttcatgagtgctttcgttaaagcctccgccttcgccctccaagaacaacccgttgtgaacgcagttatcgatgatacaaccaaggaagtcgtctatagggactatatcgatatttcagtggctgtcgcaacccccagaggactggtggtgcccgtgataaggaacgttgaagcaatgaatttcgccgatattgagagaacaatcactgaactcggtgaaaaagcgcgaaagaacgagctggccatagaagacatggatggagggacctttaccatctctaacggcggagtgttcggaagcctgttcggcactcccatcataaaccctccccagagcgcgatcctcggcatgcatgggattttcgatagacctgtggccattggcggaaaggttgaagtgcgcccaatgatgtatgttgctctcacttacgatcacagattaattgacggacgagaggcagttacctttctgaggaagatcaaggctgcagtggaggaccccagggtgctgctgctcgatctgtag

SEQ ID NO: 122249 - DNA, 1104 bp, Artificial Sequence
  derived and/or modified sequence
atgacctggctgcagagcaagccccagagactgcagaacctgagccagagagagatgagcggcggcagaaagaccagcgtgcaggtgcccagccccgccaacggcgtgatcgaggccctgctggtgcccgacggcggcaaggtggagggcggcacccccctgttcaccctgagaaagaccggcgccgcccccgccaaggccaagcccgccgaggcccccgccgccgccgcccccaaggccgagcccaccgccgccgccgtgcccccccccgccgcccccatccccacccagatgccccccgtgcccagccccagccagccccccagcggcaagcccgtgagcgccgtgaagcccaccgtggccccccccctggccgagcccggcgccggcaagggcctgagaagcgagcacagagagaagatgaacagaatgagacagagaatcgcccagagactgaaggaggcccagaacacctgcgccatgctgaccaccttcaacgagatcgacatgagcaacatccaggagatgagagccagacacaaggaggccttcctgaagaagcacaacctgaagctgggcttcatgagcgccttcgtgaaggccagcgccttcgccctgcaggagcagcccgtggtgaacgccgtgatcgacgacaccaccaaggaggtggtgtacagagactacatcgacatcagcgtggccgtggccacccccagaggcctggtggtgcccgtgatcagaaacgtggaggccatgaacttcgccgacatcgagagaaccatcaccgagctgggcgagaaggccagaaagaacgagctggccatcgaggacatggacggcggcaccttcaccatcagcaacggcggcgtgttcggcagcctgttcggcacccccatcatcaaccccccccagagcgccatcctgggcatgcacggcatcttcgacagacccgtggccatcggcggcaaggtggaggtgagacccatgatgtacgtggccctgacctacgaccacagactgatcgacggcagagaggccgtgaccttcctgagaaagatcaaggccgccgtggaggaccccagagtgctgctgctggacctgtag

SEQ ID NO: 122250 - DNA, 1362 bp, Artificial Sequence
  derived and/or modified sequence
atgctgagcagaagcagatgcgtgagcagagccttcagcagaagcctgagcgccttccagaagggcaactgccccctgggcagaagaagcctgcccggcgtgagcctgtgccagggccccggctaccccaacagcagaaaggtggtgatcaacaacagcgtgttcagcgtgagattcttcagaaccaccgccgtgtgcaaggacgacctggtgaccgtgaagacccccgccttcgccgagagcgtgaccgagggcgacgtgagatgggagaaggccgtgggcgacaccgtggccgaggacgaggtggtgtgcgagatcgagaccgacaagaccagcgtgcaggtgcccagccccgccaacggcgtgatcgaggccctgctggtgcccgacggcggcaaggtggagggcggcacccccctgttcaccctgagaaagaccggcgccgcccccgccaaggccaagcccgccgaggcccccgccgccgccgcccccaaggccgagcccaccgccgccgccgtgcccccccccgccgcccccatccccacccagatgccccccgtgcccagccccagccagccccccagcggcaagcccgtgagcgccgtgaagcccaccgtggccccccccctggccgagcccggcgccggcaagggcctgagaagcgagcacagagagaagatgaacagaatgagacagagaatcgcccagagactgaaggaggcccagaacacctgcgccatgctgaccaccttcaacgagatcgacatgagcaacatccaggagatgagagccagacacaaggaggccttcctgaagaagcacaacctgaagctgggcttcatgagcgccttcgtgaaggccagcgccttcgccctgcaggagcagcccgtggtgaacgccgtgatcgacgacaccaccaaggaggtggtgtacagagactacatcgacatcagcgtggccgtggccacccccagaggcctggtggtgcccgtgatcagaaacgtggaggccatgaacttcgccgacatcgagagaaccatcaccgagctgggcgagaaggccagaaagaacgagctggccatcgaggacatggacggcggcaccttcaccatcagcaacggcggcgtgttcggcagcctgttcggcacccccatcatcaaccccccccagagcgccatcctgggcatgcacggcatcttcgacagacccgtggccatcggcggcaaggtggaggtgagacccatgatgtacgtggccctgacctacgaccacagactgatcgacggcagagaggccgtgaccttcctgagaaagatcaaggccgccgtggaggaccccagagtgctgctgctggacctgtag

SEQ ID NO: 122251 - DNA, 1479 bp, Artificial Sequence
  derived and/or modified sequence
tatatccggtgtccgcccgccctcggctcctccgccgtgatgctgtcccgatcccgctgtgtgtctcgggcgttcagccgctcgctctccgccttccagaaggggtctccttatgccagggaccaggttaccctaacagcaggaaggttgtaggatgacttggttacagtcaaaaccccagcgtttgcagaatctgtcacagagggagatgtcaggtgggagaaagacatctgtgcaggttccatcaccagcaaatggcgtgattgaagctcttttggtacctgatgggggaaaagtcgaaggaggcactccacttttcacactcaggaaaactggtgctgctcctgctaaggccaagccggctgaagctcctgctgctgcagccccaaaagcagaacctacagcagcggcagttcctccccctgcagcacccatacccactcagatgccaccggtgccctcgccctcacagcctccttctggcaaacctgtgtctgcagtaaaacccactgttgccccaccactagctgagccaggagctggcaaaggtctgcgttcagaacatcgggagaaaatgaacaggatgcggcagcgcattgctcagcgtctgaaggaggcccagaatacatgtgcaatgctgacaacttttaatgagattgacatgagtaacatccaggagatgagggctcggcacaaagaggcttttttgaagaaacataacctcaaactaggcttcatgtcggcatttgtgaaggcctcagcctttgccttgcaggaacagcctgttgtaaatgcagtgattgacgacacaaccaaagaggtggtgtatagggattatattgacatcagtgttgcagtggccaccccacggggtctggtggttccagtcatcaggaatgtggaagctatgaattttgcagatattgaacggaccatcactgaactgggagagaaggcccgaaagaatgaacttgccattgaagatatggatggcggtaccttcaccattagcaatggaggcgtttttggctcgctctttggaacacccattatcaacccccctcagtctgccatcctggggatgcatggcatctttgacaggccagtggctataggaggcaaggtagaggtgcggcccatgatgtacgtggcactgacctatgatcaccggctgattgatggcagagaggctgtgactttcctccgcaaaatcaaggcagcggtagaggatcccagagtcctcctcctggatctttaggaggaacccacacaccctacaagttgatcatgcaggaactgaaaaccagtcttctccctgtcccctcatgggtcccgggttagcctggtgacaggcagacacatgctgttggcctcaagcaaggaagcagagcactgtgtaaccagcagtcacaggtcttttcttggcgttcctgccaggctctccctctctgcacctgtctcatagcctcgaatatctta

SEQ ID NO: 122252 - DNA, 2838 bp, Artificial Sequence
  derived and/or modified sequence
acttccggttgttgtccggccctatatccggtgtccgcccgccctcggctcctccgccgtgatgctgtcccgatcccgctgtgtgtctcgggcgttcagccgctcgctctccgccttccagaaggggaactgccctctagggagacgttccctgcctggggtctccttatgccagggaccaggttaccctaacagcaggaaggttgtcattaacaacagtgtcttcagtgttcgctttttcagaactacagctgtatgcaaggatgacttggttacagtcaaaaccccagcgtttgcagaatctgtcacagagggagatgtcaggtgggagaaagctgttggagacacagttgcagaagatgaagtggtttgtgagattgaaactgacaagacatctgtgcaggttccatcaccagcaaatggcgtgattgaagctcttttggtacctgatgggggaaaagtcgaaggaggcactccacttttcacactcaggaaaactggtgctgctcctgctaaggccaagccggctgaagctcctgctgctgcagccccaaaagcagaacctacagcagcggcagttcctccccctgcagcacccatacccactcagatgccaccggtgccctcgccctcacagcctccttctggcaaacctgtgtctgcagtaaaacccactgttgccccaccactagctgagccaggagctggcaaaggtctgcgttcagaacatcgggagaaaatgaacaggatgcggcagcgcattgctcagcgtctgaaggaggcccagaatacatgtgcaatgctgacaacttttaatgagattgacatgagtaacatccaggagatgagggctcggcacaaagaggcttttttgaagaaacataacctcaaactaggcttcatgtcggcatttgtgaaggcctcagcctttgccttgcaggaacagcctgttgtaaatgcagtgattgacgacacaaccaaagaggtggtgtatagggattatattgacatcagtgttgcagtggccaccccacggggtctggtggttccagtcatcaggaatgtggaagctatgaattttgcagatattgaacggaccatcactgaactgggagagaaggcccgaaagaatgaacttgccattgaagatatggatggcggtaccttcaccattagcaatggaggcgtttttggctcgctctttggaacacccattatcaacccccctcagtctgccatcctggggatgcatggcatctttgacaggccagtggctataggaggcaaggtagaggtgcggcccatgatgtacgtggcactgacctatgatcaccggctgattgatggcagagaggctgtgactttcctccgcaaaatcaaggcagcggtagaggatcccagagtcctcctcctggatctttaggaggaacccacacaccctacaagttgatcatgcaggaactgaaaaccagtcttctccctgtcccctcatgggtcccgggttagcctggtgacaggcagacacatgctgttggcctcaagcaaggaagcagagcactgtgtaaccagcagtcacaggtcttttcttggcgttcctgccaggctctccctctctgcacctgtctcatagcctcgaatatcttaattccttaggcttaagagagagagccttaatggatgctcattcatattcctgcctttcttccatcagctctctgcaaagatgattttgcttttccctagtgctggtatactatagagaaacccctggggaccatgtgattaagttcctatcttttgaaagtttgttctgcagagacttctaggaggatgctgtgcctcccaagctcagagcagcctctgtcctggctgtgcacattctcccttgattccacttgtgtggagggattgaacacaggcaaagaggtgctgctttgcttcttcaatggcaccttcattctccgttgtcattgacttcaagatgcctcttctacctcttccaggaagcacaggccaggggatctgggtgtgtgagtgggaggagagggcagaggtcccctgaggtcatgcattgtaatcatcatagaaggagagcccaggcctgccctcacgctctccatcataggctgacaccaagaagactcgtcttggcacaatctcacacagctggggctgtagcaaccctttccaacccctttgctggttgctgggcctcattctagcaccttgttcttagagcagattctagcacatcatggcagtgggaccaagcgtggtcccgaggaagggccagagcctggtagagactagggaagggaggtctcctctagactgactcacattgccttgagcttttcagttaagttgctgtaagcacctgggctgaggaggcagtttttgttccttcctgcgttatagcggggccttgtctcttcctctgcaggacacagatctggaggacgtggactggggtaggaaaccaccctgagggtgttagtacctagtggtgaaacggatgaggtcatttctaaggtgtgttgcccgtggatctgggcacaatcattggaattccttggagccactgggattcatggctttgtatccaactgcatccaggcctgaggctgctgacgtttgacaccagggccagtagagagtgcccttttgtatcttaagccaagaagtgaggcctgggggtgggggaggggggaaggggtgggagccaatactgagtgcctgcagcatctactactctgtcttcactattcagaacttgtaactaaagtatttaaagaaactgattttaaatgcaaattaaagggcagatattctcaaaca

SEQ ID NO: 122253 - protein, 766 aa, Artificial Sequence
  derived and/or modified sequence
MKTPWKVLLGLLGAAALVTIITVPVVLLNKGTDDATADSRKTYTLTDYLKNTYRLKLYSLRWISDHEYLYKQENNILVFNAEYGNSSVFLENSTFDEFGHSINDYSISPDGQFILLEYNYVKQWRHSYTASYDIYDLNKRQLITEERIPNNTQWVTWSPVGHKLAYVWNNDIYVKIEPNLPSYRITWTGKEDIIYNGITDWVYEEEVFSAYSALWWSPNGTFLAYAQFNDTEVPLIEYSFYSDESLQYPKTVRVPYPKAGAVNPTVKFFVVNTDSLSSVTNATSIQITAPASMLIGDHYLCDVTWATQERISLQWLRRIQNYSVMDICDYDESSGRWNCLVARQHIEMSTTGWVGRFRPSEPHFTLDGNSFYKIISNEEGYRHICYFQIDKKDCTFITKGTWEVIGIEALTSDYLYYISNEYKGMPGGRNLYKIQLSDYTKVTCLSCELNPERCQYYSVSFSKEAKYYQLRCSGPGLPLYTLHSSVNDKGLRVLEDNSALDKMLQNVQMPSKKLDFIILNETKFWYQMILPPHFDKSKKYPLLLDVYAGPCSQKADTVFRLNWATYLASTENIIVASFDGRGSGYQGDKIMHAINRRLGTFEVEDQIEAARQFSKMGFVDNKRIAIWGWSYGGYVTSMVLGSGSGVFKCGIAVAPVSRWEYYDSVYTERYMGLPTPEDNLDHYRNSTVMSRAENFKQVEYLLIHGTADDNVHFQQSAQISKALVDVGVDFQAMWYTDEDHGIASSTAHQHIYTHMSHFIKQCFSLP

SEQ ID NO: 122254 - DNA, 2301 bp, Artificial Sequence
  derived and/or modified sequence
atgaagaccccctggaaggtgctgctgggcctgctgggcgccgccgccctggtgaccatcatcaccgtgcccgtggtgctgctgaacaagggcaccgacgacgccaccgccgacagcagaaagacctacaccctgaccgactacctgaagaacacctacagactgaagctgtacagcctgagatggatcagcgaccacgagtacctgtacaagcaggagaacaacatcctggtgttcaacgccgagtacggcaacagcagcgtgttcctggagaacagcaccttcgacgagttcggccacagcatcaacgactacagcatcagccccgacggccagttcatcctgctggagtacaactacgtgaagcagtggagacacagctacaccgccagctacgacatctacgacctgaacaagagacagctgatcaccgaggagagaatccccaacaacacccagtgggtgacctggagccccgtgggccacaagctggcctacgtgtggaacaacgacatctacgtgaagatcgagcccaacctgcccagctacagaatcacctggaccggcaaggaggacatcatctacaacggcatcaccgactgggtgtacgaggaggaggtgttcagcgcctacagcgccctgtggtggagccccaacggcaccttcctggcctacgcccagttcaacgacaccgaggtgcccctgatcgagtacagcttctacagcgacgagagcctgcagtaccccaagaccgtgagagtgccctaccccaaggccggcgccgtgaaccccaccgtgaagttcttcgtggtgaacaccgacagcctgagcagcgtgaccaacgccaccagcatccagatcaccgcccccgccagcatgctgatcggcgaccactacctgtgcgacgtgacctgggccacccaggagagaatcagcctgcagtggctgagaagaatccagaactacagcgtgatggacatctgcgactacgacgagagcagcggcagatggaactgcctggtggccagacagcacatcgagatgagcaccaccggctgggtgggcagattcagacccagcgagccccacttcaccctggacggcaacagcttctacaagatcatcagcaacgaggagggctacagacacatctgctacttccagatcgacaagaaggactgcaccttcatcaccaagggcacctgggaggtgatcggcatcgaggccctgaccagcgactacctgtactacatcagcaacgagtacaagggcatgcccggcggcagaaacctgtacaagatccagctgagcgactacaccaaggtgacctgcctgagctgcgagctgaaccccgagagatgccagtactacagcgtgagcttcagcaaggaggccaagtactaccagctgagatgcagcggccccggcctgcccctgtacaccctgcacagcagcgtgaacgacaagggcctgagagtgctggaggacaacagcgccctggacaagatgctgcagaacgtgcagatgcccagcaagaagctggacttcatcatcctgaacgagaccaagttctggtaccagatgatcctgcccccccacttcgacaagagcaagaagtaccccctgctgctggacgtgtacgccggcccctgcagccagaaggccgacaccgtgttcagactgaactgggccacctacctggccagcaccgagaacatcatcgtggccagcttcgacggcagaggcagcggctaccagggcgacaagatcatgcacgccatcaacagaagactgggcaccttcgaggtggaggaccagatcgaggccgccagacagttcagcaagatgggcttcgtggacaacaagagaatcgccatctggggctggagctacggcggctacgtgaccagcatggtgctgggcagcggcagcggcgtgttcaagtgcggcatcgccgtggcccccgtgagcagatgggagtactacgacagcgtgtacaccgagagatacatgggcctgcccacccccgaggacaacctggaccactacagaaacagcaccgtgatgagcagagccgagaacttcaagcaggtggagtacctgctgatccacggcaccgccgacgacaacgtgcacttccagcagagcgcccagatcagcaaggccctggtggacgtgggcgtggacttccaggccatgtggtacaccgacgaggaccacggcatcgccagcagcaccgcccaccagcacatctacacccacatgagccacttcatcaagcagtgcttcagcctgccctag

SEQ ID NO: 122255 - DNA, 3904 bp, Artificial Sequence
  derived and/or modified sequence
ctttcactggcaagagacggagtcctgggtttcagttccagttgcctgcggtgggctgtgtgagtttgccaaagtcccctgccctctctgggtctcggttccctcgcctgtccacgtgaggttggaggagctgaacgccgacgtcatttttagctaagagggagcagggtccccgagtcgccggcccagggtctgcgcatccgaggccgcgcgccctttcccctcccccacggctcctccgggccccgcactctgcgccccggctgccgcccagcgccctacaccgccctcagggggccctcgcgggctccccccggccgggatgccagtgccccgcgccacgcgcgcctgctcccgcgccgcctgccctgcagcctgcccgcggcgcctttatacccagcgggctcggcgctcactaatgtttaactcggggccgaaacttgccagcggcgagtgactccaccgcccggagcagcggtgcaggacgcgcgtctccgccgcccgcggtgacttctgcctgcgctccttctctgaacgctcacttccgaggagacgccgacgatgaagacaccgtggaaggttcttctgggactgctgggtgctgctgcgcttgtcaccatcatcaccgtgcccgtggttctgctgaacaaaggcacagatgatgctacagctgacagtcgcaaaacttacactctaactgattacttaaaaaatacttatagactgaagttatactccttaagatggatttcagatcatgaatatctctacaaacaagaaaataatatcttggtattcaatgctgaatatggaaacagctcagttttcttggagaacagtacatttgatgagtttggacattctatcaatgattattcaatatctcctgatgggcagtttattctcttagaatacaactacgtgaagcaatggaggcattcctacacagcttcatatgacatttatgatttaaataaaaggcagctgattacagaagagaggattccaaacaacacacagtgggtcacatggtcaccagtgggtcataaattggcatatgtttggaacaatgacatttatgttaaaattgaaccaaatttaccaagttacagaatcacatggacggggaaagaagatataatatataatggaataactgactgggtttatgaagaggaagtcttcagtgcctactctgctctgtggtggtctccaaacggcacttttttagcatatgcccaatttaacgacacagaagtcccacttattgaatactccttctactctgatgagtcactgcagtacccaaagactgtacgggttccatatccaaaggcaggagctgtgaatccaactgtaaagttctttgttgtaaatacagactctctcagctcagtcaccaatgcaacttccatacaaatcactgctcctgcttctatgttgataggggatcactacttgtgtgatgtgacatgggcaacacaagaaagaatttctttgcagtggctcaggaggattcagaactattcggtcatggatatttgtgactatgatgaatccagtggaagatggaactgcttagtggcacggcaacacattgaaatgagtactactggctgggttggaagatttaggccttcagaacctcattttacccttgatggtaatagcttctacaagatcatcagcaatgaagaaggttacagacacatttgctatttccaaatagataaaaaagactgcacatttattacaaaaggcacctgggaagtcatcgggatagaagctctaaccagtgattatctatactacattagtaatgaatataaaggaatgccaggaggaaggaatctttataaaatccaacttagtgactatacaaaagtgacatgcctcagttgtgagctgaatccggaaaggtgtcagtactattctgtgtcattcagtaaagaggcgaagtattatcagctgagatgttccggtcctggtctgcccctctatactctacacagcagcgtgaatgataaagggctgagagtcctggaagacaattcagctttggataaaatgctgcagaatgtccagatgccctccaaaaaactggacttcattattttgaatgaaacaaaattttggtatcagatgatcttgcctcctcattttgataaatccaagaaatatcctctactattagatgtgtatgcaggcccatgtagtcaaaaagcagacactgtcttcagactgaactgggccacttaccttgcaagcacagaaaacattatagtagctagctttgatggcagaggaagtggttaccaaggagataagatcatgcatgcaatcaacagaagactgggaacatttgaagttgaagatcaaattgaagcagccagacaattttcaaaaatgggatttgtggacaacaaacgaattgcaatttggggctggtcatatggagggtacgtaacctcaatggtcctgggatcgggaagtggcgtgttcaagtgtggaatagccgtggcgcctgtatcccggtgggagtactatgactcagtgtacacagaacgttacatgggtctcccaactccagaagacaaccttgaccattacagaaattcaacagtcatgagcagagctgaaaattttaaacaagttgagtacctccttattcatggaacagcagatgataacgttcactttcagcagtcagctcagatctccaaagccctggtcgatgttggagtggatttccaggcaatgtggtatactgatgaagaccatggaatagctagcagcacagcacaccaacatatatatacccacatgagccacttcataaaacaatgtttctctttaccttagcacctcaaaataccatgccatttaaagcttattaaaactcatttttgttttcattatctcaaaactgcactgtcaagatgatgatgatctttaaaatacacactcaaatcaagaaacttaaggttacctttgttcccaaatttcatacctatcatcttaagtagggacttctgtcttcacaacagattattaccttacagaagtttgaattatccggtcgggttttattgtttaaaatcatttctgcatcagctgctgaaacaacaaataggaattgtttttatggaggctttgcatagattccctgagcaggattttaatctttttctaactggactggttcaaatgttgttctcttctttaaagggatggcaagatgtgggcagtgatgtcactagggcagggacaggataagagggattagggagagaagatagcagggcatggctgggaacccaagtccaagcataccaacacgagcaggctactgtcagctcccctcggagaagagctgttcacagccagactggcacagttttctgagaaagactattcaaacagtctcaggaaatcaaatatgcaaagcactgacttctaagtaaaaccacagcagttgaaaagactccaaagaaatgtaagggaaactgccagcaacgcaggcccccaggtgccagttatggctataggtgctacaaaaacacagcaagggtgatgggaaagcattgtaaatgtgcttttaaaaaaaaatactgatgttcctagtgaaagaggcagcttgaaactgagatgtgaacacatcagcttgccctgttaaaagatgaaaatatttgtatcacaaatcttaacttgaaggagtccttgcatcaatttttcttatttcatttctttgagtgtcttaattaaaagaatattttaacttccttggactcattttaaaaaatggaacataaaatacaatgttatgtattattattcccattctacatactatggaatttctcccagtcatttaataaatgtgccttcattttttcagaagtaa

SEQ ID NO: 122256 - DNA, 2301 bp, Artificial Sequence
  derived and/or modified sequence
atgaaaaccccttggaaggttcttctcgggctactcggtgcagccgccttggtgacaatcatcaccgtgcctgtggttctgctgaataaaggtaccgatgacgccacagcagacagcaggaaaacatacacactgacagattatctcaagaatacctacaggctgaaactgtattctcttcgttggatatccgaccatgagtatctttataaacaagaaaacaacatcctggtattcaatgccgaatatgggaattcatccgtctttttggaaaactcaactttcgatgaattcggacattctatcaacgactactccatttctccggatggccagttcattctgctggaatataattatgtcaaacagtggagacacagctacaccgctagctatgatatctacgatctgaacaagcggcagttgataaccgaggagagaatcccaaataatacgcaatgggtgacatggtcccctgtaggacacaagttggcctatgtgtggaataatgacatctatgttaaaatcgaacctaacctgccaagttacaggatcacttggacaggaaaggaggacatcatctataatggaataactgactgggtctacgaagaagaagtgtttagtgcttattccgccctttggtggtcaccaaatgggacatttcttgcctacgctcagttcaatgacacagaggtgcctctgatagagtacagcttctactctgacgaatcacttcagtatcctaagaccgtgcgcgttccatatccaaaagcgggagcagttaatccaaccgtgaagtttttcgtcgtcaacaccgatagtctgagttcggtcacaaacgccactagcatacagatcactgctcctgcttccatgcttattggcgatcactatctgtgtgacgtaacttgggcaacgcaggagcggatcagccttcagtggttgagacgtattcagaattactcagtcatggacatttgtgactacgatgagtctagcggaagatggaactgtctagtggcacggcagcacattgagatgagtactacaggctgggtcggcaggtttcgcccgagcgagcctcacttcaccctggacgggaactctttttacaagataatctctaacgaggagggatatcgtcacatctgttatttccagatcgacaagaaagattgcacatttattacgaagggaacttgggaggtcatcggtatcgaggctctgactagcgattatctctattatatatctaacgaatataagggcatgccgggaggtcgaaatctgtacaaaatccagctgagcgactatactaaagtcacttgtttatcttgcgagctcaatccagaacgatgtcagtactatagcgtgtcctttagtaaggaggcgaaatattaccagttgcgctgctccgggccaggcctccccttatacacactgcacagcagcgtgaatgacaaaggactgcgcgttctcgaagacaattctgctctggacaaaatgttgcagaacgtgcagatgccatcaaaaaaactggacttcatcattctcaatgaaactaagttttggtatcagatgatactccccccccattttgacaagagtaaaaaatacccactcttgctggacgtttacgctgggccctgttcccagaaggccgacacagtgtttcggctcaattgggcaacgtaccttgcctctactgagaatatcatcgtcgcatcctttgacgggcgcggatccggatatcagggagacaagattatgcacgccatcaatcgtaggctcggcactttcgaggtcgaagatcagattgaggcagccagacagttcagtaagatgggattcgtggacaataaacgcatagcaatatggggttggagttatggcggctacgtgacttccatggtcctggggtctggaagcggcgtctttaaatgcggcattgctgtggcacctgtctcccgatgggagtattatgactcagtgtacaccgagcgatacatgggcctgccaacgccagaagacaatttggaccactaccgcaacagcacagtcatgtctagggccgagaattttaaacaggtggagtatctccttatacacggtaccgcggatgacaacgttcacttccaacagtcagcgcagatttccaaggcccttgtggacgtcggcgtggatttccaagcaatgtggtacacagatgaggaccatggtatcgcctcatcaaccgcgcaccagcatatatacacccacatgtctcatttcatcaagcagtgtttcagtttgccgtag

SEQ ID NO: 122257 - DNA, 2301 bp, Artificial Sequence
  derived and/or modified sequence
atgaagaccccctggaaggtgctgctgggcctgctgggcgctgctgccctggtgaccatcatcaccgtgcctgtggtgctgctgaacaagggcacagatgatgccacagctgacagcaggaagacctacaccctgacagactacctgaagaacacctaccgcctgaagctgtacagcctgcgctggatcagtgaccacgagtacctgtacaagcaggagaacaacatcctggtgttcaatgcagaatatggcaacagctctgtgttcctggagaacagcacctttgatgaatttggccacagcatcaatgactacagcatcagcccagatggccagttcatcctgctggagtacaactacgtgaagcagtggaggcacagctacacagccagctatgacatctatgacctgaacaagaggcagctgatcacagaggagcgcatccccaacaacacccagtgggtgacctggagccctgtgggccacaagctggcctacgtgtggaacaatgacatctacgtgaagattgagcccaacctgcccagctaccgcatcacctggacaggcaaggaggacatcatctacaacggcatcacagactgggtgtatgaggaggaggtgttttctgcctacagcgccctgtggtggagccccaacggcaccttcctggcctatgcccagttcaatgacacagaggtgcccctcatcgagtacagcttctacagtgatgagagcctgcagtaccccaagacagtgcgggtgccctaccccaaggccggggctgtgaaccccaccgtgaagttctttgtggtgaacacagacagcctgagctctgtgaccaatgccaccagcatccagatcacagccccagcctccatgctgattggagaccactacctgtgtgatgtgacctgggccacccaggagcgcatcagcctgcagtggctgcggcgcatccagaactacagcgtgatggacatctgtgactatgatgagagcagcggccgctggaactgcctggtggcccggcagcacatcgagatgagcaccaccggctgggtgggccgcttccggcccagcgagccccacttcaccctggatggcaacagcttctacaagatcatcagcaatgaggagggctaccgccacatctgctacttccagattgacaagaaggactgcaccttcatcaccaagggcacctgggaggtgattggaattgaggccctgaccagtgactacctgtactacatcagcaatgagtacaagggcatgcctgggggcaggaacctgtacaagatccagctgagtgactacaccaaggtgacctgcctgagctgtgagctgaaccctgagcgctgccagtactacagcgtgtccttcagcaaggaggccaagtactaccagctgcgctgcagcggccctggcctgcccctgtacaccctgcacagctctgtgaatgacaagggcctgcgggtgctggaggacaacagcgccctggacaagatgctgcagaatgtgcagatgcccagcaagaagctggacttcatcatcctgaatgagaccaagttctggtaccagatgatcctgcccccccactttgacaagagcaagaagtaccccctgctgctggatgtgtatgccggcccctgcagccagaaggctgacacagtgttccggctgaactgggccacctacctggccagcacagagaacatcatcgtggccagctttgatggccggggcagcggctaccagggcgacaagatcatgcacgccatcaacagaaggctgggcacctttgaggtggaggaccagattgaagctgcccggcagttcagcaagatgggctttgtggacaacaagagaattgccatctggggctggagctatggaggctacgtgacctccatggtgctgggcagcggcagcggggtcttcaagtgtggcattgctgtggcccctgtgagccgctgggagtactatgacagcgtgtacacagagcgctacatgggcctgcccaccccagaggacaacctggaccactacagaaacagcacagtgatgagcagagctgagaacttcaagcaggtggagtacctgctgatccacggcacagcagatgacaacgtgcacttccagcagagcgcccagatcagcaaggccctggtggatgtgggcgtggacttccaggccatgtggtacacagatgaggaccacggcatcgccagcagcacagcccaccagcacatctacacccacatgagccacttcatcaagcagtgcttcagcctgccctag

SEQ ID NO: 122258 - DNA, 2301 bp, Artificial Sequence
  derived and/or modified sequence
atgaagaccccctggaaggtgctgctgggcctgctgggcgccgccgctctcgtgaccatcataaccgttcccgttgtcttgcttaacaaagggacagacgatgccacagccgatagtcgcaaaacttacaccctgaccgactacctcaagaacacctatagactgaagttgtacagcctccgctggatatcagatcatgaatacctgtacaagcaggaaaacaatattcttgtgttcaacgctgaatatggcaattcctccgttttcctggagaacagtaccttcgatgaattcggacattctattaacgattactcaatatcccctgacggacagtttatcctcctagaatacaactatgttaagcagtggcggcactcctacactgcatcatacgacatttatgatctgaacaagagacagttaataaccgaggaacgaattcccaacaatacacagtgggttacttggtcgcccgtcggccacaaactcgcgtacgtttggaacaacgacatatatgtgaagatcgagccgaatcttcctagttatcgaatcacttggaccggtaaggaagatatcatctacaatggaatcacagattgggtgtacgaagaagaggtgttcagcgcatactctgccctttggtggagtcccaatggcacctttttggcttacgctcagttcaacgacaccgaagtgccattgattgagtacagtttctattcggatgaatctctacagtaccccaagaccgtaagagtcccatatccgaaagctggagcagtcaacccgacagtaaaatttttcgtggtcaatactgattccctatcgtcggtcaccaacgccacatcaatccaaatcaccgcacccgcttcaatgctgatcggggatcactatctctgtgacgttacctgggctacccaggagaggatttctctacaatggctccgacggatacagaactatagtgtcatggatatctgcgattacgatgagagttccggcagatggaactgtctggtcgcacggcagcacatcgaaatgtccactacaggatgggttggacggtttcgtccttctgagccccatttcacactggatggaaacagtttttacaaaattatatcaaacgaagagggctatcgacatatttgctacttccaaattgataaaaaggactgtactttcattacaaaaggcacctgggaagtaattgggattgaggcactgacttctgactatctgtattacatttccaatgaatacaaagggatgccgggcggacgcaacctgtacaaaatccagttgtccgattacacgaaggtgacgtgcctgtcctgtgaacttaatcccgaacgctgccagtattatagtgtcagttttagcaaagaggccaagtattaccaactccgctgcagcggacccggtcttcctctttacacgctgcattcctccgttaatgacaagggcctccgggtgctcgaggataactccgcattagataagatgctacagaatgtgcaaatgccctccaagaagttggactttatcattctgaatgagacaaaattctggtatcagatgattctgccccctcatttcgataagtctaaaaagtatccgttgttacttgatgtgtatgccggcccctgcagtcaaaaagccgacacagttttcaggctaaactgggccacctacctggcaagtaccgaaaatattatcgttgcctccttcgacggaagagggtccggctaccagggggacaagattatgcacgccattaatagaagattgggcaccttcgaagtcgaagatcagatcgaagctgcccgccagttttctaagatgggattcgtagacaataagaggattgctatctggggctggtcatatggcggctatgtgaccagtatggtcctgggatctggcagcggtgtatttaaatgtggcatcgccgtggcccctgtctcccgatgggaatattacgattctgtctatactgaacgttatatgggccttccaactccagaagacaatctggatcattatcgtaacagtaccgtaatgtcaagggctgaaaattttaagcaggttgagtacctgctgattcatgggaccgcagatgataacgtacacttccagcagtcagcccaaatctctaaggccctcgttgatgttggcgtggattttcaggctatgtggtacactgatgaagaccacgggattgcgtccagcacagcccatcagcatatctatacgcacatgtctcattttattaaacaatgcttcagtctgccatag

SEQ ID NO: 122259 - DNA, 2301 bp, Artificial Sequence
  derived and/or modified sequence
atgaagaccccatggaaggtgctcctggggctgctgggcgctgcggctttggtgactatcattactgtccctgtggtactccttaacaagggaacagatgatgctacagctgactctcgcaagacatatacgctgactgactacttgaagaatacatacaggctgaagctttattctctacgatggattagtgaccacgaatatctctataagcaagagaataatatcctagtgtttaatgcagaatatggcaatagtagtgtcttcctggaaaacagtacatttgacgaattcggacacagcatcaacgattactcaatatcccccgatggccaatttatcttgctcgaatacaactacgttaagcagtggcgacatagctacactgcatcgtacgacatctatgatttaaataagcgacagctgataacagaagaacggatacccaataacacccagtgggtcacctggtctccagtgggccataaactggcttacgtctggaataacgatatctacgtgaagatcgagcctaatctgcctagttatagaattacctggacaggaaaagaagacatcatctacaatgggatcaccgattgggtgtacgaagaggaggtgttcagcgcatattcagctttgtggtggtcaccgaacgggacatttctggcttatgctcaattcaatgacacagaggttccgttgattgaatactcattttacagtgatgaatctctgcagtacccgaagacagtgcgtgtcccctatcctaaggctggcgctgtaaacccgaccgtaaaattcttcgtcgtcaacacagattctctgtcatcagtaactaatgctacttccatccagatcacagcgccagcttccatgttaattggcgatcactatctttgtgatgttacttgggccactcaagagcgcatctctctccagtggctgaggcggattcagaactatagtgttatggatatctgtgattatgacgagagttccggcaggtggaactgcctggtggccagacagcacattgagatgagcacaacgggttgggtaggacgatttaggccctcggagcctcacttcaccttagacggcaactcattttacaagattatatccaatgaggagggttaccgacacatttgctattttcagatagacaagaaggactgcacttttatcacgaagggaacatgggaggttataggcattgaggccctgacttctgattacctgtattacatttcaaatgagtataaaggcatgccaggcggaagaaatttatataaaattcagctgtccgattacaccaaagtcacttgtttgtcatgtgagctcaacccagaacggtgccagtattactccgtcagcttcagtaaagaggcaaagtattaccagctgcgctgctccggcccagggctcccactttacaccctgcatagtagtgtcaatgacaagggactcagagtgcttgaggacaacagcgccctcgataagatgttgcaaaacgtacagatgccatctaagaagctcgactttataatcctgaatgagaccaaattctggtaccaaatgatcctgcccccacatttcgataaaagcaagaagtaccctctgctgctcgacgtgtatgcaggcccatgctcccagaaggccgataccgtgttcagacttaattgggcaacttacttagcatctaccgagaacatcattgtggcatcttttgatgggagaggatcgggctaccagggggacaagataatgcacgcaatcaacaggcggctgggcacgttcgaagtggaggaccagatcgaggccgcaaggcagttctctaagatgggctttgtagacaacaagcgtattgcgatctgggggtggtcttacgggggttacgtcactagcatggtcctaggcagcgggagtggggtctttaaatgcgggatcgcggtggccccagtgagccgctgggagtactacgacagcgtttatactgagaggtatatggggcttccgactcccgaagacaacctggatcactatagaaactctaccgtcatgtcaagggccgagaatttcaagcaggtagagtatctgcttattcacggcacggcagacgataacgtgcatttccagcagagtgctcagatcagcaaggccttggtcgatgttggagtcgatttccaagcgatgtggtacacagacgaggaccacggcatcgcaagtagcacggcgcaccagcatatttatacccacatgagccacttcatcaaacaatgtttcagcctcccctag

SEQ ID NO: 122260 - protein, 803 aa, Artificial Sequence
  derived and/or modified sequence
MTTAKEPSASGKSVQQQEQELVGSNPPQRNWKGIAIALLVILVICSLIVTSVILLTPAEDNSLSQKKKVTVEDLFSEDFKIHDPEAKWISDTEFIYREQKGTVRLWNVETNTSTVLIEGKKIESLRAIRYEISPDREYALFSYNVEPIYQHSYTGYYVLSKIPHGDPQSLDPPEVSNAKLQYAGWGPKGQQLIFIFENNIYYCAHVGKQAIRVVSTGKEGVIYNGLSDWLYEEEILKTHIAHWWSPDGTRLAYAAINDSRVPIMELPTYTGSIYPTVKPYHYPKAGSENPSISLHVIGLNGPTHDLEMMPPDDPRMREYYITMVKWATSTKVAVTWLNRAQNVSILTLCDATTGVCTKKHEDESEAWLHRQNEEPVFSKDGRKFFFIRAIPQGGRGKFYHITVSSSQPNSSNDNIQSITSGDWDVTKILAYDEKGNKIYFLSTEDLPRRRQLYSANTVGNFNRQCLSCDLVENCTYFSASFSHSMDFFLLKCEGPGVPMVTVHNTTDKKKMFDLETNEHVKKAINDRQMPKVEYRDIEIDDYNLPMQILKPATFTDTTHYPLLLVVDGTPGSQSVAEKFEVSWETVMVSSHGAVVVKCDGRGSGFQGTKLLHEVRRRLGLLEEKDQMEAVRTMLKEQYIDRTRVAVFGKDYGGYLSTYILPAKGENQGQTFTCGSALSPITDFKLYASAFSERYLGLHGLDNRAYEMTKVAHRVSALEEQQFLIIHPTADEKIHFQHTAELITQLIRGKANYSLQIYPDESHYFTSSSLKQHLYRSIINFFVECFRIQDKLLTVTAKEDEEED

SEQ ID NO: 122261 - DNA, 2412 bp, Artificial Sequence
  derived and/or modified sequence
atgactacagccaaagagccaagtgccagtggaaagtctgtgcagcagcaagaacaagagttggtgggctctaatcctccacaacggaactggaagggcatcgctatcgccctattagtgattctggtcatctgctccctgatagtgaccagtgtgatcttgctgacccccgcggaagataacagtctgagccaaaagaaaaaagtcaccgttgaagatctcttctctgaggactttaaaattcatgatcccgaagctaagtggatctcagacacagaatttatttatagagaacagaagggaacagtcagactctggaacgtggagacaaatacttcaacagtgctcatagaaggaaagaagattgaatccctccgcgccattcggtacgaaatttccccagatagagaatatgccctcttcagttataatgtggagcccatctaccagcacagctacaccggctattatgtgctgtccaagatccctcacggagatccccaatcactggaccctcctgaagtttctaacgccaagttacagtacgcaggctggggccccaaagggcaacagctgatcttcatctttgagaacaacatttattactgcgcccacgtgggaaagcaggctataagggtagtgtcaactggcaaagagggtgtcatttataatggtttgtcagattggctgtatgaggaagagatactgaaaacccatatcgctcactggtggtctccagacgggacgaggctggcgtatgcggctataaacgacagcagagtccccattatggagcttcctacatataccggcagtatatatcccactgtgaagccgtatcattatccaaaggccgggtccgaaaatccaagcatctccctacacgtcatcggccttaacggaccaactcatgatttagagatgatgccgcctgatgacccaagaatgcgtgaatattatatcacaatggttaaatgggcaacctcaacaaaggttgcagtcacgtggttaaatagggcccagaatgtttcaattctaactctgtgtgacgctaccaccggggtgtgtactaagaaacatgaggacgaatccgaggcctggctgcaccgccaaaatgaggaacctgtatttagcaaggatggaagaaaatttttttttataagagctatcccacagggcggaaggggtaagttctaccacatcacagtgtcctcatcacagcccaattcttccaatgataatattcagtcaattacctctggagactgggacgtgacaaaaatcctggcctatgacgaaaaaggtaataagatttatttcctttctacagaggatctacctagacgcaggcagctgtacagcgcaaataccgtcggcaattttaataggcagtgtctgtcctgcgacctggtggaaaactgcacctacttctccgccagctttagccattctatggacttcttcttgctgaagtgcgagggaccgggcgtgccaatggttacagtgcacaatactacggataagaagaagatgttcgatctggaaactaatgagcatgtgaagaaggccattaacgatcgacagatgcccaaagtggagtatcgggatatcgaaattgatgattacaacctccccatgcagatcctgaaaccagcaacatttactgacactacacactacccactgctgttagtggtggatggaacaccgggttcccaatcggtggcagaaaaattcgaggtatcctgggagacggttatggtgagctcccatggtgccgtagttgtaaaatgtgatgggcgtggctctggattccagggcaccaaactgttgcacgaggtgagaaggcgactggggctcctggaggagaaggatcaaatggaagctgtccgcactatgttgaaggaacagtacattgatagaaccagagtcgccgtctttggcaaggactatggagggtatttatctacctatatcttgcctgctaagggagagaatcaggggcagacctttacgtgtggatcagccttgagcccaattaccgattttaagctctacgctagcgctttttcagagagatacctgggacttcatgggctggataatcgcgcctatgagatgaccaaggtagcacatagagttagcgccttagaagagcagcaattcctgattattcatcctacagccgatgaaaaaatccacttccagcataccgcagaactgatcacccagttgattagagggaaggccaattattctctgcagatctacccagatgagtcccactacttcacttcaagctccctgaaacaacatctttacagaagcataattaacttctttgttgagtgtttccgtattcaggacaagcttctgacggtcaccgctaaagaagatgaggaagaagactag

SEQ ID NO: 122262 - DNA, 2412 bp, Artificial Sequence
  derived and/or modified sequence
atgaccacagccaaggagcccagcgccagcggcaagtctgtgcagcagcaggagcaggagctggtgggcagcaaccccccccagaggaactggaagggcatcgccatcgccctgctggtgatcctggtgatctgcagcctcatcgtgaccagcgtcatcctgctgaccccagctgaggacaacagcctgagccagaagaagaaggtgacagtggaggacctcttcagcgaggacttcaagatccatgaccctgaggccaagtggatcagtgacacagagttcatctaccgggagcagaagggcaccgtgcggctgtggaatgtggagaccaacaccagcacagtgctgattgagggcaagaagattgagagcctgcgggccatccgctatgagatcagcccagaccgggagtatgccctcttctcctacaacgtggagcccatctaccagcacagctacacaggctactacgtgctgagcaagatcccccacggggacccccagagcctggaccccccagaggtgtccaatgccaagctgcagtatgccggctggggccccaagggccagcagctgatcttcatctttgagaacaacatctactactgtgcccacgtgggcaagcaggccatccgggtggtgtccacaggcaaggagggcgtcatctacaacggcctgagtgactggctgtatgaggaggagatcctgaagacccacatcgcccactggtggagcccagatggcacccggctggcctatgctgccatcaatgacagccgggtgcccatcatggagctgcccacctacacaggcagcatctaccccaccgtgaagccctaccactaccccaaggccggcagcgagaaccccagcatcagcctgcacgtgattggcctgaatggccccacccatgacctggagatgatgcccccagatgaccccaggatgagggagtactacatcaccatggtgaagtgggccaccagcaccaaggtggccgtgacctggctgaacagagcccagaatgtgtccatcctgaccctgtgtgatgccaccactggagtgtgcaccaagaagcatgaagatgagagcgaggcctggctgcaccggcagaatgaggagcctgtgttcagcaaggatggcaggaagttcttcttcatccgggccatcccccagggcggccggggcaagttctaccacatcaccgtgagcagcagccagcccaacagcagcaatgacaacatccagagcatcaccagcggggactgggatgtgaccaagatcctggcctatgatgagaagggcaacaagatctacttcctgagcacagaggacctgccccggcggcggcagctgtacagcgccaacacagtgggcaacttcaaccggcagtgcctgagctgtgacctggtggagaactgcacctacttcagcgccagcttcagccacagcatggacttcttcctgctgaagtgtgagggccctggggtgcccatggtgacagtgcacaacaccacagacaagaagaagatgtttgacctggagaccaatgaacatgtgaagaaggccatcaatgaccggcagatgcccaaggtggagtacagagacattgaaattgatgactacaacctgcccatgcagatcctgaagccagccaccttcacagacaccacccactaccccctgctgctggtggtggatggcaccccaggcagccagagcgtggccgagaagtttgaggtgtcctgggagaccgtgatggtgagcagccatggagctgtggtggtgaagtgtgatggccggggcagcggcttccagggcaccaagctgctgcacgaggtgagaagaaggctgggcctgctggaggagaaggaccagatggaggccgtgaggaccatgctgaaggagcagtacatcgacaggaccagggtggccgtgtttgggaaggactatggaggctacctgagcacctacatcctgcctgccaagggggagaaccagggccagaccttcacctgtggcagcgccctgagccccatcacagacttcaagctgtatgccagcgccttcagcgagcgctacctgggcctgcacggcctggacaacagagcctatgagatgaccaaggtggcccaccgggtgtctgccctggaggagcagcagttcctgatcatccaccccacagcagatgagaagatccacttccagcacacagctgagctgatcacccagctgatccggggcaaggccaactacagcctgcagatctacccagatgagagccactacttcaccagcagcagcctgaagcagcacctgtaccgcagcatcatcaacttctttgtggagtgcttccgcatccaggacaagctgctgactgtgacagccaaggaggatgaggaggaggactag

SEQ ID NO: 122263 - DNA, 2412 bp, Artificial Sequence
  derived and/or modified sequence
atgaccaccgccaaggagcccagcgccagcggcaagagcgtgcagcaacaagaacaagagctggtgggctcaaatccaccacagcgcaactggaaagggattgccatagccctactggtgattctcgtcatctgcagcctgattgttacttccgtcatcttgctaacgcctgccgaggacaatagcctaagccaaaaaaagaaggtcacggtggaggacttgttttctgaggatttcaaaattcacgatccagaagcaaaatggatctcagatacagaatttatctatcgagaacaaaaagggaccgtgaggctgtggaacgttgagacgaacaccagtactgtactaatcgaaggcaagaaaattgaaagtctccgggctatccgctacgaaatcagccctgacagagagtatgctttgtttagctacaacgtcgagccgatttaccagcactcttacaccggctactatgtcctcagcaagataccgcatggagatccacagagtcttgaccctccagaggtgagtaacgcaaagctgcagtacgctggctggggcccaaaaggacagcagcttatttttatattcgaaaacaacatctattactgtgcccatgtgggaaaacaggccattcgtgtcgttagtactggcaaggaaggagtaatttacaacggcttgagcgactggttatacgaggaggaaattctgaaaacccatatcgcccactggtggtcccccgacgggacccggcttgcttatgctgcaattaacgattctcgcgttcctatcatggagctgcctacctatacgggatcaatctacccaacagtcaagccgtatcactaccctaaggcgggcagcgagaatccctccatttcactgcatgtaattgggctgaacggtccaacccacgatctagagatgatgccccctgatgatcccaggatgcgagagtattacattacaatggtaaagtgggcgacttccacaaaagtggcagtcacgtggcttaaccgggcacaaaatgttagcatactgaccctgtgtgacgccacaactggagtttgtactaagaaacacgaagacgaaagcgaggcgtggcttcacagacaaaacgaagaaccagtcttttccaaggacgggagaaaatttttcttcataagggccatccctcaaggaggcagagggaaattctaccacatcaccgtcagttcatcgcagccaaactctagcaatgacaacatccagagcattacgtcaggcgactgggatgtgacaaagattcttgcatacgacgagaagggcaacaaaatctattttctgtcaaccgaggatctgccccgcaggagacagctgtacagcgccaataccgtgggaaacttcaacagacagtgtctgtcgtgcgatctggtggagaattgtacctattttagcgcgtcgtttagccattcgatggactttttcctgctcaagtgcgagggtccaggagtccccatggtcaccgtgcacaatactacggacaagaaaaaaatgtttgacctggaaaccaacgagcacgtaaaaaaagctataaacgacagacagatgcctaaggtcgaataccgggatattgaaatcgatgattataacctaccaatgcaaatcttaaaaccagccacttttaccgacacaactcactaccccctgctgcttgtggttgatggcacccccgggtcacagtctgtcgctgaaaagttcgaggtatcatgggaaacagtcatggtgtccagccacggcgcggtggtggtaaagtgtgacgggcgtgggagtggatttcagggcacaaaactgcttcacgaagtcagacggcgcctcgggctgctcgaagaaaaagaccaaatggaggctgtcagaactatgttgaaagagcagtatatcgaccgcacacgcgttgcagtgtttggcaaagattacggcggttatttatccacatatattttgccggctaaaggtgagaaccagggacagacttttacttgcgggagcgctctgtcaccaatcaccgattttaagctatatgcctctgccttcagcgagaggtatctgggcctgcacgggctcgataatcgtgcctacgaaatgacaaaagtggcccacagagtttctgctttggaagagcagcagtttctgattattcacccgactgccgacgaaaagatccacttccagcacaccgccgagctgattacccagctcattcggggtaaggctaattactctctccagatatacccagacgaaagtcattacttcaccagctcaagcctgaagcagcacctgtacagatcaatcattaatttttttgtcgagtgcttcagaatccaggataagctgctcaccgttacagccaaagaggatgaggaggaggactag

SEQ ID NO: 122264 - DNA, 2412 bp, Artificial Sequence
  derived and/or modified sequence
atgactacagccaaggaacccagcgccagcggcaaatcagttcagcaacaggagcaggagctggtaggaagcaaccctccccagcgcaattggaaaggaattgccatcgctctcctggtgatactcgtgatttgtagcttgattgtgacatccgtcatactcctcacacctgcagaagataatagcctctcccaaaaaaagaaagtaaccgtcgaagacctctttagcgaagacttcaagattcacgacccagaggctaagtggatcagcgacaccgagttcatttatagagaacagaaaggcactgtccggctctggaacgtagaaacgaatactagtacagtgttgatcgagggaaaaaaaattgaatcactgcgagcaatcaggtacgaaatcagtcccgatagagagtatgccctgttctcctataatgtcgaaccgatttaccagcattcctatacgggatattacgtactgtcaaaaatcccgcacggggacccacagtccctcgacccccctgaggtttccaacgcaaaactgcagtacgccggttggggcccaaagggccagcaactgatcttcattttcgaaaacaatatctactattgtgcacatgtgggtaaacaagccattcgcgtagtttctacaggcaaggagggtgtcatttataacgggctcagtgactggctgtacgaggaggaaattcttaaaacccatatcgctcattggtggagccccgatggaacgcgtctggcatacgcagctattaatgattctcgcgttcctattatggaactgccaacatacaccggatcgatctaccctacagtcaaaccttatcactatccgaaggccggaagtgagaatccatccatctcccttcacgttatcggtctgaacggtccaactcatgacctggagatgatgcccccagacgatccacggatgcgagaatactacatcacgatggttaaatgggccaccagcacaaaagtagcagttacgtggctcaacagagcgcagaacgtgtcaatccttacgctgtgcgatgcaactacaggagtttgcacaaaaaaacatgaggatgaaagtgaggcgtggctgcatagacaaaacgaggagccggtgttcagtaaggatggcagaaaattcttctttattagagcaatccctcagggcggtcgcggtaagttttatcacatcaccgtgtccagctcacagcccaattcctccaatgacaacattcagtctataacatctggagattgggatgttacaaagatcctggcatatgacgagaagggtaataagatatacttcctcagcactgaggaccttccccgtaggaggcagctatattccgccaacactgtaggcaattttaacagacagtgtctgtcctgcgaccttgtcgaaaattgtacctatttctctgccagttttagccatagcatggacttcttcctgctgaagtgcgagggtcctggggtcccaatggtgacggtgcataacaccaccgacaaaaagaaaatgttcgatctagaaacaaatgagcatgtgaagaaagctatcaacgataggcagatgccaaaggtagagtatcgcgatattgagatcgacgactacaatctgccaatgcagattctgaagcccgcaacatttaccgacacgacgcattatcctctcctgcttgtcgtagatgggaccccaggctctcagtctgtcgctgagaagtttgaggtgagttgggagaccgtgatggtgtcaagccacggggctgtcgttgtgaagtgcgatggccgtggtagcgggttccagggaaccaaattgcttcatgaggtgaggaggaggctaggattattagaggagaaggatcagatggaagccgtgagaactatgttgaaagaacagtatatcgataggaccagggtcgccgtattcggtaaggattacggtggatacctctctacgtacattctacccgcaaaaggcgagaatcagggacaaacttttacctgcggatcagctctgtcacccattactgatttcaagttatacgcctcagccttctcagaaaggtacctcggactgcatgggctggacaaccgagcgtacgagatgacaaaggtggcccaccgagtgagtgccctggaggaacagcagttcctcattattcatcccacggcggacgaaaaaattcactttcagcacacagctgagctgataacccagctgattcgaggcaaagccaactactctctccagatttatccagacgagtcccattattttacatcaagttcgttaaagcagcatctatataggagtatcatcaacttcttcgtcgaatgctttcgaatccaggacaagctgctgacagtgacagccaaagaagacgaggaggaggattag

SEQ ID NO: 122265 - DNA, 2412 bp, Artificial Sequence
  derived and/or modified sequence
atgaccaccgccaaggagcccagcgccagcggcaagagcgtgcagcagcaggagcaggagctggtgggcagcaaccccccccagagaaactggaagggcatcgccatcgccctgctggtgatcctggtgatctgcagcctgatcgtgaccagcgtgatcctgctgacccccgccgaggacaacagcctgagccagaagaagaaggtgaccgtggaggacctgttcagcgaggacttcaagatccacgaccccgaggccaagtggatcagcgacaccgagttcatctacagagagcagaagggcaccgtgagactgtggaacgtggagaccaacaccagcaccgtgctgatcgagggcaagaagatcgagagcctgagagccatcagatacgagatcagccccgacagagagtacgccctgttcagctacaacgtggagcccatctaccagcacagctacaccggctactacgtgctgagcaagatcccccacggcgacccccagagcctggacccccccgaggtgagcaacgccaagctgcagtacgccggctggggccccaagggccagcagctgatcttcatcttcgagaacaacatctactactgcgcccacgtgggcaagcaggccatcagagtggtgagcaccggcaaggagggcgtgatctacaacggcctgagcgactggctgtacgaggaggagatcctgaagacccacatcgcccactggtggagccccgacggcaccagactggcctacgccgccatcaacgacagcagagtgcccatcatggagctgcccacctacaccggcagcatctaccccaccgtgaagccctaccactaccccaaggccggcagcgagaaccccagcatcagcctgcacgtgatcggcctgaacggccccacccacgacctggagatgatgccccccgacgaccccagaatgagagagtactacatcaccatggtgaagtgggccaccagcaccaaggtggccgtgacctggctgaacagagcccagaacgtgagcatcctgaccctgtgcgacgccaccaccggcgtgtgcaccaagaagcacgaggacgagagcgaggcctggctgcacagacagaacgaggagcccgtgttcagcaaggacggcagaaagttcttcttcatcagagccatcccccagggcggcagaggcaagttctaccacatcaccgtgagcagcagccagcccaacagcagcaacgacaacatccagagcatcaccagcggcgactgggacgtgaccaagatcctggcctacgacgagaagggcaacaagatctacttcctgagcaccgaggacctgcccagaagaagacagctgtacagcgccaacaccgtgggcaacttcaacagacagtgcctgagctgcgacctggtggagaactgcacctacttcagcgccagcttcagccacagcatggacttcttcctgctgaagtgcgagggccccggcgtgcccatggtgaccgtgcacaacaccaccgacaagaagaagatgttcgacctggagaccaacgagcacgtgaagaaggccatcaacgacagacagatgcccaaggtggagtacagagacatcgagatcgacgactacaacctgcccatgcagatcctgaagcccgccaccttcaccgacaccacccactaccccctgctgctggtggtggacggcacccccggcagccagagcgtggccgagaagttcgaggtgagctgggagaccgtgatggtgagcagccacggcgccgtggtggtgaagtgcgacggcagaggcagcggcttccagggcaccaagctgctgcacgaggtgagaagaagactgggcctgctggaggagaaggaccagatggaggccgtgagaaccatgctgaaggagcagtacatcgacagaaccagagtggccgtgttcggcaaggactacggcggctacctgagcacctacatcctgcccgccaagggcgagaaccagggccagaccttcacctgcggcagcgccctgagccccatcaccgacttcaagctgtacgccagcgccttcagcgagagatacctgggcctgcacggcctggacaacagagcctacgagatgaccaaggtggcccacagagtgagcgccctggaggagcagcagttcctgatcatccaccccaccgccgacgagaagatccacttccagcacaccgccgagctgatcacccagctgatcagaggcaaggccaactacagcctgcagatctaccccgacgagagccactacttcaccagcagcagcctgaagcagcacctgtacagaagcatcatcaacttcttcgtggagtgcttcagaatccaggacaagctgctgaccgtgaccgccaaggaggacgaggaggaggactag

SEQ ID NO: 122266 - DNA, 3768 bp, Artificial Sequence
  derived and/or modified sequence
tgcgccgtgggcgccgggccgggaggcgggcgaggaggcagcgcgcatcactcgggtccccttcctgcacccagccgccacttgccggttgctaagcagttatcattgtttctgtggcgattgcagaggctgttgctaattggagaagccccactaagcagcggcagcttcctgcttcggatcctctctctgctgcttgcatttaaagagcaaactcgtcttgtctacccaccctccctcccccatcctccccaaaatagccttgtgatttcggaagtatggactaaaatcacactcctccttaccttaccgcttggactctggtggctcccaactcgccgtcagaccccacctgccccggtggtgggaagcgcctggacagaccatgaccacagccaaggagccaagcgcttcggggaaatccgtgcagcagcaggaacaggagctggtggggagtaaccctccgcagaggaattggaaaggaatagcaattgcactgcttgtcattctggtcatctgctccttgatcgtcacctcggtcatacttctgacaccagcggaagataatagtctgtctcaaaagaagaaggtcactgtagaagatctcttcagtgaagacttcaaaattcatgaccccgaggctaagtggataagtgatacagaattcatctacagagaacagaaaggaacagtgagactgtggaatgttgaaacaaatacttctactgtcttaatagaaggcaaaaaaattgaatcattaagagccatcagatatgaaatatctccagatagagagtatgcacttttttcatacaatgtggaacccatatatcaacactcgtatactggatattacgtcctgagcaaaattcctcatggggatcctcaaagtctggacccaccagaagtcagcaatgcaaaacttcagtatgcaggatggggccctaaaggccaacagctgatatttatttttgaaaacaatatctactactgtgcacatgtcgggaaacaggccatccgtgtggtctccactggcaaggaaggtgtgatttacaatggcctcagtgactggctgtatgaagaggagattttgaagacacacatcgcacactggtggtctccggatggcacgagactcgcctacgccgccatcaatgattcccgtgtccccatcatggagctcccaacttacaccggctccatctaccccaccgtgaagccctaccactatcccaaggctggaagtgagaaccccagcatttccctacacgttattggcttaaatggacccacccatgatctggagatgatgccgcctgatgatccacggatgagggagtactacatcaccatggtgaagtgggccaccagcaccaaggtcgccgtgacctggctgaaccgggcgcagaacgtgtccatcctcaccctctgcgacgccaccacgggggtctgcacgaagaaacacgaggatgaaagtgaggcctggctccacagacagaatgaagaacctgtgttctccaaggatggccgaaagtttttcttcatcagagccatcccccagggaggacgagggaaattctatcacatcacggtgtcctcgtcccagcccaacagcagcaacgacaacatccagtccatcacctccggggactgggacgtgaccaagatcctagcctacgatgagaaggggaataagatctacttcctgagcacggaggacctgcctcggagacgacaactctacagtgccaacacggtgggcaacttcaacaggcagtgcctctcctgtgacctggttgagaactgcacctacttcagcgcttccttcagccatagcatggacttcttcctgctcaagtgcgaaggtcctggtgttcctatggtgacggtgcacaacacaacagataagaaaaaaatgtttgacctagaaacaaatgaacatgtcaagaaggccataaatgaccgacagatgcctaaagtggaatacagggacattgagattgatgattacaacctgcccatgcagatactgaagccagcaaccttcaccgacaccacccactaccctctgctcctggtggtggatggcaccccaggcagccagagtgtggctgagaagttcgaggtgagctgggagacggtgatggtgagcagccacggcgcggtggtggtaaagtgtgacggccgtggcagcggcttccaagggaccaagctcctgcacgaagtgaggcggcggctgggcttgctggaggagaaggaccagatggaggccgtgcggacgatgctgaaggagcagtacattgacaggacgcgcgtggccgtgtttgggaaggattacggtggctacctgagcacctacatcctcccagcaaagggagaaaatcaaggccagacattcacctgcggctctgctctctctccaataacagacttcaaactctatgcctctgcgttttccgagaggtacttgggcctccatggacttgacaacagagcatacgagatgaccaaggtagcccatcgagtctccgcgctggaagaacagcagttcctgatcattcatcccactgccgatgaaaaaattcatttccagcacacagcagaactcattacacaactaattaggggaaaggctaattacagcttacagatttacccggacgaaagccattactttaccagctccagcctcaaacagcatctgtaccggtccatcatcaacttcttcgtggaatgcttcaggatccaggacaaactgctgacagtcacagcgaaagaggacgaggaggaggactaagctcaggtcgctctaagcacaaacgtggctctttctacaaccagatgcaaccgagggatttccctgccctccctcttccctcggaggggcggggcggggcggggccgggtgttccatagcatgtgtgtctcggatgcggaaggcagttttgcttgggaaacaagctccttccccggggtcatcactcacggcctccatggcaccagggacaacgctgtccccgcagcagcgcctcctcccggcgcccgagagaccggcacgccacggcccctcccccaaggaacagagcaaaggatggtggccgcaggccccacgcgagcccacaggacaccggcccctagattccagccaccaagcggaagcatgagacccgcccacactagcctctgtgttcccgttagggacatcacaccctgtctcacgtcgcagtgccatggacgcagcagttacagcaccattgttttagcagtgcgtgttcatatatgggcttgctacttcctgtaatgaggacgttcaacatggtgaggggctacaagaaaacgcttttctgtacagagtcttactgtagctacgctaatggttaacctgatagaattaactcgtatttttctatggttttaacctgatgctccactgtctccgtcatggggttgttttgctgtttggggttgggccttgtttccctttcctttctccagtccacgtgtagactttgcgcttgatgaagaagcagatcggaagtaactgctccctcctcaaggttgtcttcagacgtcttggggacgttcctaaacactgagggggaagacagccaatagcacccattaaaagaaatacctaaataaaacctctctcccactcagctatgctagggcttggctgtaggtgtgcactgtctatttacatccgtccttacaaccatccttgtcctccttggtaccgtatcaagctctttcccatgacatttggtt

SEQ ID NO: 122267 - protein, 201 aa, Artificial Sequence
  derived and/or modified sequence
MDLSLLWVLLPLVTMAWGQYGDYGYPYQQYHDYSDDGWVNLNRQGFSYQCPQGQVIVAVRSIFSKKEGSDRQWNYACMPTPQSLGEPTECWWEEINRAGMEWYQTCSNNGLVAGFQSRYFESVLDREWQFYCCRYSKRCPYSCWLTTEYPGHYGEEMDMISYNYDYYIRGATTTFSAVERDRQWKFIMCRMTEYDCEFANV

SEQ ID NO: 122268 - DNA, 606 bp, Artificial Sequence
  derived and/or modified sequence
atggacctaagtctgctgtgggtgctgctgccgctcgtgacaatggcctggggccagtacggagattacggatacccatatcagcagtaccacgattactccgacgacgggtgggtgaatctgaatagacagggcttctcttatcaatgtcctcaaggccaagtgatagttgccgttcggtcaattttcagcaagaaggaggggtctgaccgccaatggaattacgcctgcatgcctacaccacagagcctgggcgagcccactgagtgctggtgggaggagattaaccgagcaggaatggaatggtaccagacctgttcgaacaacggcctggtggctggctttcagtctcgttactttgaatcagtgcttgaccgcgaatggcagttctattgctgtcgttacagcaagcggtgcccctattcctgttggctgacaaccgaataccccggccactatggagaggagatggacatgatcagctataattatgactactacatcaggggagctacgactacattttccgcagttgagagagatcgtcagtggaagtttatcatgtgccgcatgacagaatacgattgcgagtttgcaaacgtttag

SEQ ID NO: 122269 - DNA, 606 bp, Artificial Sequence
  derived and/or modified sequence
atggacctgagcctgctgtgggtgctgctgcccctggtgaccatggcctggggccagtacggggactatggctacccctaccagcagtaccatgactacagtgatgatggctgggtgaacctgaaccggcagggcttctcctaccagtgcccccagggccaggtgattgtggccgtgcgcagcatcttcagcaagaaggagggcagtgaccggcagtggaactatgcctgcatgcccaccccccagagcctgggggagcccacagagtgctggtgggaggagatcaacagagctggcatggagtggtaccagacctgcagcaacaacggcctggtggccggcttccagagccgctactttgagagcgtgctggaccgggagtggcagttctactgctgccgctacagcaagcgctgcccctacagctgctggctgaccacagagtacccaggccactatggagaggagatggacatgatctcctacaactatgactactacatccggggggccaccaccaccttctctgctgtggagcgggaccggcagtggaagttcatcatgtgcaggatgacagaatatgactgtgaatttgccaacgtgtag

SEQ ID NO: 122270 - DNA, 606 bp, Artificial Sequence
  derived and/or modified sequence
atggacctgagcctgctgtgggtgctgctgcccctggtgaccatggcatggggccaatacggggactatggctacccttatcagcagtaccacgactacagtgacgatggttgggtgaatctgaaccgacagggattttcttatcagtgccctcagggacaagtgattgtcgcagtccggtccatcttctccaagaaggaaggaagtgaccgacagtggaattatgcctgcatgcccacccctcagtctctgggcgaacctacggagtgttggtgggaagagattaacagagcaggtatggagtggtatcaaacctgttctaacaacggtctggtggcaggctttcagagccggtactttgagagcgtcctggacagagagtggcagttttactgctgtcggtactccaagcggtgcccatatagttgctggctcacaaccgagtaccctggacattacggtgaggagatggacatgatttcttacaactatgactattacatccgaggagcaacaaccacattctccgctgtggagagggatcggcagtggaaatttatcatgtgtcgaatgaccgagtacgactgcgaatttgccaacgtttag

SEQ ID NO: 122271 - DNA, 606 bp, Artificial Sequence
  derived and/or modified sequence
atggacctgtctctcttgtgggtcctcctccccctcgttactatggcttgggggcagtacggagactacggctatccctaccaacaatatcatgactatagtgacgacggctgggttaacctgaataggcagggcttctcttaccagtgtccccagggccaggtgattgtagccgtgaggagtattttcagcaagaaggagggttctgacaggcagtggaactatgcttgcatgcccactccacaatcgttgggggaacccaccgaatgctggtgggaagagattaaccgtgccggaatggaatggtatcagacatgttccaataacggtctggtggccggatttcagtctcgatactttgagtccgtgctagatcgtgaatggcagttctactgttgccggtatagcaagcgctgcccatactcatgttggctgacaaccgagtaccctggccattacggggaagagatggatatgatctcatacaactacgactattatattcgtggcgcaaccacaaccttctcagcagtggagcgggaccgccagtggaaatttatcatgtgtcgcatgactgagtacgactgtgagttcgctaacgtttag

SEQ ID NO: 122272 - DNA, 606 bp, Artificial Sequence
  derived and/or modified sequence
atggacctgagcctgctgtgggtgctgctgcccctggtgaccatggcctggggccagtacggcgactacggctacccctaccagcagtaccacgactacagcgacgacggctgggtgaacctgaacagacagggcttcagctaccagtgcccccagggccaggtgatcgtggccgtgagaagcatcttcagcaagaaggagggcagcgacagacagtggaactacgcctgcatgcccaccccccagagcctgggcgagcccaccgagtgctggtgggaggagatcaacagagccggcatggagtggtaccagacctgcagcaacaacggcctggtggccggcttccagagcagatacttcgagagcgtgctggacagagagtggcagttctactgctgcagatacagcaagagatgcccctacagctgctggctgaccaccgagtaccccggccactacggcgaggagatggacatgatcagctacaactacgactactacatcagaggcgccaccaccaccttcagcgccgtggagagagacagacagtggaagttcatcatgtgcagaatgaccgagtacgactgcgagttcgccaacgtgtag

SEQ ID NO: 122273 - DNA, 1786 bp, Artificial Sequence
  derived and/or modified sequence
acatctggaagccacatgtcagcggcagctatataaaacggtcagaccagcaatcttagagtgacattgtttgccaaaatcccaggcagcatggacctcagtcttctctgggtacttctgcccctagtcaccatggcctggggccagtatggcgattatggatacccataccagcagtatcatgactacagcgatgatgggtgggtgaatttgaaccggcaaggcttcagctaccagtgtccccaggggcaggtgatagtggccgtgaggagcatcttcagcaagaaggaaggttctgacagacaatggaactacgcctgcatgcccacgccacagagcctcggggaacccacggagtgctggtgggaggagatcaacagggctggcatggaatggtaccagacgtgctccaacaatgggctggtggcaggattccagagccgctacttcgagtcagtgctggatcgggagtggcagttttactgttgtcgctacagcaagaggtgcccatattcctgctggctaacaacagaatatccaggtcactatggtgaggaaatggacatgatttcctacaattatgattactatatccgaggagcaacaaccactttctctgcagtggaaagggatcgccagtggaagttcataatgtgccggatgactgaatacgactgtgaatttgcaaatgtttagatttgccacataccaaatctgggtgaaaggaaaggggccggggacaggagggtgtccacatatgttaacatcagttggatctcctatagaagtttctgctgctctctttccttctccctgagctggtaactgcaatgccaacttcctgggcctttctgactagtatcacacttctaataaaatccacaattaaaccatgtttctcacttttcacatgtttcatagcaactgctttatatgactgatgatggcttccttgcacaccacatatacagtgcgcatgcttacagccgggcttctggagcaccagctgcagcctggctactgctttttactgcagaatgaactgcaagttcagcatagtggaggggagaggcagaactggaggagaggtgcagtgaaggttctctacagctaagcctgtttgaatgatacgtaggttccccaccaaaagcaggctttctgccctgagggacatcttcccactcccctgctccacatgagccatgcatgcttagcaatccaagtgcagagctctttgctccaggagtgaggagactgggaggtgaaatggggaaatggaagggtttggaggcagagctgaaaacagggttggaaggatttcctgaattagaagacaaacgttagcatacccagtaaggaaaatgagtgcaggggccaggggaacccgtgaggatcactctcaaatgagattaaaaacaaggaagcagagaatggtcagagaatgggattcagattgggaacttgtggggatgagagtgaccaggttgaactgggaagtggaaaaaggagtttgagtcactggcacctagaagcctgcccacgattcctaggaaggctggcagacaccctggaaccctggggagctactggcaaactctcctggattgggcctgatttttttggtgggaaaggctgccctggggatcaactttccttctgtgtgtggctcaggagttcttctgcagagatggcgctatctttcctcctcctgtgatgtcctgctcccaaccatttgtactcttcattacaaaagaaataaaaatattaacgttcactatgctgaaaa

SEQ ID NO: 122274 - protein, 957 aa, Artificial Sequence
  derived and/or modified sequence
MQPMVMQGCPYTLPRCHDWQAADQFHHSSSLRSTCPHPQVRAAVTSPAPPQDGAGVPCLSLKLLNGSVGASGPLEPPAMNLCWNEIKKKSHNLRARLEAFSDHSGKLQLPLQEIIDWLSQKDEELSAQLPLQGDVALVQQEKETHAAFMEEVKSRGPYIYSVLESAQAFLSQHPFEELEEPHSESKDTSPKQRIQNLSRFVWKQATVASELWEKLTARCVDQHRHIERTLEQLLEIQGAMEELSTTLSQAEGVRATWEPIGDLFIDSLPEHIQAIKLFKEEFSPMKDGVKLVNDLAHQLAISDVHLSMENSQALEQINVRWKQLQASVSERLKQLQDAHRDFGPGSQHFLSSSVQVPWERAISPNKVPYYINHQAQTTCWDHPKMTELYQTLADLNNIKFSAYRTAMKLRRVQKALRLDLVTLTTALEIFNEHDLQASEHVMDVVEVIHCLTALYERLEEERGILVNVPLCVDMSLNWLLNVFDSGRSGKMRALSFKTGIACLCGTEVKEKLQYLFSQVANSGSQCDQRHLGVLLHEAIQVPRQLGEVAAFGGSNVEPSVRSCFRFSTGKPVIEASQFLEWVNLEPQSMVWLAVLHRVTIAEQVKHQTKCSICRQCPIKGFRYRSLKQFNVDICQTCFLTGRASKGNKLHYPIMEYYTPTTSSENMRDFATTLKNKFRSKHYFSKHPQRGYLPVQSVLEADYSETPASSPMWPHADTHSRIEHFASRLAEMESQNCSFFNDSLSPDDSIDEDQYLLRHSSPITDREPAFGQQAPCSVATESKGELQKILAHLEDENRILQGELRRLKWQHEEAAEAPSLADGSTEAATDHRNEELLAEARILRQHKSRLETRMQILEDHNKQLESQLQRLRELLLQPPTESDGSGSAGSSLASSPQQSEGSHPREKGQTTPDTEAADDVGSKSQDVSLCLEDIMEKLRHAFPSVRSSDVTANTLLAS

SEQ ID NO: 122275 - DNA, 2874 bp, Artificial Sequence
  derived and/or modified sequence
atgcagccaatggtcatgcaagggtgcccatacacactcccaagatgccacgattggcaggcggccgatcagtttcaccattctagttccctgcggtcaacgtgcccccatccgcaagttagagcggccgtgacctcaccagcaccaccccaagacggcgcaggagttccatgcctcagtctgaaacttctgaacggttcagtcggcgccagtgggccgctggagccccccgctatgaatctgtgttggaatgaaatcaagaaaaagtctcacaacctaagagctcggctggaagctttcagcgaccacagcgggaaactgcaactgcctctgcaagaaattattgattggctctctcaaaaggacgaggagctgtccgcccaactgccactgcagggcgatgtggctctggttcagcaggaaaaagagacccatgctgctttcatggaggaggttaaatcaaggggcccctatatctatagtgtgctggagtctgcccaagctttcctctctcagcacccctttgaggagttagaagaaccccactctgagtccaaggatacctctcccaagcagcgtatacagaatctctcgcgcttcgtgtggaagcaagccactgttgcctcagagttgtgggaaaaactcaccgcaaggtgtgtcgaccagcatagacacatagaaagaacactcgagcagctccttgaaatccagggggctatggaggagctttctactaccctgagtcaggcagaaggcgtccgcgccacctgggaacccattggcgacttgtttatagacagtcttcccgaacacatacaggccattaaactgttcaaggaggaattctcccccatgaaagacggggtaaaactcgtcaatgacctggcccatcagctcgcaataagcgacgttcatctcagtatggaaaattctcaagcactggagcagatcaacgtgcgctggaaacagttgcaagccagcgtttcagaaaggctcaagcagcttcaggacgcgcatagggatttcgggcctggatctcagcacttcctgtcttccagcgtccaagtgccatgggaacgagctattagtccgaataaagtgccctactacatcaatcaccaagcccaaaccacttgttgggaccacccgaagatgactgaactatatcagacactcgccgacttaaacaacatcaagttctccgcttacagaaccgcaatgaaactccgacgcgtgcagaaagccttgcggctcgaccttgtcacgctgaccaccgcgcttgagatttttaacgagcatgaccttcaagcgtctgaacatgtgatggacgtggtagaggttatccactgtctcactgctttatatgagcgcctggaggaagaacgagggatcctcgtgaatgtgcctctctgtgtggatatgagtctgaactggctactcaatgtgttcgactccggcaggagcgggaagatgcgggccctctccttcaagaccggcattgcttgcttatgtgggaccgaggtgaaggagaaactgcagtacctgttctctcaagttgctaactcgggttcacagtgcgatcagcgccacttgggggttttgttgcacgaggctatccaagtgcctcgacagctaggcgaggtcgcagccttcggaggaagcaatgttgagccaagtgttcgctcctgttttaggttcagcacaggcaaacccgtgattgaggcctcacaatttctcgaatgggtcaaccttgagccccagtccatggtctggcttgccgtgctgcacagagtcacaatcgctgaacaggtcaagcatcagacgaagtgctccatctgtagacagtgccctatcaagggatttcggtatcgtagcttaaaacagttcaatgtcgatatctgtcagacctgcttccttaccggtagagcttcaaagggcaataaattgcactatccaatcatggagtactacactccaaccactagtagtgagaacatgagagacttcgccaccactctgaagaacaaattccggtcaaaacactatttttctaagcatccccagcgcggatacttgcctgtacaaagtgtactcgaagccgactactcagagacccctgcatctagcccaatgtggccccatgccgacactcactctcgcatcgaacactttgcatcccggctcgcagagatggagtcccagaactgcagcttctttaatgactccctgtcccctgacgactccatcgatgaggatcaatacctgctgcgacattccagcccgataacagatcgggagccagctttcggccagcaggcaccttgtagtgtcgctactgaatcgaagggcgaacttcaaaagattcttgcccacctggaggacgagaacagaatcctgcagggcgagctgcgccgcctgaaatggcagcatgaagaagctgctgaagcccccagtctcgctgacggatcaactgaagcggccacagatcaccgaaacgaggagctgctcgctgaagcccgaatcttacgccaacacaaaagtcgacttgagacgcgcatgcagatattggaggatcataataagcagctggagtcccagctccagcggctgcgggagctactgctgcagccgccaactgagagtgatggttcaggctccgctggctcgagtcttgcatcgtcacctcaacagagtgaaggatcgcatcccagagaaaagggtcaaactacacctgatactgaggcagctgatgacgttggctctaagtcacaggatgttagcctgtgtctggaagacatcatggagaaattacggcacgccttcccctctgtgcgcagttcggatgtaacagctaacactcttttggcgtcatag

SEQ ID NO: 122276 - DNA, 2874 bp, Artificial Sequence
  derived and/or modified sequence
atgcagccaatggttatgcaggggtgtccgtacaccctcccgcggtgccacgactggcaggccgccgaccagttccatcacagttcctcccttaggtcgacctgcccccacccacaggtgcgggccgcagtgacatctcctgcaccaccccaggatggagcaggagttccatgcctttcacttaagctgttgaatgggtctgtcggggcatcaggaccactggagccccccgccatgaacctttgttggaatgaaataaaaaagaaaagccataaccttcgagcccgcctagaggctttcagcgatcatagcggaaagttacaattaccactccaggaaataattgactggctatcccagaaagatgaagagctgtccgctcagttgcccttacagggagatgtcgctctggtccagcaagagaaggagactcatgcggcattcatggaagaggtcaaaagccggggaccgtatatctattcggtcctggagtctgcccaggccttcctctcacagcatcctttcgaagagcttgaagagccccactccgaatccaaagatacatcacccaagcagaggatacagaacctctcccggtttgtctggaaacaggctacagtcgcatccgagctttgggagaagctgacagctaggtgtgtcgaccagcataggcatattgaacgtacactcgagcagctcctggaaatccaaggggcgatggaagagcttagtacaaccctgagtcaggcagaaggggtacgtgcgacgtgggagcccatcggcgatctctttatcgattcattgccggaacacatccaggcgatcaagctattcaaggaagaattcagccctatgaaagatggagtgaagctggtgaatgacctcgcgcaccagctagccatcagcgatgtgcatttgtctatggagaatagtcaggccctagagcagattaacgtaaggtggaagcagctgcaggcatctgtaagcgagagactaaaacagctacaagatgcacatagagattttggtcctgggtcgcagcacttcctgagttccagcgtgcaggtgccctgggaaagagcaattagcccgaacaaagtgccttactacatcaaccaccaggcgcagacaacatgttgggatcacccaaagatgactgagctgtaccagactctagccgacttgaataatatcaagttcagtgcctacagaaccgctatgaagcttcgccgcgtccagaaagcattaaggttagacctggtgactctgactaccgccctcgaaattttcaatgagcacgacctgcaggcgagtgagcacgtaatggatgtggtggaggtgatccattgtctcacggctctgtacgagagactggaagaagagcgcggaatcttggtgaatgtgcccctctgcgtggatatgtcacttaactggctgctgaatgtgttcgatagcgggaggtccggaaaaatgagagctttgtcattcaagactggtatcgcttgtttatgtgggacggaggttaaggagaaactgcagtacctgtttagccaggttgctaattccgggtctcagtgtgatcagcggcatttaggggttctcctgcacgaggcgattcaggtgccacgacaactcggtgaggtggcagccttcggggggtctaacgttgaacccagcgtcaggtcctgttttagatttagtaccggcaagcccgttatcgaggcttcacagtttttagagtgggtgaacctagaacctcaatccatggtctggctcgccgttctgcacagggttactatcgcggaacaagtcaagcaccagactaagtgttccatctgcaggcaatgtcctattaaggggttcaggtaccgcagcctgaagcagttcaatgtggacatatgtcagacgtgttttttaacaggacgggctagcaaagggaacaaactacattaccccatcatggaatactacaccccaaccacctccagtgagaatatgagggactttgcaaccacgctgaagaacaagtttcgctcgaagcattactttagcaaacaccctcagcgcggctacctgcccgtccagtcggtgcttgaagccgattactcagaaacgcctgcttcatcgccaatgtggccccatgccgacactcatagccggattgaacacttcgcaagcagactcgcggagatggagtctcagaattgtagcttcttcaacgacagcctgagccccgacgactctattgatgaagatcagtatttactgaggcattcctcccccattacagacagggagcccgcgtttgggcagcaggcaccatgctctgtggccactgaaagcaagggggagcttcagaaaatcttggcacaccttgaagatgaaaatcgcattctccagggggaactaagacgattgaagtggcaacacgaggaagccgcagaagctccgtcgctggcggatgggagcaccgaagccgctacagaccatcgtaatgaagagctgttggctgaggcacggattctcaggcagcataaatctcggttagagactcggatgcaaatcctggaggaccataacaagcaactcgaatcccagcttcagaggttgagagagctcctgctgcaaccaccaactgaaagtgatggaagcgggtccgcagggagtagcctggcaagcagccctcagcagtccgaaggcagccatccccgcgagaagggtcagaccactccggatacagaggctgcggacgatgtaggctcaaagagccaggacgtttctttatgtctcgaggatataatggagaaactgcggcacgcgttcccaagcgttaggagcagtgacgtgacagccaacacgctgcttgcctcttag

SEQ ID NO: 122277 - DNA, 2874 bp, Artificial Sequence
  derived and/or modified sequence
atgcagccaatggtcatgcagggatgtccatataccctgccacgttgccacgattggcaggccgccgatcagttccatcactccagcagcctccggagcacctgtccccaccctcaggtgagggctgcagtgacaagtcccgcaccaccccaggatggagcaggcgtaccctgcctttccctcaaactgctgaatggcagtgtcggagcgtctggcccactggagccccccgccatgaatttgtgctggaacgaaattaaaaaaaagagccataacctgcgcgcacgcctggaggcgttttccgatcatagcgggaaacttcagttgcccctgcaggagattattgactggctgtctcagaaggatgaggaactctctgcacagctgccacttcagggtgacgtggctttagtccagcaggagaaagagactcacgctgccttcatggaggaagtcaagagccggggtccctacatctacagcgtgctggagagtgcgcaagccttcctgtcgcagcatccattcgaagaacttgaggaacctcacagcgagtccaaggatacttcaccaaagcagcggattcagaacctcagtcgattcgtttggaagcaggctacggttgcatccgaactgtgggaaaagctaaccgctcgctgtgtagaccaacacaggcacattgaacggacattagagcagttacttgaaattcagggtgcgatggaagaactgtctactaccctatctcaggccgagggagtgcgcgcgacttgggaaccaataggggacctgttcattgacagtctcccggaacacatccaggccatcaagctcttcaaagaggagttcagccctatgaaggatggcgtgaaactcgtaaatgatctggctcaccagctggccatttctgacgtgcacctctctatggagaatagtcaggccctcgaacagattaacgtaagatggaaacaactccaggcaagtgtgagcgagcggctgaaacaattgcaggatgcacatcgcgacttcggccctgggtctcagcacttcctgagctcaagtgtccaggtaccttgggagcgcgcaattagcccaaacaaggtgccgtactacattaatcaccaggcccagacaacttgttgggatcatccaaaaatgaccgagttgtaccagacactggctgatctcaacaatattaagttcagcgcttatcggaccgccatgaagctccgtcgcgtccagaaggccttacgcctggacctggtcaccctcacgacagcccttgaaatcttcaacgagcacgatctccaggcatccgaacacgtgatggacgttgtcgaggtgattcactgcctgactgctctgtacgaaaggctggaagaagagcgcggtattctcgtcaatgttccgctgtgcgtcgacatgagccttaattggcttctgaatgtgttcgatagcggtagaagtgggaaaatgcgggcgctttctttcaaaaccggcatcgcctgcctgtgcgggaccgaggtgaaagaaaagctgcaatatttattctctcaggtggccaattccgggtctcagtgcgatcagaggcacctgggcgtactccttcacgaggccattcaggtccctcgccaactgggagaggtggccgcttttggcggaagtaacgtggagccatctgtgcggagctgctttaggttttctacagggaaaccagtcatcgaggctagccagttcctcgagtgggttaacctggagccgcagtctatggtgtggctggcagtgctgcatcgagtgacaattgcggaacaagttaaacaccaaacaaagtgttccatttgcaggcaatgccctattaaaggctttcgttacagaagcctgaagcaattcaatgtggatatttgtcagacctgctttttaacaggacgggcctcaaaggggaacaagctgcattatcctattatggagtattacaccccaactacttctagcgagaatatgagggattttgccaccacactcaagaacaagttccgttcaaaacattacttctctaagcacccacaaagaggatacctgcctgtgcagagcgtcttggaggccgactattcagagacccctgcttcctctccaatgtggccacacgctgacacacattccagaattgagcatttcgcgagcaggctcgcagaaatggagtcgcaaaactgcagcttcttcaatgatagtctgtctccagacgattccattgatgaagaccagtacctgctgagacactcatctcccatcaccgacagggaaccggccttcggacagcaggctccttgcagtgtcgcaaccgagagtaagggcgagctgcagaaaattctggcccatttagaggatgagaacagaatccttcaaggagagttacgccggctcaaatggcagcacgaggaggccgcagaggcgccttcattagctgacggatccactgaggccgcgactgaccaccggaacgaggaactgctcgcagaggcacgaatcctgcggcagcataagtcccgcctggagacgcgtatgcagattcttgaggaccacaacaagcagcttgagtctcagttacagaggctgcgcgaactgctcctgcagccccctaccgagtccgacggaagcggtagcgctggaagctccctcgcaagctcaccccaacagtctgaggggagccatccccgggaaaaagggcagactacccctgacaccgaagcggccgatgatgtggggagcaaatctcaggacgtttctctgtgcttagaggatataatggagaaactaaggcacgcttttccttccgtgcggtctagtgacgtgacggccaacacacttttggcctcctag

SEQ ID NO: 122278 - DNA, 2640 bp, Artificial Sequence
  derived and/or modified sequence
atgaacctctgttggaatgagatcaaaaaaaagagccacaatctgcgggcccggcttgaagcatttagtgatcacagcggaaaattacagcttcctcttcaagaaataattgattggttatcgcagaaggacgaggaattatcagcccagctgccgttacagggtgacgtcgcgcttgtccagcaggaaaaagagacccatgcagcctttatggaggaggttaaaagtcgaggaccgtacatctattccgttctcgagtccgcacaagccttcctcagtcaacatccattcgaagaactggaagaaccccactctgagtccaaggacacctctcccaagcagaggatccaaaacttaagtaggtttgtctggaagcaagccacagttgctagcgagctctgggaaaaattgaccgctagatgcgtagatcagcaccggcacatcgagcggacactagaacagctactggagatacagggtgctatggaggagttgagtaccaccctgagtcaggccgagggcgttcgggccacatgggagcctataggagaccttttcattgactcactgccagagcacattcaggcgataaagctttttaaagaggaattctcccccatgaaagacggcgttaagttggtgaatgacttagctcaccaactggccatctccgatgtacacctgagtatggagaactcccaagcccttgagcagataaatgtgcgctggaaacagttacaagcctctgtttccgaaagactaaaacagcttcaggatgcacacagagacttcgggcccggtagtcagcacttcctgtcatctagtgtacaggttccttgggagcgcgctatttcaccaaacaaggtgccttactatattaatcaccaggcccagacaacttgctgggaccacccaaagatgactgagctttatcagaccctcgcggatttgaacaatatcaagttcagcgcctatcgcaccgcgatgaagctcaggcgggtccagaaggccttgagactggatctggtcacgctcacaacagcccttgaaatatttaacgagcacgacctgcaagcctctgagcacgttatggatgttgtggaggtgattcactgcctgacagcgttatatgagaggttagaagaagaacgggggattcttgtgaacgtcccactgtgcgttgatatgagtctcaattggctactaaatgtattcgatagcgggcggtcaggtaagatgcgggccctctcatttaagacagggattgcttgcctgtgtggtaccgaagtgaaggagaaactgcagtatctgttttcacaggtagcaaattcgggttcacagtgtgatcagcggcatctcggggttctcctacacgaagctatccaggtcccgcggcagcttggagaagtagccgctttcggtggttctaacgtagagccgagcgtgcggtcatgcttcagattctccactggtaagcctgtgatcgaggcttctcagtttcttgaatgggtgaacctggaacctcagtcgatggtgtggctcgccgtactccaccgagtcaccattgcagaacaagtaaagcaccaaacgaagtgctccatttgtaggcagtgtcccattaaggggttccgctacaggagtctaaaacaattcaatgtggatatctgccaaacctgctttctgacagggagggcatctaagggcaataaactgcattacccaattatggagtactacaccccaacaacaagttcagaaaacatgagagacttcgctactaccctgaagaataagttccggtcaaaacattattttagcaagcaccctcagcgggggtacctgcctgtgcagtctgtcttagaggccgactacagcgaaacaccggcttcatcgccaatgtggccacacgcagatactcactcaaggattgaacacttcgcaagccggctggccgaaatggagagccagaattgttcatttttcaatgatagtctgagccccgatgactcaatcgacgaggatcagtatctcttgagacattcctccccaatcactgatcgtgaaccagcctttggtcaacaggcaccctgctctgtggcgaccgaatccaagggagagttacagaagatcctggctcacctggaggacgaaaaccgcatcctgcagggggagctgcggcggctcaaatggcagcacgaagaggctgcggaggctccaagtctggctgacggcagcactgaggccgcaacagaccataggaacgaggaactccttgcagaagcacgaattctgagacagcataaatccagactggagacaaggatgcagattctcgaagatcacaacaagcagctagaatctcagctccagcgcctgcgagagctactcctgcagcctcccaccgagtcagacggctctgggtctgccggctcatctctagcctcatccccccagcagagcgaggggtcgcacccccgggaaaagggccaaacgacccctgacactgaagcagccgatgacgttggttccaaaagtcaggatgttagcctctgcctggaggatattatggaaaagttgcgccatgcctttccttccgtgagaagttccgacgtaaccgccaataccctccttgctagctag

SEQ ID NO: 122279 - DNA, 2874 bp, Artificial Sequence
  derived and/or modified sequence
atgcagcccatggtgatgcagggctgcccctacaccctgccccgctgccacgactggcaggccgctgaccagttccaccacagcagcagcctgcggagcacctgcccccacccccaggtgcgggctgctgtgaccagccctgccccaccccaggatggagctggggtgccctgcctgagcctgaagctgctgaatggatctgtgggcgccagcggccccctggagcccccagccatgaacctgtgctggaatgagatcaagaagaagagccacaacctgcgggcccggctggaggccttcagtgaccacagcggcaagctgcagctgcccctgcaggagatcatcgactggctgagccagaaggatgaggagctgagcgcccagctgcccctgcagggagatgtggccctggtgcagcaggagaaggagacccacgccgccttcatggaggaggtgaagagccggggcccctacatctacagcgtgctggagagcgcccaggccttcctgagccagcacccctttgaggagctggaggagccccacagcgagagcaaggacaccagccccaagcagaggatccagaacctgagcagatttgtgtggaagcaggccaccgtggccagcgagctgtgggagaagctgacagcccgctgtgtggaccagcaccgccacatcgagaggaccctggagcagctgctggagatccagggcgccatggaggagctgagcaccaccctgagccaggccgagggcgtgcgggccacctgggagcccatcggggacctcttcatcgacagcctgcctgagcacatccaggccatcaagctgttcaaggaggagttcagccccatgaaggatggagtgaagctggtgaatgacctggcccaccagctggccatcagtgatgtgcacctgtccatggagaacagccaggccctggagcagatcaacgtgcgctggaagcagctgcaggcctctgtgtctgagcggctgaagcagctgcaggatgcccaccgggactttggacctggcagccagcacttcctgagcagctctgtgcaggtgccctgggagcgggccatcagccccaacaaggtgccctactacatcaaccaccaggcccagaccacctgctgggaccaccccaagatgacagagctgtaccagaccctggccgacctgaacaacatcaagttcagcgcctacagaacagccatgaagctgcggcgggtgcagaaggccctgcggctggacctggtgaccctgaccacagccctggagatcttcaatgaacatgacctgcaggccagcgagcacgtgatggatgtggtggaggtgatccactgcctgacagccctgtatgagcggctggaggaggagcggggcatcctggtgaatgtgcccctgtgtgtggacatgagcctgaactggctgctgaatgtgtttgattctggccgcagcggcaagatgagggccctgtccttcaagacaggcatcgcctgcctgtgtggcacagaggtgaaggagaagctgcagtacctgttcagccaggtggccaacagcggcagccagtgtgaccagaggcacctgggcgtgctgctgcacgaggccatccaggtgccccggcagctgggggaggtggccgcctttggaggcagcaatgtggagcccagcgtgcgcagctgcttccgcttcagcacaggcaagcctgtgattgaggccagccagttcctggagtgggtgaacctggagccccagagcatggtgtggctggccgtgctgcaccgggtgaccatcgccgagcaggtgaagcaccagaccaagtgcagcatctgccggcagtgccccatcaagggcttccgctaccgcagcctgaagcagttcaacgtggacatctgccagacctgcttcctgaccggccgggccagcaaaggaaacaagctgcactaccccatcatggagtactacacccccaccaccagcagcgagaacatgagggactttgccaccaccctgaagaacaagttccgcagcaagcactacttcagcaagcacccccagaggggctacctgcctgtgcagagcgtgctggaggccgactacagcgagaccccagccagcagccccatgtggccccatgctgacacccacagcagaattgagcactttgccagccggctggccgagatggagagccagaactgcagcttcttcaatgacagcctgagcccagatgacagcattgatgaggaccagtacctgctgcggcacagcagccccatcacagaccgggagcccgccttcggccagcaggccccctgcagcgtggccacagagagcaagggggagctgcagaagatcctggcccacctggaggatgaaaatcgcatcctgcagggcgagctgcggcggctgaagtggcagcacgaggaggccgctgaggcccccagcctggctgatggcagcacagaggccgccacagaccacagaaatgaggagctgctggccgaggcccgcatcctgcggcagcacaagagccggctggagaccaggatgcagatcctggaggaccacaacaagcagctggagagccagctgcagaggctgcgggagctgctgctgcagcccccaacagaaagtgatggcagcggcagcgctggcagcagcctggccagcagcccccagcagagcgagggcagccacccccgggagaagggccagaccaccccagacacagaagctgctgatgatgtgggcagcaagagccaggatgtgtccctgtgcctggaggacatcatggagaagctgcggcatgccttccccagcgtgcgcagcagtgatgtgacagccaacaccctgctggccagctag

SEQ ID NO: 122280 - DNA, 2640 bp, Artificial Sequence
  derived and/or modified sequence
atgaacctgtgctggaatgagatcaagaagaagagccacaacctgcgggcccggctggaggccttcagtgaccacagcggcaagctgcagctgcccctgcaggagatcatcgactggctgagccagaaggatgaggagctgagcgcccagctgcccctgcagggagatgtggccctggtgcagcaggagaaggagacccacgccgccttcatggaggaggtgaagagccggggcccctacatctacagcgtgctggagagcgcccaggccttcctgagccagcacccctttgaggagctggaggagccccacagcgagagcaaggacaccagccccaagcagaggatccagaacctgagcagatttgtgtggaagcaggccaccgtggccagcgagctgtgggagaagctgacagcccgctgtgtggaccagcaccgccacatcgagaggaccctggagcagctgctggagatccagggcgccatggaggagctgagcaccaccctgagccaggccgagggcgtgcgggccacctgggagcccatcggggacctcttcatcgacagcctgcctgagcacatccaggccatcaagctgttcaaggaggagttcagccccatgaaggatggagtgaagctggtgaatgacctggcccaccagctggccatcagtgatgtgcacctgtccatggagaacagccaggccctggagcagatcaacgtgcgctggaagcagctgcaggcctctgtgtctgagcggctgaagcagctgcaggatgcccaccgggactttggacctggcagccagcacttcctgagcagctctgtgcaggtgccctgggagcgggccatcagccccaacaaggtgccctactacatcaaccaccaggcccagaccacctgctgggaccaccccaagatgacagagctgtaccagaccctggccgacctgaacaacatcaagttcagcgcctacagaacagccatgaagctgcggcgggtgcagaaggccctgcggctggacctggtgaccctgaccacagccctggagatcttcaatgaacatgacctgcaggccagcgagcacgtgatggatgtggtggaggtgatccactgcctgacagccctgtatgagcggctggaggaggagcggggcatcctggtgaatgtgcccctgtgtgtggacatgagcctgaactggctgctgaatgtgtttgattctggccgcagcggcaagatgagggccctgtccttcaagacaggcatcgcctgcctgtgtggcacagaggtgaaggagaagctgcagtacctgttcagccaggtggccaacagcggcagccagtgtgaccagaggcacctgggcgtgctgctgcacgaggccatccaggtgccccggcagctgggggaggtggccgcctttggaggcagcaatgtggagcccagcgtgcgcagctgcttccgcttcagcacaggcaagcctgtgattgaggccagccagttcctggagtgggtgaacctggagccccagagcatggtgtggctggccgtgctgcaccgggtgaccatcgccgagcaggtgaagcaccagaccaagtgcagcatctgccggcagtgccccatcaagggcttccgctaccgcagcctgaagcagttcaacgtggacatctgccagacctgcttcctgaccggccgggccagcaaaggaaacaagctgcactaccccatcatggagtactacacccccaccaccagcagcgagaacatgagggactttgccaccaccctgaagaacaagttccgcagcaagcactacttcagcaagcacccccagaggggctacctgcctgtgcagagcgtgctggaggccgactacagcgagaccccagccagcagccccatgtggccccatgctgacacccacagcagaattgagcactttgccagccggctggccgagatggagagccagaactgcagcttcttcaatgacagcctgagcccagatgacagcattgatgaggaccagtacctgctgcggcacagcagccccatcacagaccgggagcccgccttcggccagcaggccccctgcagcgtggccacagagagcaagggggagctgcagaagatcctggcccacctggaggatgaaaatcgcatcctgcagggcgagctgcggcggctgaagtggcagcacgaggaggccgctgaggcccccagcctggctgatggcagcacagaggccgccacagaccacagaaatgaggagctgctggccgaggcccgcatcctgcggcagcacaagagccggctggagaccaggatgcagatcctggaggaccacaacaagcagctggagagccagctgcagaggctgcgggagctgctgctgcagcccccaacagaaagtgatggcagcggcagcgctggcagcagcctggccagcagcccccagcagagcgagggcagccacccccgggagaagggccagaccaccccagacacagaagctgctgatgatgtgggcagcaagagccaggatgtgtccctgtgcctggaggacatcatggagaagctgcggcatgccttccccagcgtgcgcagcagtgatgtgacagccaacaccctgctggccagctag

SEQ ID NO: 122281 - DNA, 2874 bp, Artificial Sequence
  derived and/or modified sequence
atgcagcccatggtgatgcagggctgcccctacaccctgccccggtgtcacgactggcaagctgctgatcagtttcatcatagtagtagcctgcgcagcacctgcccacacccgcaggttagagccgccgttacctctcctgcaccgcctcaagacggcgccggtgtgccctgcctaagtctgaagttgcttaatggaagcgtaggcgcaagcggcccattagagccaccggccatgaatctatgttggaatgagataaagaaaaagtcccacaacctccgagccaggctcgaggcgttctctgatcatagcgggaagctgcagctacccctgcaggagattattgactggctgtcacagaaggatgaagaactttccgcccagctgcctctgcagggggatgtggccttagttcagcaggagaaagaaactcacgctgcttttatggaggaggtgaaatctcgcggaccttatatctattcagtgcttgagagcgctcaggcttttttaagccagcatcccttcgaggagctggaggagccccatagcgagagtaaagatactagcccaaaacaacgaattcaaaacctgagccgcttcgtatggaaacaagccactgtagcttcagaactttgggagaagctcactgccagatgcgtcgaccagcatcgtcatatcgagcggaccttggagcagctcttggagatccagggcgccatggaagagctgagcaccaccctgtctcaagctgagggagtcagggcgacctgggagcccatcggggacctgttcattgattctctgcctgaacatatccaagccattaaactattcaaagaggaattttcaccaatgaaagatggagttaaactggttaacgatctggcacatcaactcgctatttctgacgttcatctgtccatggagaacagccaggctctggagcaaattaacgttagatggaagcagctgcaggcttctgtgagcgagagactgaagcagcttcaggatgctcatagagattttgggcccggctcccagcatttcctttcctcaagtgtccaagttccctgggagagggcaatttctcctaataaagtgccgtattacataaaccaccaggcgcaaactacgtgttgggaccacccaaaaatgacggaactgtaccagacactggccgatcttaataacattaaattttcagcataccgcacggctatgaagctgcgcagagtacaaaaggcactcagactggatctggtaacactgacgacggctctcgagatcttcaatgagcacgatctgcaggctagtgaacacgtaatggatgtcgttgaggtaatacactgcctcactgccctttacgagaggctggaggaagagagaggcatcctggtgaatgtgccactgtgcgtagacatgtctctcaactggctccttaacgtattcgattctggaagaagtggcaagatgcgcgccctgtcgtttaaaaccggtatagcatgcctctgcggcaccgaggtcaaggagaaattgcagtatttgttttcccaagtcgctaattcgggatctcagtgtgatcagaggcacctgggcgtcctgctccacgaagccatccaagtgccacggcagctgggagaagttgctgcctttggggggagtaacgttgagcctagtgtgaggagctgtttcagatttagtactgggaaacccgtcattgaggccagccagtttctggagtgggtaaacttggaaccacagtccatggtgtggcttgccgtgctccatagggtgacaatcgccgagcaggttaagcaccagaccaagtgctctatatgccggcagtgccctataaagggattccggtacaggtccctgaagcagtttaatgttgacatctgccagacttgttttctgaccggacgcgccagtaagggtaataagcttcattaccccattatggaatactacaccccaactacgtctagtgagaacatgagggacttcgccaccacgctaaagaataaattcaggtctaaacactatttcagcaagcatcctcagcgcggatatttgccggtccagagtgtgttggaggcagattattccgagacccccgcgtcatcgcccatgtggcctcacgcggacactcactcccgtatcgaacacttcgccagccgattagccgagatggagtcacagaactgctcattctttaacgatagcctgtccccggacgactcgattgacgaggaccagtacttacttaggcattcatctcctatcaccgaccgagagccagctttcggacagcaggccccctgtagtgtggcgaccgaaagtaaaggggagttgcaaaagatcctggcccacctagaagatgagaacagaatcctccagggtgagttgaggcggttgaagtggcagcacgaagaagcagctgaagcaccctcgttggctgatgggagcactgaggccgctacagatcaccggaatgaagaactactcgccgaagcacggatactccgccagcacaaatccaggcttgagacaagaatgcaaattctcgaggaccataacaagcagctcgaatcgcagctgcagaggctgagagagctgctgctgcagcctcccacagaaagcgatggttccggaagcgcaggtagcagcttagcttccagccctcagcagagcgaagggagtcatccccgcgagaagggacagactactcctgacactgaagcagcagatgacgtggggagcaaatcgcaggacgtgtctctatgcctggaggatattatggagaaactgcgccacgcattcccttctgtgaggagctctgacgtcacggcaaacacgttgctagcctcatag

SEQ ID NO: 122282 - DNA, 2874 bp, Artificial Sequence
  derived and/or modified sequence
atgcagcccatggtgatgcagggctgcccctacaccctgccccggtgccacgattggcaagcggctgaccagttccaccattcatctagcttaaggtccacttgcccgcaccctcaggtaagggccgcggtgacctcccccgcacctccacaggacggggctggcgttccgtgcctttccctgaagctccttaatggcagtgtgggggccagcggcccgttggaaccccctgctatgaacctttgttggaacgagatcaagaaaaagagccacaacctaagagctcgcctcgaggccttttccgatcattcaggtaagttacagctcccgctgcaggagataattgactggctgagccagaaggacgaggaactttccgcccagctgcccttacagggagacgtggcccttgtgcaacaggaaaaagagacccatgcagcttttatggaggaagtcaagtcacgaggcccctatatttattccgtcctcgagagcgcacaagcgttcttgtcacagcatccatttgaggagctcgaagagccacacagcgaatccaaagacacctccccgaaacaacggattcagaacctgtccagattcgtttggaagcaggccacagtcgcaagtgagctgtgggaaaaactcacggcccggtgcgttgatcagcatcggcacatagaacgcaccctggagcagctccttgaaattcagggcgccatggaggaactgtccacaactctctctcaggccgagggggtgcgggctacttgggaacctattggggacctgttcatcgacagtctcccggaacacatccaggcgattaagctgttcaaagaagagttttcccccatgaaggatggagtgaagctggtcaatgacctggcccatcaactggctattagcgacgttcacctgtcaatggagaatagccaagccctggaacagatcaacgtcaggtggaagcagcttcaggcgtctgttagcgaacggctgaagcagttgcaggatgcacaccgtgacttcggacctggctcacaacactttctaagcagctccgtgcaagtgccctgggaaagagctatcagtcccaacaaggtcccctattacattaaccaccaagctcagactacttgctgggaccaccccaagatgacagaactttaccagacgcttgccgacctgaataacattaaatttagcgcctatagaaccgcaatgaagctacggcgtgtgcagaaggcgctcaggctcgaccttgtgaccctaacaacggccctcgagattttcaatgagcatgatttgcaggcatcagaacatgtcatggatgtcgtagaggtgattcattgtttgaccgccttatacgaaagacttgaggaggaacggggcattcttgtgaatgtccccctgtgtgtggacatgagtttaaattggctcctcaacgtttttgacagtgggaggtctggcaaaatgcgtgccctgagcttcaaaacaggcattgcctgcctgtgcggcacagaggttaaagagaaattacagtacttattttcacaggtggcaaactccggctcacagtgcgatcagagacatctgggcgtgctcctgcacgaagccatccaggttccccgccagcttggtgaagtggccgcatttggcggttcgaacgtcgagccatctgttcgctcctgctttcggttttctactggcaaaccagtgatcgaggcaagtcagtttctggagtgggtcaacctggagcctcagagcatggtgtggctggctgtactgcaccgggtgactattgctgagcaggtaaaacaccaaactaaatgcagcatttgcagacagtgtcccattaagggatttaggtaccggtcactgaaacagtttaacgtagatatatgtcagacctgttttctgacagggagagcatctaaagggaataaactgcattatcctatcatggaatactacacccctactacaagctcagagaatatgagggacttcgccaccaccctgaagaacaagttccgatctaaacactacttctccaagcatccacagcgagggtacctaccggttcagagcgtgctggaggcagactattcagagacaccagcatccagccccatgtggcctcacgcagatacgcactcgaggatcgagcacttcgcttcccggttagcagagatggaatctcagaactgctcattttttaacgactccctatctcccgacgattccatagacgaggatcaatacttgctgaggcattcttctccaattacagacagggagcctgcattcggccagcaggctccatgttccgtggctaccgagtcaaaaggggagctccaaaaaatcctggcccatctggaggacgaaaataggatattacagggcgagctgcgtaggctgaagtggcagcatgaagaggccgctgaagctccaagtctcgccgatgggtcaactgaggcggccacagaccataggaacgaggaactcctggccgaggcccggattctgcgccagcacaagagccggttggaaactcggatgcaaatcttggaggaccataacaaacagctagagtcgcagctccagcgcctgcgggaactcctcctgcagccaccaacagagtccgatggttcgggatccgcaggctcctccctcgcaagctctccacagcagtcagagggctcccaccctcgggagaaaggccaaacaaccccggacacagaggctgctgacgacgtgggatccaagagccaggacgttagcctatgtctggaagacatcatggagaagttgcgtcacgcctttccatctgtaaggagctcagatgtaactgcgaacaccctcttggcgagttag

SEQ ID NO: 122283 - DNA, 2874 bp, Artificial Sequence
  derived and/or modified sequence
atgcagcccatggtgatgcagggctgcccctacaccctgccccggtgtcacgattggcaagccgcagatcagttccatcattcatcctccctgagatccacttgtccacaccctcaggtgagagctgctgtcacatccccggcaccaccacaagacggggctggtgtcccatgcctcagcctcaaattacttaacgggtccgtaggggcttcaggacctttagagccccctgccatgaatctttgctggaacgaaatcaagaagaagagtcacaacctacgcgcgagactcgaagccttcagcgatcattcaggcaagctccagctgccactgcaagaaatcattgactggctaagccagaaggacgaggagctatccgcccagttgcctctccagggagacgtggcactcgtgcaacaagagaaggaaacccacgcggcgttcatggaggaggtcaagtctcggggcccatatatatactctgtactcgaatctgcacaagcttttttatcccagcacccattcgaagaactggaagagcctcatagcgagagcaaggataccagcccaaaacagcggatccagaacctgagcaggttcgtctggaagcaggccactgtggctagcgagttgtgggagaaacttacggcaaggtgcgtcgaccaacaccgtcacatcgaacggactctggagcaactgctggagatccagggggcaatggaggagctgagcacaacactcagccaggccgagggagtcagagcaacatgggagccaattggcgacctgttcattgactcactgcctgaacatatccaggcaatcaaactttttaaggaggaattcagccccatgaaggacggggtgaagctggtcaatgacctggcacaccaactcgccatttcggatgttcacctgagcatggagaactcgcaggcactggaacagattaatgtgagatggaaacagcttcaggcaagcgtctccgaacgcctaaagcagctccaggacgcccacagggacttcggccccggatcgcaacactttctgtctagtagtgtacaggtgccctgggagcgggcgatctcacccaacaaggttccctattacataaaccaccaggctcagaccacatgctgggaccacccgaagatgactgagctctatcaaacgctagccgatctgaataatattaaattttcagcctaccgtacagcaatgaagctaaggagagttcagaaggcattgcgtctggatcttgttacactgacgaccgcattagagatcttcaacgagcacgatcttcaggccagtgaacacgtgatggacgtcgtcgaagtgattcattgtctcacagccctttacgaacgtctggaagaggaacgagggattttagtcaatgttcccctttgcgtagatatgagtcttaattggcttctgaacgtgtttgatagcgggcgttccggcaagatgagagccctgagctttaagactggcatagcctgtctctgcggtaccgaggttaaagagaaactccagtatctgttctctcaggtcgccaattcaggtagtcagtgcgaccagaggcacttgggagttttactacacgaggcgatccaggttccgaggcagctgggggaggtcgcagccttcggcggcagtaatgtcgagcccagcgtccggagttgtttccgcttcagcactggtaaacccgtgatcgaagcctcccagtttctcgaatgggttaatctcgaacctcagagcatggtatggttggcggtactccaccgggtgacgattgctgaacaggtgaagcatcagactaaatgtagtatttgcagacagtgtcctattaaggggtttcggtaccggtctttgaagcagttcaacgtagacatctgccagacatgtttcctgactggccgggccagcaagggcaataagctgcactaccccattatggaatactatacccccaccacctcatctgaaaacatgcgagacttcgccacaactttgaaaaacaaatttcgcagcaaacactacttcagtaagcatccgcagaggggatatcttccggtccagagcgtcctcgaagcagactactcagagacaccggccagcagccccatgtggcctcatgccgacactcactcccggatagagcatttcgcatccaggttggccgagatggaaagccagaactgcagcttctttaacgattctctctccccagacgactctattgacgaagaccagtatcttctgaggcacagctctcccataacggaccgggagcccgcattcggacagcaggctccctgctcagtcgccactgaatccaagggtgagctgcagaagatcctcgctcacctggaagacgagaaccggattctgcagggcgagctccgaaggctcaaatggcagcacgaagaagccgcagaagccccctctttggccgacggttcaacagaggcagctaccgatcatcgaaacgaggaactgctcgccgaggctagaattctgaggcagcacaaaagcaggttagagaccagaatgcaaattttggaagatcacaataagcagctcgagtcccagttacaacggcttcgggagctgctgcttcagccccctaccgagagcgacggtagtggatcagctgggtccagcctggcttcttccccacagcagagcgagggctctcaccctcgggagaagggacagacgacacccgataccgaagcagcggatgatgtgggctcaaaatcccaggatgtttctctgtgcctcgaggatattatggagaagctccgtcacgcctttccttctgtgaggtcttccgatgtcaccgctaatacattgctggccagctag

SEQ ID NO: 122284 - DNA, 2640 bp, Artificial Sequence
  derived and/or modified sequence
atgaacctgtgctggaacgagatcaagaagaagagccacaacctgcgtgcccgactggaggccttttccgatcactccggcaaactgcaacttccccttcaggagatcatcgactggctgagtcaaaaggatgaggaactttccgcacaactccccctacaaggggacgtcgccctggttcagcaggaaaaagaaactcacgctgcctttatggaggaggtgaaaagccgtggtccatatatatatagtgtccttgagtctgcacaggccttcctgagccagcaccccttcgaggaacttgaggagccccacagcgagtcaaaagacacctccccaaaacagcgaattcaaaaccttagtcggtttgtgtggaagcaagccaccgttgcttcggaactttgggaaaaactaactgctcgatgtgtagaccagcatcgacacatagagcgcacgctggaacaattgctcgagatccaaggggctatggaggagctcagcacaaccctgtcgcaggctgaaggcgtcagggctacttgggagcccataggcgatctgttcattgactccctccctgaacacatccaagcgatcaagttgttcaaagaggaattctctccaatgaaggatggtgtgaaactggtaaatgatctggctcaccagctcgctatctcagacgtgcatctctccatggagaactcgcaggccctggaacagatcaacgtgcgttggaaacagcttcaggcatcagtgtctgaacggctcaagcagctccaggacgcccaccgcgatttcggtcccggctctcagcactttctttcctccagcgtccaggtgccctgggagcgtgccattagccccaacaaagtgccctattatataaatcaccaggctcagacaacatgttgggaccatccaaaaatgacggaactctatcagactcttgccgacttgaataacataaagtttagtgcttacagaaccgccatgaaattgcggcgggtacagaaagccttgcgcctcgatctggtgactctgaccacggccttggaaatcttcaatgagcacgacctgcaggcatctgaacacgtgatggatgtcgttgaggtcattcattgtctgaccgctctatatgagaggttggaggaggagcgtggcatcctggtgaatgtcccattgtgcgtggacatgtctctgaattggctccttaacgtgttcgactcggggcgcagcgggaagatgagggccctcagttttaaaacggggattgcctgtttgtgtggaactgaagtgaaggaaaagctgcaatacctgttctcccaagtcgcgaactcaggcagccagtgtgatcagcggcatctgggcgtactgttgcatgaagctatccaggtgccccgacagctgggcgaagtggcggcctttggagggagcaatgtcgagccctctgttcggtcttgctttagatttagcactggaaaacccgtgatcgaagcctctcagttcctggaatgggtcaatctagagcctcagagcatggtgtggttggccgtgctgcaccgggtcactatcgcagaacaggtaaaacaccagacaaagtgttcaatctgtcgccagtgccccattaaggggttcaggtaccgctccctgaagcagttcaacgtcgacatctgtcagacctgttttctcaccggtagggcgagcaaagggaataagctgcactatcccatcatggagtattatactcctacaacaagcagcgagaatatgagagatttcgccacaaccctgaaaaacaagttccggagcaaacattatttctccaaacacccccaacgcggatatctgcccgtgcagtctgtgttggaggccgactattcggaaacccctgcttcctccccgatgtggccgcacgcggacacccattctcggattgagcatttcgctagtcgcttagcagaaatggaatcccagaactgcagctttttcaatgactcgctttctccagatgactcaattgacgaggatcaatatcttcttagacactcctccccaatcactgaccgggagcccgctttcggacagcaggcgccctgttccgtggctacagaatctaaaggggaactgcaaaaaattctcgctcatctggaagacgagaatcgcattctgcaaggagaactccgccggcttaaatggcaacacgaggaggcagctgaggccccttctctagcagacgggagtactgaggccgctaccgaccaccgcaacgaggaattgcttgctgaggctagaatcctcagacagcataaaagccgactcgaaacccggatgcaaattctcgaagatcacaacaagcaactagagtcgcagctgcagcgccttcgcgaactgctccttcagccaccaaccgagagtgatggcagcgggtcagccgggtcctctctggcctctagtcctcagcagtctgagggatcacatcctcgcgagaaaggtcagactactcccgatactgaagccgctgatgatgtggggtcaaagtcccaggacgtcagtctctgcctggaagatatcatggaaaagctgcggcacgcctttccctctgttcggtccagcgacgtcactgcaaacacgctgctcgcttcctag

SEQ ID NO: 122285 - DNA, 2874 bp, Artificial Sequence
  derived and/or modified sequence
atgcagccaatggttatgcaggggtgtccctacaccctcccgagatgtcacgactggcaggctgcggaccaattccaccattccagctcactgagatccacgtgtcctcatccacaggtacgtgctgctgtcacgtctccggcaccccctcaggacggggcaggagttccgtgtctctccctcaagctcttaaacgggtccgtgggagccagtggccctttggaacccccagccatgaacctgtgctggaacgagatcaaaaagaaatcccacaatctgagggctcgcctggaggcattcagcgatcactcgggaaagctgcagcttccacttcaggaaattatcgattggctctctcaaaaggacgaagagctttccgcgcaattgccgttgcagggcgatgtcgctctagtgcagcaggagaaggagacacatgccgcatttatggaagaggtgaaatccagagggccatacatttattccgtcttggagtcagcacaggcttttctgagtcagcatccatttgaagaacttgaggaacctcatagtgaatcaaaagatacctctcctaaacagaggatccagaatctttcgcggtttgtgtggaagcaggccaccgtggcatcagagctgtgggaaaagctgaccgcacggtgtgttgaccagcacaggcacatagaacggacactggagcagctactcgaaatccagggggcaatggaggagctgagcactaccctcagccaggcagagggggtgagggcaacgtgggaacctattggcgatctgttcatagacagtctgcccgagcacatacaggctatcaaactcttcaaagaggaattttcccccatgaaggacggcgtgaagctggtgaatgatctggcgcaccaattagcgattagcgacgtacatctcagcatggagaactcgcaggccctagaacagatcaacgttaggtggaagcagcttcaggcctcggtgtcagaacggctcaaacagctgcaggatgcccatcgcgatttcggacctgggagccagcacttcctttcgtctagcgtgcaggttccctgggaaagggcgatctcccccaacaaggtgccctactacatcaatcaccaagctcagacaacctgttgggaccatccgaaaatgacagagctttatcaaactttggccgatctaaataacatcaaatttagcgcttacaggactgctatgaaacttagaagagtgcagaaggctttaaggctggatctcgtgaccctgacaacagctctcgagatctttaacgagcacgacctgcaggcaagcgagcatgtgatggatgtagttgaagttattcactgcctaaccgccctttatgagaggttggaagaggaaagaggaatcctcgtcaacgtgcctctgtgcgttgacatgagccttaattggctgctcaacgtttttgactccggcagatctggcaaaatgcgcgcactttcctttaagacagggatagcctgcctctgcgggacagaggttaaggagaaattgcagtatctgttctcccaggtcgctaactccggctctcagtgcgaccaacgccacctcggcgttcttctacacgaggccattcaggtacctcgacaactcggtgaggtagccgcatttgggggttccaacgtggagccatccgtgcgatcctgctttagattctccacagggaaaccagttatagaggcatcacagtttctggaatgggttaatcttgagccccaatcaatggtttggctagccgtgttgcatcgcgttactattgccgaacaagtgaagcaccagacaaaatgttccatttgccgccagtgtcccattaaaggatttcgctaccggagcctaaagcagtttaatgtggacatctgtcaaacctgcttcctgacgggaagggcctcaaagggtaataagctacactaccccataatggagtattatacccctaccaccagttccgagaatatgcgcgacttcgcaaccactcttaaaaacaagttcagatcaaaacattacttctcaaaacatccacagcggggttaccttcccgtgcagtccgttctcgaagcggactactccgagacacccgcttcatctccaatgtggcctcacgccgacacccatagtaggatagagcatttcgccagcagactggccgaaatggaatcgcagaattgcagcttctttaatgattctctgtcccccgacgattccatcgatgaggatcagtatctactgagacattcttcacccatcaccgatcgggaacctgccttcggtcagcaggccccatgttccgtggccacggaatctaaaggcgagctccagaaaatcctggcacatcttgaagacgaaaaccgcatccttcaaggagaactgcgcaggttgaaatggcaacacgaggaggcagccgaagctcccagtctggccgatgggtctaccgaggccgctaccgaccaccgtaacgaggagctactggctgaggcccgaatcttacgtcaacacaagtctagactcgagacaaggatgcagatcctcgaggatcataacaagcagttagaatcacaactccagagactgcgagagctgttgctgcaacctccaacagagtcggacgggagcggtagcgccggttcaagcttggcaagtagcccacagcagtcagaaggttctcatcccagggagaagggtcaaactacgcccgatacggaggccgctgatgatgtcgggtctaagagccaagacgtgagcctctgcctggaggatatcatggagaaactgcgccacgcctttccttctgttaggagttccgacgtgacggcgaatacactgttggccagctag

SEQ ID NO: 122286 - DNA, 2874 bp, Artificial Sequence
  derived and/or modified sequence
atgcagccaatggttatgcaggggtgcccctataccctgccgaggtgccatgactggcaggcagccgatcagttccatcactcatcctccttgaggagcacatgcccccacccccaggtgagggcggctgtgacctcacctgctccgcctcaggacggcgcaggagtaccgtgtctatcactaaaactacttaacgggtctgttggcgcatctgggcctcttgaaccacctgcaatgaacctgtgttggaatgaaattaagaaaaagagccacaacctaagagctcgcctcgaagctttcagcgatcatagcgggaagttacagctcccactgcaggagattattgattggttatcccagaaagatgaggaactgagtgcacagttgccactgcagggggatgtcgccctggtgcagcaggagaaagaaactcacgccgctttcatggaggaggtgaaatcaagaggaccttacatatattcagttttggagtccgcacaggcattcttgtcccagcaccctttcgaagagttagaagagcctcacagtgaatcaaaagatacttctcccaaacagcgcatccaaaacctatcgcgtttcgtctggaagcaggctaccgttgccagcgagctgtgggagaaactcaccgcacggtgtgtcgaccagcatagacatatcgaacgcacactagaacagctcctggagatccagggcgcaatggaagagctgtcgactacactgtcacaggctgagggagtgcgggctacctgggaacctatcggcgatctctttattgattccctccctgaacatatccaagctatcaagctgtttaaggaagagttcagtcccatgaaggacggggtgaagctcgtcaatgacctggctcatcagcttgctatctctgacgttcatctaagcatggaaaacagccaggcactggagcagataaatgtgcgctggaagcaactgcaagctagcgtatctgaacggctaaagcagctgcaggacgcccatagggacttcggccctggctcacaacatttcctgagctcaagcgtccaagtgccatgggaacgcgcaatcagcccaaataaagtaccgtattatatcaatcaccaggcacaaacaacctgttgggaccaccccaagatgacagagctctaccagaccctggctgacctgaacaacatcaagttctctgcttatcgaaccgccatgaagctaagaagggtccaaaaggctctgagattggacctggtaactctaacaactgcccttgagatcttcaacgagcacgacttgcaagctagtgaacacgtcatggacgttgtcgaggtgatccattgccttacagcactttacgagcgcctggaggaagagcggggtattttggtgaatgtcccactgtgcgtcgatatgtccctcaactggctcttgaatgtgttcgattccgggagatctggtaagatgagagccctgtcgttcaagactgggatcgcttgtctgtgcggcacggaggttaaggagaagctacaatatctgttcagtcaagtggccaactcgggcagtcagtgcgatcagcgacacctgggtgtgctgcttcatgaggccattcaggtccctcggcagttgggggaggtggccgcatttggcggtagtaacgtggaaccctctgtacggtcctgcttccgattctccacagggaagcctgtgatcgaggccagtcaatttctggagtgggttaaccttgaaccacaatctatggtctggctggcagtactgcatcgagtgaccatagccgagcaagttaagcaccagaccaaatgctctatttgtcggcagtgccccatcaaaggtttccggtataggagcctcaagcaattcaacgtcgacatttgccagacctgctttctgaccggcagagcatcaaagggtaataaattacattatccgattatggagtactacacacccaccacaagtagcgaaaacatgagagatttcgcaaccacactcaaaaacaagttccgtagcaagcactatttcagcaagcacccacagcgcggatatctccccgtgcagagcgtcttagaggccgactacagcgagacacccgcttcctccccaatgtggccacacgccgatacccacagtagaatcgagcactttgctagccggctcgctgagatggaatcacagaactgttccttctttaatgatagcctttctccggacgacagcatcgacgaagatcagtatctgctccggcacagtagcccaatcacagatagggagccagcattcggacagcaggcaccttgcagcgtggctaccgagagcaagggagagttgcagaaaatcctggcccacctggaagacgaaaatcgcatactgcagggtgagctcagacgacttaagtggcagcacgaggaagccgctgaggcaccttcccttgcagacggctccaccgaggccgctaccgatcatcggaacgaggaattgttagccgaggccagaattctccgccagcacaagtcgcgcttagagacgcgaatgcagatactcgaggaccataacaaacagttagaatctcagctccagcggctgagggagcttctgcttcagcccccaacagagtctgacggctctggcagtgccggaagcagcctggcttccagcccgcagcagtctgagggttctcatcccagagaaaagggtcagacaacacctgacacggaagccgctgacgacgtcggctcgaagtcacaggacgtctctctctgcttggaggacatcatggagaaactacggcatgcttttccatccgtacgaagtagcgacgtgaccgctaataccttgctggcaagctag

SEQ ID NO: 122287 - DNA, 2874 bp, Artificial Sequence
  derived and/or modified sequence
atgcagccaatggtcatgcagggatgtccctacacactgccccgttgccacgactggcaggcagccgatcagttccatcacagctcctcgcttcggtccacctgtccccatccccaggtgcgggcagcagtgacaagtcccgctccaccccaggacggcgctggcgtgccctgcctgtcactgaagctgctgaacggctctgtgggtgcgtctggacctttagagcctccagccatgaacttatgctggaacgaaatcaagaagaaatcgcacaacctaagagcaagactggaggctttctccgatcattcaggcaagttgcaactgccactgcaggaaatcatcgattggttaagccagaaagacgaagaactgagcgcacagttgccactccagggagacgtggccctggtgcagcaagaaaaagagacgcacgcagcatttatggaagaggtaaagagtagaggaccttacatatacagtgtgttagagagcgcacaggcattcttgagccagcatccctttgaggagctggaggaaccgcattctgagagtaaggatacatccccaaagcagaggatccagaacctatctagatttgtgtggaaacaggccaccgtggcctcagaactttgggagaagctcacagcccgatgtgttgaccaacatcgtcatattgaacgaaccctagagcaattgctggaaatacagggcgcaatggaagagcttagtaccactctctcccaagccgaaggggtccgtgcaacctgggaacccataggggacctctttatcgactcattgcctgagcatatccaagctattaagctgtttaaggaggaattcagcccaatgaaggacggcgttaaactggtcaacgatctcgctcatcagctggctatctccgacgttcatctatccatggaaaattctcaagccctcgaacagattaatgtgcggtggaaacagctccaagcgtcagtatctgagcggcttaaacagttgcaggatgcacaccgcgatttcggtccaggatcccagcatttcctctcctcaagcgtacaggtgccgtgggagagggcaattagccccaacaaggtaccttactatatcaaccatcaagctcaaacaacatgctgggatcatccaaaaatgaccgagctctatcagacattagccgacctgaacaacatcaaattctcggcataccgaacagccatgaagctgcgaagagtgcaaaaggccctccgtctggatctagtgacccttactaccgctcttgaaatattcaatgagcatgatttgcaggcaagcgaacacgtgatggacgtggtggaggtgattcactgcttgaccgccttatatgaaagacttgaagaggaaaggggcatcctggtgaatgtcccactgtgcgtagacatgtccctgaattggcttttgaatgttttcgactcaggacggtccggtaagatgcgggctctgtcctttaaaaccggaattgcctgtttatgcggcacagaggtaaaggagaaactccagtacctgtttagccaggtggccaacagcgggtctcagtgtgatcagagacacctgggtgtgttgttacacgaagccattcaggttcccagacaactgggcgaagtagccgctttcggcggtagtaacgtggaaccatctgtccggtcctgcttccgattctctaccggcaaaccagtaattgaggcctcccaattcctggagtgggtgaacctggagccacagtcgatggtttggcttgccgtgttgcaccgggtgacaatagccgaacaggtgaagcatcagacaaaatgtagtatctgtaggcagtgcccaattaagggtttccgttaccgtagcctcaaacagttcaatgttgacatctgtcagacttgctttctgacaggcagagcttccaaaggaaataaacttcactatccaatcatggagtactatacccccacaacttcttcagagaatatgagggattttgccacgaccctgaagaataagttcaggagcaaacattacttttccaagcacccacagcgtgggtatctgccagtgcagtctgtgctagaggccgactactcagaaacgcctgcttcatcacctatgtggccgcatgctgacacccactcccggatagagcattttgccagcagactagctgagatggagagtcagaattgtagtttctttaatgattcactgagccctgatgactccatcgacgaggaccagtacctgttaaggcactccagtcctattaccgacagagaacctgcttttggacagcaggcaccctgttctgtggctactgaatccaaaggcgagctacagaagattctggcacatctcgaggacgaaaataggattttacagggcgaactgagacggctgaaatggcagcacgaggaggccgcagaggccccttcattagcagacggctctaccgaggcggcaaccgatcaccgaaatgaggagctcttggccgaggccaggatccttagacaacataagagcaggctggagacccgtatgcagatacttgaggatcacaataagcagctggagtcccagttgcagcgcctgcgcgagctacttttgcaaccgcctaccgagtccgacggctctggttccgccggatcttctctggctagttccccacagcagagtgaaggttcacatccacgagaaaagggtcaaactactcccgatactgaagccgctgatgatgttggctcaaaatctcaagacgtttccctctgcctggaagacatcatggaaaaacttaggcacgcgttccccagtgtccgtagtagcgacgtgactgccaacaccctccttgcctcatag

SEQ ID NO: 122288 - DNA, 2640 bp, Artificial Sequence
  derived and/or modified sequence
atgaatctgtgttggaatgaaatcaagaaaaagagtcataacctccgcgctaggctggaggccttttctgatcattccggaaaattgcagcttcccctacaagagattatcgactggctgtctcagaaggacgaagaactgagtgcgcagctacccctccagggagatgtggccctcgttcagcaggagaaagagacccatgccgcatttatggaagaggtgaaatcacggggtccctatatttattctgtactggagtccgcccaggcatttttgtcccaacaccccttcgaagaactggaagagccccatagtgaatctaaggataccagccctaagcagagaattcagaacctcagccgctttgtgtggaaacaggcgacagtagcatctgagctgtgggagaaactcacagcccgatgtgtggaccagcacaggcacattgagaggaccctggagcagctcctcgagatccagggagccatggaggagctctccactacgctaagccaagccgagggggtccgggcaacttgggaaccaatcggagacctattcattgacagcctacccgagcacattcaggctataaagctgttcaaggaagagttttcacctatgaaggatggcgtcaaactggtcaatgatttagcccaccagctggccatctcggatgtgcaccttagcatggagaattctcaggcccttgaacagattaacgtccggtggaagcagctccaggcatcagtcagtgagcggctcaagcaattgcaggacgctcacagggattttggacccggaagtcagcacttcctgagctccagcgtacaggtgccgtgggagagggccatatcaccaaacaaggtgccgtactacatcaaccatcaagctcagactacatgctgggatcatcccaaaatgacagagttgtaccagaccctggcggatctcaataatattaagttttccgcatacagaaccgctatgaaactgcggagagtgcaaaaggccctgcgccttgatctggtgactttgacgaccgctctggaaatcttcaatgaacacgatttacaggcgagcgagcatgtcatggacgtcgttgaagttatccactgtctgacggctctctatgaacggcttgaagaggaaagagggatcctggtgaacgtgccactgtgcgttgacatgagcctgaactggctgttgaacgtctttgattctggccgtagcggcaagatgcgggcactcagcttcaaaactggaatagcctgtctatgcgggacagaggtgaaggaaaagctgcagtacctcttttctcaggtggctaacagcggaagccagtgtgaccaaaggcacctcggggtactgctgcatgaagcaatccaggttcccaggcaattaggcgaagtggccgctttcgggggaagcaacgtggagccgtctgtacgtagctgcttccgtttctccactggcaagcctgtgattgaagcatctcagtttctggagtgggtgaatctagaaccgcagtccatggtatggttggctgtgctccatagggtgaccattgccgaacaagtgaaacaccagaccaaatgtagcatttgccggcaatgcccaattaaagggttccgatataggtctcttaagcagtttaatgtcgacatctgccagacctgttttctgaccgggagggcatccaaaggaaacaaactgcactacccaataatggaatactataccccaacgacaagtagtgagaatatgcgcgacttcgcaacaactcttaagaacaaattccgcagcaagcactatttcagcaagcacccccagagaggatatctgccggtgcaaagtgtgctcgaggccgactattccgagacacctgcgtcctctccaatgtggcctcacgccgatactcactccaggatcgagcattttgcatcaagactcgcggagatggagagccagaactgctctttcttcaatgactcccttagccccgacgattcaatcgatgaggatcaatatcttctgcggcacagtagtccaataacagaccgagagcctgccttcggtcagcaggcgccttgttcggttgccaccgagagtaagggggagctgcagaaaatactggcccacctcgaagatgaaaataggatcttgcagggggagctgcgtaggctgaaatggcaacacgaggaggctgctgaagcaccatctctggcagacggtagtaccgaggccgcaaccgaccatcgcaacgaggaactgttagccgaggccagaattctgaggcaacacaaatcgagattagagactaggatgcagatcctggaggatcacaacaaacagttggagtctcaactgcagcggctaagagagctattgctgcagccacccactgaatccgatggatcagggagcgccggatcgtcactcgcatcttctccacagcagtctgagggttcacaccccagagaaaaaggccaaactactcccgacactgaggccgcagacgacgttggctctaagtcccaggacgtaagcctctgtctggaggatattatggaaaagctgagacacgcttttccgtcagtgagatcctctgacgttacagccaacacattgctggcgagctag

SEQ ID NO: 122289 - DNA, 2874 bp, Artificial Sequence
  derived and/or modified sequence
atgcagcccatggtgatgcagggctgcccctacaccctgcccagatgccacgactggcaggccgccgaccagttccaccacagcagcagcctgagaagcacctgcccccacccccaggtgagagccgccgtgaccagccccgcccccccccaggacggcgccggcgtgccctgcctgagcctgaagctgctgaacggcagcgtgggcgccagcggccccctggagccccccgccatgaacctgtgctggaacgagatcaagaagaagagccacaacctgagagccagactggaggccttcagcgaccacagcggcaagctgcagctgcccctgcaggagatcatcgactggctgagccagaaggacgaggagctgagcgcccagctgcccctgcagggcgacgtggccctggtgcagcaggagaaggagacccacgccgccttcatggaggaggtgaagagcagaggcccctacatctacagcgtgctggagagcgcccaggccttcctgagccagcaccccttcgaggagctggaggagccccacagcgagagcaaggacaccagccccaagcagagaatccagaacctgagcagattcgtgtggaagcaggccaccgtggccagcgagctgtgggagaagctgaccgccagatgcgtggaccagcacagacacatcgagagaaccctggagcagctgctggagatccagggcgccatggaggagctgagcaccaccctgagccaggccgagggcgtgagagccacctgggagcccatcggcgacctgttcatcgacagcctgcccgagcacatccaggccatcaagctgttcaaggaggagttcagccccatgaaggacggcgtgaagctggtgaacgacctggcccaccagctggccatcagcgacgtgcacctgagcatggagaacagccaggccctggagcagatcaacgtgagatggaagcagctgcaggccagcgtgagcgagagactgaagcagctgcaggacgcccacagagacttcggccccggcagccagcacttcctgagcagcagcgtgcaggtgccctgggagagagccatcagccccaacaaggtgccctactacatcaaccaccaggcccagaccacctgctgggaccaccccaagatgaccgagctgtaccagaccctggccgacctgaacaacatcaagttcagcgcctacagaaccgccatgaagctgagaagagtgcagaaggccctgagactggacctggtgaccctgaccaccgccctggagatcttcaacgagcacgacctgcaggccagcgagcacgtgatggacgtggtggaggtgatccactgcctgaccgccctgtacgagagactggaggaggagagaggcatcctggtgaacgtgcccctgtgcgtggacatgagcctgaactggctgctgaacgtgttcgacagcggcagaagcggcaagatgagagccctgagcttcaagaccggcatcgcctgcctgtgcggcaccgaggtgaaggagaagctgcagtacctgttcagccaggtggccaacagcggcagccagtgcgaccagagacacctgggcgtgctgctgcacgaggccatccaggtgcccagacagctgggcgaggtggccgccttcggcggcagcaacgtggagcccagcgtgagaagctgcttcagattcagcaccggcaagcccgtgatcgaggccagccagttcctggagtgggtgaacctggagccccagagcatggtgtggctggccgtgctgcacagagtgaccatcgccgagcaggtgaagcaccagaccaagtgcagcatctgcagacagtgccccatcaagggcttcagatacagaagcctgaagcagttcaacgtggacatctgccagacctgcttcctgaccggcagagccagcaagggcaacaagctgcactaccccatcatggagtactacacccccaccaccagcagcgagaacatgagagacttcgccaccaccctgaagaacaagttcagaagcaagcactacttcagcaagcacccccagagaggctacctgcccgtgcagagcgtgctggaggccgactacagcgagacccccgccagcagccccatgtggccccacgccgacacccacagcagaatcgagcacttcgccagcagactggccgagatggagagccagaactgcagcttcttcaacgacagcctgagccccgacgacagcatcgacgaggaccagtacctgctgagacacagcagccccatcaccgacagagagcccgccttcggccagcaggccccctgcagcgtggccaccgagagcaagggcgagctgcagaagatcctggcccacctggaggacgagaacagaatcctgcagggcgagctgagaagactgaagtggcagcacgaggaggccgccgaggcccccagcctggccgacggcagcaccgaggccgccaccgaccacagaaacgaggagctgctggccgaggccagaatcctgagacagcacaagagcagactggagaccagaatgcagatcctggaggaccacaacaagcagctggagagccagctgcagagactgagagagctgctgctgcagccccccaccgagagcgacggcagcggcagcgccggcagcagcctggccagcagcccccagcagagcgagggcagccaccccagagagaagggccagaccacccccgacaccgaggccgccgacgacgtgggcagcaagagccaggacgtgagcctgtgcctggaggacatcatggagaagctgagacacgccttccccagcgtgagaagcagcgacgtgaccgccaacaccctgctggccagctag

SEQ ID NO: 122290 - DNA, 2640 bp, Artificial Sequence
  derived and/or modified sequence
atgaacctgtgctggaacgagatcaagaagaagagccacaacctgagagccagactggaggccttcagcgaccacagcggcaagctgcagctgcccctgcaggagatcatcgactggctgagccagaaggacgaggagctgagcgcccagctgcccctgcagggcgacgtggccctggtgcagcaggagaaggagacccacgccgccttcatggaggaggtgaagagcagaggcccctacatctacagcgtgctggagagcgcccaggccttcctgagccagcaccccttcgaggagctggaggagccccacagcgagagcaaggacaccagccccaagcagagaatccagaacctgagcagattcgtgtggaagcaggccaccgtggccagcgagctgtgggagaagctgaccgccagatgcgtggaccagcacagacacatcgagagaaccctggagcagctgctggagatccagggcgccatggaggagctgagcaccaccctgagccaggccgagggcgtgagagccacctgggagcccatcggcgacctgttcatcgacagcctgcccgagcacatccaggccatcaagctgttcaaggaggagttcagccccatgaaggacggcgtgaagctggtgaacgacctggcccaccagctggccatcagcgacgtgcacctgagcatggagaacagccaggccctggagcagatcaacgtgagatggaagcagctgcaggccagcgtgagcgagagactgaagcagctgcaggacgcccacagagacttcggccccggcagccagcacttcctgagcagcagcgtgcaggtgccctgggagagagccatcagccccaacaaggtgccctactacatcaaccaccaggcccagaccacctgctgggaccaccccaagatgaccgagctgtaccagaccctggccgacctgaacaacatcaagttcagcgcctacagaaccgccatgaagctgagaagagtgcagaaggccctgagactggacctggtgaccctgaccaccgccctggagatcttcaacgagcacgacctgcaggccagcgagcacgtgatggacgtggtggaggtgatccactgcctgaccgccctgtacgagagactggaggaggagagaggcatcctggtgaacgtgcccctgtgcgtggacatgagcctgaactggctgctgaacgtgttcgacagcggcagaagcggcaagatgagagccctgagcttcaagaccggcatcgcctgcctgtgcggcaccgaggtgaaggagaagctgcagtacctgttcagccaggtggccaacagcggcagccagtgcgaccagagacacctgggcgtgctgctgcacgaggccatccaggtgcccagacagctgggcgaggtggccgccttcggcggcagcaacgtggagcccagcgtgagaagctgcttcagattcagcaccggcaagcccgtgatcgaggccagccagttcctggagtgggtgaacctggagccccagagcatggtgtggctggccgtgctgcacagagtgaccatcgccgagcaggtgaagcaccagaccaagtgcagcatctgcagacagtgccccatcaagggcttcagatacagaagcctgaagcagttcaacgtggacatctgccagacctgcttcctgaccggcagagccagcaagggcaacaagctgcactaccccatcatggagtactacacccccaccaccagcagcgagaacatgagagacttcgccaccaccctgaagaacaagttcagaagcaagcactacttcagcaagcacccccagagaggctacctgcccgtgcagagcgtgctggaggccgactacagcgagacccccgccagcagccccatgtggccccacgccgacacccacagcagaatcgagcacttcgccagcagactggccgagatggagagccagaactgcagcttcttcaacgacagcctgagccccgacgacagcatcgacgaggaccagtacctgctgagacacagcagccccatcaccgacagagagcccgccttcggccagcaggccccctgcagcgtggccaccgagagcaagggcgagctgcagaagatcctggcccacctggaggacgagaacagaatcctgcagggcgagctgagaagactgaagtggcagcacgaggaggccgccgaggcccccagcctggccgacggcagcaccgaggccgccaccgaccacagaaacgaggagctgctggccgaggccagaatcctgagacagcacaagagcagactggagaccagaatgcagatcctggaggaccacaacaagcagctggagagccagctgcagagactgagagagctgctgctgcagccccccaccgagagcgacggcagcggcagcgccggcagcagcctggccagcagcccccagcagagcgagggcagccaccccagagagaagggccagaccacccccgacaccgaggccgccgacgacgtgggcagcaagagccaggacgtgagcctgtgcctggaggacatcatggagaagctgagacacgccttccccagcgtgagaagcagcgacgtgaccgccaacaccctgctggccagctag

SEQ ID NO: 122291 - DNA, 7277 bp, Artificial Sequence
  derived and/or modified sequence
cgctttcctcctctgcttctaatgaattgacatctccaagagccgccacatctctggtagttttacaaaactgtccttgctcttcctgcgtttgcccagtcaagggtatttttgcctgaggtcggaatgatgctgttagtcctggtgatatgattgcatagcaacacagagcagctctgagaggggaggaggaggagaagaaggaagacagggaagtgggagagacagagggagagtgtgcatacagcagctgtcggcatccctgtctcagggacttctttgctgattcacagaggcagcccagccccggcctcccagcttacagctgccgcctgcttctcagacctgacggaatcagaagctacataatattcgccgtgtgagtggctatcgtaatagataacatttgaatatctactaaatgccagaaactatgaattaactcctctcaacaaagctaagaggtgcttaatgatcaatagttggtgcactgcctatcctcatcccccccatgagccttggtttttatgcaacctatggtcatgcagggatgcccttacaccctcccacgatgtcatgactggcaggcagctgaccagttccatcatagcagcagcctccgaagcacctgcccccaccctcaggttagagctgctgtcaccagccctgcacctcctcaagatggtgctggggttccctgcctaagcctaaagctgttgaacgggtctgttggtgcctctggacccctggaaccaccagccatgaatctgtgttggaatgaaataaaaaagaagtctcacaacctccgcgctcgcctagaggccttctcagaccacagtggaaagcttcagctccctcttcaagagattattgactggctcagccaaaaggatgaggagttgtcagctcagctgcccctacagggggatgtggccctggtgcaacaggagaaggagacacatgcggcctttatggaagaagtcaagtctcggggcccctacatctattctgtgctggagtcagctcaggccttcctgtcccagcacccatttgaggagttagaggagcctcattctgagagcaaagatacctccccgaaacagcggatccagaatctcagccgctttgtatggaagcaggcgacggtggccagtgaactgtgggagaagttgacagcccgctgtgtggaccagcaccgtcacattgagcggactctggagcagctcttggagattcaaggggcaatggaggaactaagcactactctgagccaagctgagggagtccgagccacttgggagcccattggggatctcttcattgattcactcccagagcacatccaggctattaagctgttcaaagaagaattctcccccatgaaagatggagtaaagttggtgaatgatctggcccaccaacttgccatttctgatgtgcacttgtcaatggagaattcccaggccctggaacagatcaacgtccgatggaaacaactacaggcgtcagttagtgagaggcttaagcagctccaggatgcccaccgggactttgggcctgggtcacagcactttctctcctcctctgtccaggttccctgggaaagagcaatttcacccaataaagttccctactacatcaaccaccaggctcagaccacatgctgggaccatcccaagatgacagagttataccaaaccctagctgatctgaacaacattaagttctcagcttatcgcactgccatgaaactccgcagagtccagaaagccctgcgcttggacctggtaactttaaccacagccctggaaatcttcaatgagcatgatctgcaggccagtgagcacgtgatggatgtggtagaggtcattcactgcctgactgccttatatgaacgtttggaggaggaaagaggcatcctggtcaacgtgccactctgtgtggacatgagcctcaattggctcctcaatgtttttgatagtggtcgcagcggaaagatgcgggcattgtcttttaagactggcattgcatgcttgtgtggcacggaagtgaaggaaaaacttcagtacctcttcagccaagtggccaactcaggcagccagtgtgaccagcgccaccttggtgtcctgcttcatgaggccattcaggtgccccgtcagctgggtgaagtggcagcctttgggggcagcaatgtggagcccagtgtccgtagttgcttccgttttagcaccgggaagccagtcattgaagcatcccagttcctggagtgggtcaacctggagccccagtccatggtgtggctggctgttctgcatcgggtcaccattgctgagcaagtgaagcatcagaccaagtgctctatctgtaggcagtgccccatcaaggggttcaggtaccggagtctgaagcaattcaacgttgacatctgccagacctgcttcttgacaggcagggccagcaaaggcaataagctgcactaccccatcatggagtattacacaccgaccacatccagtgagaacatgagggactttgccacaaccttaaagaacaaattccgctccaagcattatttcagcaaacaccctcagcgaggttatctgcctgtgcaatcagtgctggaggctgactacagtgagacgccggcttcttccccgatgtggccacacgccgacacacactcccgaattgagcattttgccagcaggcttgctgagatggaaagtcaaaattgctccttctttaatgacagcttgtccccagatgacagcatagacgaggaccagtacctgctgcggcactccagccccatcacagaccgggagccagcctttggacagcaggctccatgcagtgtggccacagaaagcaaaggggagctacagaagatcctggcccacttggaagatgagaaccggattctccagggagagctgaggcgcctgaagtggcagcatgaggaggcagctgaggcacccagtctggctgacggctccactgaggcagcaacagaccaccgcaatgaggagcttctggccgaggcccgtatccttcggcaacataagagccgcctggagacgcgcatgcagatcctcgaagatcacaacaagcagctagagtcccagctgcagcgtctgagggagcttctcctgcagccacccaccgaatcagatggcagtggctctgcaggctcgtccctagcttcctctccacagcagtcagaaggcagtcacccccgggagaagggacagactactccagataccgaggctgcagatgatgtggggtcaaagagccaggatgtcagcctgtgcttggaggacatcatggagaaactccgtcatgccttccccagtgtgcgaagttctgatgtgactgccaacaccctgctggcctcttgatggagccagatccccatcctatagttcatagtcctctcctggttccggtcaaagcctttcctcagccttcacccaacctttccagtttccactggccccacattcctcaactagtattatttgggctctgggcagcagcagggatctggtggtatgtgaggtgcatgcgggcagtgatgggagaaggggaggcatgattcttctgaccctagaaatgttccctttaatcttcaagttcgagatcagccctttaagtacctttctgttgcagcccaggcaaatatcacttggccattcagatggggagcagagaagctgccttgcagagctaagcggtacatgttggcccctcttccttctccgtggaattatggaaagagagaagcctaattaccccaaggttccatccagcattatgaatccacagggtttacccctactctctggcgcaactcagggaggcaaaagggtatccccgagacaccttccccaccccaagtgcccctgaaaaagtctgggcagtgtgtgttctattacttcagctccaggacagattgctagccatcctaatgctacctaggtattggtttctcctcaaatatcttcattttctttagcctcagtccctgacagaccttccttaaggggagaacagttcattctggttcttctacgttatatttggaagcattaaatccatacttatgggtttagattttttttttgccccacatcttcctatttcttaaagtcctcagcattttgagagacccactgagttgcgagttgctctggaaacctggctgaagccaccctttgctcctctgagtctgtcctcacagacctgaggacacagtggcagcttgctgagcaagggagtgttgctttccttgggtaaggaagaggaagcccacctcaagtctggagtagtatgactgccatccaacacccttccaggctgtgacccttctagctctcaggctgaatcaggtgaggtggctgattgtccccagctaatcataaggcatttgcaactggctaccgtgtgtagtggcccctccataggagccacaggccacaaatcaggaagctggccactttccacccagacaacaacagcaaggccttcctgtgcctaaaattgttatttctaactctggaaggtgaatccaatcctcaaactgaactagctcttcctaggcgacatataccatgatctctttatccagaaactgttcagaatagatagtaggggtgggggagtgggcttgggaatgttgaatagattcagagcccacttaggcagctttctcccaagaggagctttataacctagagccctgcagttgacttcatttgcctaagtttatatacatacatatctattctacatatctactgtacatcagtgctctcctggcctcactcacacattaaattctaatacctcttgaagtattaatgttctgccttgctctttgttagccccagcctctggttggaaagatagatgtatcctggctgttcccctaggatatctctctccattgatgtttggggtgggctgtcctcaagaccaaagcaacagaaacctgtggtcacagagaatctaacaggaagagtcactgttctcttcactcattccaaatcttgttcccttgagacctgggccttgggtgaattttcctgggctcccctaaatggttcaggtgccaaaatagagcaaacccaagctctgcccaccccatgcagaaaaggacaaacaggcctttattagcctttgccagctaagacacagagaacattctctggtcccttccagctcttatggtctcactcagggctaaagaaagcaacagttgccaccacaatcaggagggagtgacggttggggtgttgtattataatccagcagtgggccagtgggtagaactgctaggaacctagtttgatctgctgcaggggaggcagggcagtggcttgggtccagaagcttagggttgcctcctccaccactaagtcacaggtccagggtgtcagacttcacagcataacatctgccttagtgttcatgaggtctctgggcaggagaactgggtatctggatagatggttgagcaggtggtaggcgggcatcaatcatagaacctgggcatcagtcagagtgggagcatatttgtagaagcctagattgtgggcgggaatgtgggacggagggctcaaggactttggaggcatatgcctgcctaagccttaggcgggtacatgttatggagcaattttttaccaggaaagtcctggaaaatcttttctgttatccccaccccacctgagagctcttgggctgctgagggcctgtggcaactgcagtgggccaggcatggtagaaaagatgtagatcttgttatgtaggatttgcgttgtaggtggactgaagcagcaggtcaagagttgaattctcactaaggggtcactgacattttgtggtcctgtgtttaccttaatgcctaaggtgagtgtattgttcaagggtccagggacagtcactgcagtatgtgtggggaattttcccacagtaaggtaaatggatccttgggtactatgaatccaacttggggttggatttaccaaaatgtgttgtatgttgttagacatcttgttgtgtattagtcttctaaggatattgtgcatggcactgtgtagtttatagccctacactggaaggatggtgaagggagttgctagattgatagcctaaagaaaaccttctgactgtgggattagcatcaatgataaggaatgtgagcatttgctggggttgttgtcaaatagtatcagagaacagttaggactgagaggtgatttcttcttgacagaatttgatagaggccaaaaagccattacgaggatacctctgcttccagtgacagcagagtggattcacattgattgggcattgtcacggaaggctgactagctggaggacatcaggctgtgctatgcttccctagggaggacatgtgcccttccctccagattagaaaggctagaatcaagagtttcaagtgctcattttcttcaaggtccaaggttgggaactatttccctacagagaaatctgtttgagtttctggtgctccaggaaatgggttggcaggacacagaaatgagaaaccctgaggccaggaagaggccaatcctaggagatgttttccctccagattcattttaaggaatatctgtgcttcctgatgtgtgtgcttgagatttgggctctatatccagcatttgaactcacattctcagtggcagagtcatggtctgtggcaccatttcaaggccaaaaatcccatccaatttcccttcacatagatgacagaaaagcaagaaagtagctgccttaactcgaacagttctgggaaaaaaactgggggccttgtcctgaggctgtggagacttaattcttcagctgggtggttcccgtaggaacaaggaacactttagctacttcttactcttttaacaccaatggctgtgggagaaggaaaggctcaaggccagggctcagctcgcagagtccatcttctcccacagttgccacatttgagagggggcctgctgaatgcccttgctgtcccctatggcagtattgaggcctgaccgaagtctggtatgctgcttgctggctacaagaactggtcacaggatgaaaattggggaaaggatttgggggaggtgacaagggtggcatggaagtctaggggacaaagggacagggttgggaacaaattggttaactttgattgccactcactgtggtgctttccccctttcccttgaattctgctttgaaaagaataaatttgtacttgttta

SEQ ID NO: 122292 - DNA, 7018 bp, Artificial Sequence
  derived and/or modified sequence
tgcttctcaggctcttccgctttcctcctctgcttctaatgaattgacatctccaagagccgccacatctctggtagttttacaaaactgtccttgctcttcctgcgtttgcccagtcaagggtatttttgcctgagaggcagcccagccccggcctcccagcttacagctgccgcctgcttctcagacctgacggaatcagaaggtgcttaatgatcaatagttggtgcactgcctatcctcatcccccccatgagccttggtttttatgcaacctatggtcatgcagggatgcccttacaccctcccacgatgtcatgactggcaggcagctgaccagttccatcatagcagcagcctccgaagcacctgcccccaccctcaggttagagctgctgtcaccagccctgcacctcctcaagatggtgctggggttccctgcctaagcctaaagctgttgaacgggtctgttggtgcctctggacccctggaaccaccagccatgaatctgtgttggaatgaaataaaaaagaagtctcacaacctccgcgctcgcctagaggccttctcagaccacagtggaaagcttcagctccctcttcaagagattattgactggctcagccaaaaggatgaggagttgtcagctcagctgcccctacagggggatgtggccctggtgcaacaggagaaggagacacatgcggcctttatggaagaagtcaagtctcggggcccctacatctattctgtgctggagtcagctcaggccttcctgtcccagcacccatttgaggagttagaggagcctcattctgagagcaaagatacctccccgaaacagcggatccagaatctcagccgctttgtatggaagcaggcgacggtggccagtgaactgtgggagaagttgacagcccgctgtgtggaccagcaccgtcacattgagcggactctggagcagctcttggagattcaaggggcaatggaggaactaagcactactctgagccaagctgagggagtccgagccacttgggagcccattggggatctcttcattgattcactcccagagcacatccaggctattaagctgttcaaagaagaattctcccccatgaaagatggagtaaagttggtgaatgatctggcccaccaacttgccatttctgatgtgcacttgtcaatggagaattcccaggccctggaacagatcaacgtccgatggaaacaactacaggcgtcagttagtgagaggcttaagcagctccaggatgcccaccgggactttgggcctgggtcacagcactttctctcctcctctgtccaggttccctgggaaagagcaatttcacccaataaagttccctactacatcaaccaccaggctcagaccacatgctgggaccatcccaagatgacagagttataccaaaccctagctgatctgaacaacattaagttctcagcttatcgcactgccatgaaactccgcagagtccagaaagccctgcgcttggacctggtaactttaaccacagccctggaaatcttcaatgagcatgatctgcaggccagtgagcacgtgatggatgtggtagaggtcattcactgcctgactgccttatatgaacgtttggaggaggaaagaggcatcctggtcaacgtgccactctgtgtggacatgagcctcaattggctcctcaatgtttttgatagtggtcgcagcggaaagatgcgggcattgtcttttaagactggcattgcatgcttgtgtggcacggaagtgaaggaaaaacttcagtacctcttcagccaagtggccaactcaggcagccagtgtgaccagcgccaccttggtgtcctgcttcatgaggccattcaggtgccccgtcagctgggtgaagtggcagcctttgggggcagcaatgtggagcccagtgtccgtagttgcttccgttttagcaccgggaagccagtcattgaagcatcccagttcctggagtgggtcaacctggagccccagtccatggtgtggctggctgttctgcatcgggtcaccattgctgagcaagtgaagcatcagaccaagtgctctatctgtaggcagtgccccatcaaggggttcaggtaccggagtctgaagcaattcaacgttgacatctgccagacctgcttcttgacaggcagggccagcaaaggcaataagctgcactaccccatcatggagtattacacaccgaccacatccagtgagaacatgagggactttgccacaaccttaaagaacaaattccgctccaagcattatttcagcaaacaccctcagcgaggttatctgcctgtgcaatcagtgctggaggctgactacagtgagacgccggcttcttccccgatgtggccacacgccgacacacactcccgaattgagcattttgccagcaggcttgctgagatggaaagtcaaaattgctccttctttaatgacagcttgtccccagatgacagcatagacgaggaccagtacctgctgcggcactccagccccatcacagaccgggagccagcctttggacagcaggctccatgcagtgtggccacagaaagcaaaggggagctacagaagatcctggcccacttggaagatgagaaccggattctccagggagagctgaggcgcctgaagtggcagcatgaggaggcagctgaggcacccagtctggctgacggctccactgaggcagcaacagaccaccgcaatgaggagcttctggccgaggcccgtatccttcggcaacataagagccgcctggagacgcgcatgcagatcctcgaagatcacaacaagcagctagagtcccagctgcagcgtctgagggagcttctcctgcagccacccaccgaatcagatggcagtggctctgcaggctcgtccctagcttcctctccacagcagtcagaaggcagtcacccccgggagaagggacagactactccagataccgaggctgcagatgatgtggggtcaaagagccaggatgtcagcctgtgcttggaggacatcatggagaaactccgtcatgccttccccagtgtgcgaagttctgatgtgactgccaacaccctgctggcctcttgatggagccagatccccatcctatagttcatagtcctctcctggttccggtcaaagcctttcctcagccttcacccaacctttccagtttccactggccccacattcctcaactagtattatttgggctctgggcagcagcagggatctggtggtatgtgaggtgcatgcgggcagtgatgggagaaggggaggcatgattcttctgaccctagaaatgttccctttaatcttcaagttcgagatcagccctttaagtacctttctgttgcagcccaggcaaatatcacttggccattcagatggggagcagagaagctgccttgcagagctaagcggtacatgttggcccctcttccttctccgtggaattatggaaagagagaagcctaattaccccaaggttccatccagcattatgaatccacagggtttacccctactctctggcgcaactcagggaggcaaaagggtatccccgagacaccttccccaccccaagtgcccctgaaaaagtctgggcagtgtgtgttctattacttcagctccaggacagattgctagccatcctaatgctacctaggtattggtttctcctcaaatatcttcattttctttagcctcagtccctgacagaccttccttaaggggagaacagttcattctggttcttctacgttatatttggaagcattaaatccatacttatgggtttagattttttttttgccccacatcttcctatttcttaaagtcctcagcattttgagagacccactgagttgcgagttgctctggaaacctggctgaagccaccctttgctcctctgagtctgtcctcacagacctgaggacacagtggcagcttgctgagcaagggagtgttgctttccttgggtaaggaagaggaagcccacctcaagtctggagtagtatgactgccatccaacacccttccaggctgtgacccttctagctctcaggctgaatcaggtgaggtggctgattgtccccagctaatcataaggcatttgcaactggctaccgtgtgtagtggcccctccataggagccacaggccacaaatcaggaagctggccactttccacccagacaacaacagcaaggccttcctgtgcctaaaattgttatttctaactctggaaggtgaatccaatcctcaaactgaactagctcttcctaggcgacatataccatgatctctttatccagaaactgttcagaatagatagtaggggtgggggagtgggcttgggaatgttgaatagattcagagcccacttaggcagctttctcccaagaggagctttataacctagagccctgcagttgacttcatttgcctaagtttatatacatacatatctattctacatatctactgtacatcagtgctctcctggcctcactcacacattaaattctaatacctcttgaagtattaatgttctgccttgctctttgttagccccagcctctggttggaaagatagatgtatcctggctgttcccctaggatatctctctccattgatgtttggggtgggctgtcctcaagaccaaagcaacagaaacctgtggtcacagagaatctaacaggaagagtcactgttctcttcactcattccaaatcttgttcccttgagacctgggccttgggtgaattttcctgggctcccctaaatggttcaggtgccaaaatagagcaaacccaagctctgcccaccccatgcagaaaaggacaaacaggcctttattagcctttgccagctaagacacagagaacattctctggtcccttccagctcttatggtctcactcagggctaaagaaagcaacagttgccaccacaatcaggagggagtgacggttggggtgttgtattataatccagcagtgggccagtgggtagaactgctaggaacctagtttgatctgctgcaggggaggcagggcagtggcttgggtccagaagcttagggttgcctcctccaccactaagtcacaggtccagggtgtcagacttcacagcataacatctgccttagtgttcatgaggtctctgggcaggagaactgggtatctggatagatggttgagcaggtggtaggcgggcatcaatcatagaacctgggcatcagtcagagtgggagcatatttgtagaagcctagattgtgggcgggaatgtgggacggagggctcaaggactttggaggcatatgcctgcctaagccttaggcgggtacatgttatggagcaattttttaccaggaaagtcctggaaaatcttttctgttatccccaccccacctgagagctcttgggctgctgagggcctgtggcaactgcagtgggccaggcatggtagaaaagatgtagatcttgttatgtaggatttgcgttgtaggtggactgaagcagcaggtcaagagttgaattctcactaaggggtcactgacattttgtggtcctgtgtttaccttaatgcctaaggtgagtgtattgttcaagggtccagggacagtcactgcagtatgtgtggggaattttcccacagtaaggtaaatggatccttgggtactatgaatccaacttggggttggatttaccaaaatgtgttgtatgttgttagacatcttgttgtgtattagtcttctaaggatattgtgcatggcactgtgtagtttatagccctacactggaaggatggtgaagggagttgctagattgatagcctaaagaaaaccttctgactgtgggattagcatcaatgataaggaatgtgagcatttgctggggttgttgtcaaatagtatcagagaacagttaggactgagaggtgatttcttcttgacagaatttgatagaggccaaaaagccattacgaggatacctctgcttccagtgacagcagagtggattcacattgattgggcattgtcacggaaggctgactagctggaggacatcaggctgtgctatgcttccctagggaggacatgtgcccttccctccagattagaaaggctagaatcaagagtttcaagtgctcattttcttcaaggtccaaggttgggaactatttccctacagagaaatctgtttgagtttctggtgctccaggaaatgggttggcaggacacagaaatgagaaaccctgaggccaggaagaggccaatcctaggagatgttttccctccagattcattttaaggaatatctgtgcttcctgatgtgtgtgcttgagatttgggctctatatccagcatttgaactcacattctcagtggcagagtcatggtctgtggcaccatttcaaggccaaaaatcccatccaatttcccttcacatagatgacagaaaagcaagaaagtagctgccttaactcgaacagttctgggaaaaaaactgggggccttgtcctgaggctgtggagacttaattcttcagctgggtggttcccgtaggaacaaggaacactttagctacttcttactcttttaacaccaatggctgtgggagaaggaaaggctcaaggccagggctcagctcgcagagtccatcttctcccacagttgccacatttgagagggggcctgctgaatgcccttgctgtcccctatggcagtattgaggcctgaccgaagtctggtatgctgcttgctggctacaagaactggtcacaggatgaaaattggggaaaggatttgggggaggtgacaagggtggcatggaagtctaggggacaaagggacagggttgggaacaaattggttaactttgattgccactcactgtggtgctttccccctttcccttgaattctgctttgaaaagaataaatttgtacttgttta

SEQ ID NO: 122293 - DNA, 6852 bp, Artificial Sequence
  derived and/or modified sequence
ctaggtcttgactcgaaatctctctgtattgcttttccaggtgcttaatgatcaatagttggtgcactgcctatcctcatcccccccatgagccttggtttttatgcaacctatggtcatgcagggatgcccttacaccctcccacgatgtcatgactggcaggcagctgaccagttccatcatagcagcagcctccgaagcacctgcccccaccctcaggttagagctgctgtcaccagccctgcacctcctcaagatggtgctggggttccctgcctaagcctaaagctgttgaacgggtctgttggtgcctctggacccctggaaccaccagccatgaatctgtgttggaatgaaataaaaaagaagtctcacaacctccgcgctcgcctagaggccttctcagaccacagtggaaagcttcagctccctcttcaagagattattgactggctcagccaaaaggatgaggagttgtcagctcagctgcccctacagggggatgtggccctggtgcaacaggagaaggagacacatgcggcctttatggaagaagtcaagtctcggggcccctacatctattctgtgctggagtcagctcaggccttcctgtcccagcacccatttgaggagttagaggagcctcattctgagagcaaagatacctccccgaaacagcggatccagaatctcagccgctttgtatggaagcaggcgacggtggccagtgaactgtgggagaagttgacagcccgctgtgtggaccagcaccgtcacattgagcggactctggagcagctcttggagattcaaggggcaatggaggaactaagcactactctgagccaagctgagggagtccgagccacttgggagcccattggggatctcttcattgattcactcccagagcacatccaggctattaagctgttcaaagaagaattctcccccatgaaagatggagtaaagttggtgaatgatctggcccaccaacttgccatttctgatgtgcacttgtcaatggagaattcccaggccctggaacagatcaacgtccgatggaaacaactacaggcgtcagttagtgagaggcttaagcagctccaggatgcccaccgggactttgggcctgggtcacagcactttctctcctcctctgtccaggttccctgggaaagagcaatttcacccaataaagttccctactacatcaaccaccaggctcagaccacatgctgggaccatcccaagatgacagagttataccaaaccctagctgatctgaacaacattaagttctcagcttatcgcactgccatgaaactccgcagagtccagaaagccctgcgcttggacctggtaactttaaccacagccctggaaatcttcaatgagcatgatctgcaggccagtgagcacgtgatggatgtggtagaggtcattcactgcctgactgccttatatgaacgtttggaggaggaaagaggcatcctggtcaacgtgccactctgtgtggacatgagcctcaattggctcctcaatgtttttgatagtggtcgcagcggaaagatgcgggcattgtcttttaagactggcattgcatgcttgtgtggcacggaagtgaaggaaaaacttcagtacctcttcagccaagtggccaactcaggcagccagtgtgaccagcgccaccttggtgtcctgcttcatgaggccattcaggtgccccgtcagctgggtgaagtggcagcctttgggggcagcaatgtggagcccagtgtccgtagttgcttccgttttagcaccgggaagccagtcattgaagcatcccagttcctggagtgggtcaacctggagccccagtccatggtgtggctggctgttctgcatcgggtcaccattgctgagcaagtgaagcatcagaccaagtgctctatctgtaggcagtgccccatcaaggggttcaggtaccggagtctgaagcaattcaacgttgacatctgccagacctgcttcttgacaggcagggccagcaaaggcaataagctgcactaccccatcatggagtattacacaccgaccacatccagtgagaacatgagggactttgccacaaccttaaagaacaaattccgctccaagcattatttcagcaaacaccctcagcgaggttatctgcctgtgcaatcagtgctggaggctgactacagtgagacgccggcttcttccccgatgtggccacacgccgacacacactcccgaattgagcattttgccagcaggcttgctgagatggaaagtcaaaattgctccttctttaatgacagcttgtccccagatgacagcatagacgaggaccagtacctgctgcggcactccagccccatcacagaccgggagccagcctttggacagcaggctccatgcagtgtggccacagaaagcaaaggggagctacagaagatcctggcccacttggaagatgagaaccggattctccagggagagctgaggcgcctgaagtggcagcatgaggaggcagctgaggcacccagtctggctgacggctccactgaggcagcaacagaccaccgcaatgaggagcttctggccgaggcccgtatccttcggcaacataagagccgcctggagacgcgcatgcagatcctcgaagatcacaacaagcagctagagtcccagctgcagcgtctgagggagcttctcctgcagccacccaccgaatcagatggcagtggctctgcaggctcgtccctagcttcctctccacagcagtcagaaggcagtcacccccgggagaagggacagactactccagataccgaggctgcagatgatgtggggtcaaagagccaggatgtcagcctgtgcttggaggacatcatggagaaactccgtcatgccttccccagtgtgcgaagttctgatgtgactgccaacaccctgctggcctcttgatggagccagatccccatcctatagttcatagtcctctcctggttccggtcaaagcctttcctcagccttcacccaacctttccagtttccactggccccacattcctcaactagtattatttgggctctgggcagcagcagggatctggtggtatgtgaggtgcatgcgggcagtgatgggagaaggggaggcatgattcttctgaccctagaaatgttccctttaatcttcaagttcgagatcagccctttaagtacctttctgttgcagcccaggcaaatatcacttggccattcagatggggagcagagaagctgccttgcagagctaagcggtacatgttggcccctcttccttctccgtggaattatggaaagagagaagcctaattaccccaaggttccatccagcattatgaatccacagggtttacccctactctctggcgcaactcagggaggcaaaagggtatccccgagacaccttccccaccccaagtgcccctgaaaaagtctgggcagtgtgtgttctattacttcagctccaggacagattgctagccatcctaatgctacctaggtattggtttctcctcaaatatcttcattttctttagcctcagtccctgacagaccttccttaaggggagaacagttcattctggttcttctacgttatatttggaagcattaaatccatacttatgggtttagattttttttttgccccacatcttcctatttcttaaagtcctcagcattttgagagacccactgagttgcgagttgctctggaaacctggctgaagccaccctttgctcctctgagtctgtcctcacagacctgaggacacagtggcagcttgctgagcaagggagtgttgctttccttgggtaaggaagaggaagcccacctcaagtctggagtagtatgactgccatccaacacccttccaggctgtgacccttctagctctcaggctgaatcaggtgaggtggctgattgtccccagctaatcataaggcatttgcaactggctaccgtgtgtagtggcccctccataggagccacaggccacaaatcaggaagctggccactttccacccagacaacaacagcaaggccttcctgtgcctaaaattgttatttctaactctggaaggtgaatccaatcctcaaactgaactagctcttcctaggcgacatataccatgatctctttatccagaaactgttcagaatagatagtaggggtgggggagtgggcttgggaatgttgaatagattcagagcccacttaggcagctttctcccaagaggagctttataacctagagccctgcagttgacttcatttgcctaagtttatatacatacatatctattctacatatctactgtacatcagtgctctcctggcctcactcacacattaaattctaatacctcttgaagtattaatgttctgccttgctctttgttagccccagcctctggttggaaagatagatgtatcctggctgttcccctaggatatctctctccattgatgtttggggtgggctgtcctcaagaccaaagcaacagaaacctgtggtcacagagaatctaacaggaagagtcactgttctcttcactcattccaaatcttgttcccttgagacctgggccttgggtgaattttcctgggctcccctaaatggttcaggtgccaaaatagagcaaacccaagctctgcccaccccatgcagaaaaggacaaacaggcctttattagcctttgccagctaagacacagagaacattctctggtcccttccagctcttatggtctcactcagggctaaagaaagcaacagttgccaccacaatcaggagggagtgacggttggggtgttgtattataatccagcagtgggccagtgggtagaactgctaggaacctagtttgatctgctgcaggggaggcagggcagtggcttgggtccagaagcttagggttgcctcctccaccactaagtcacaggtccagggtgtcagacttcacagcataacatctgccttagtgttcatgaggtctctgggcaggagaactgggtatctggatagatggttgagcaggtggtaggcgggcatcaatcatagaacctgggcatcagtcagagtgggagcatatttgtagaagcctagattgtgggcgggaatgtgggacggagggctcaaggactttggaggcatatgcctgcctaagccttaggcgggtacatgttatggagcaattttttaccaggaaagtcctggaaaatcttttctgttatccccaccccacctgagagctcttgggctgctgagggcctgtggcaactgcagtgggccaggcatggtagaaaagatgtagatcttgttatgtaggatttgcgttgtaggtggactgaagcagcaggtcaagagttgaattctcactaaggggtcactgacattttgtggtcctgtgtttaccttaatgcctaaggtgagtgtattgttcaagggtccagggacagtcactgcagtatgtgtggggaattttcccacagtaaggtaaatggatccttgggtactatgaatccaacttggggttggatttaccaaaatgtgttgtatgttgttagacatcttgttgtgtattagtcttctaaggatattgtgcatggcactgtgtagtttatagccctacactggaaggatggtgaagggagttgctagattgatagcctaaagaaaaccttctgactgtgggattagcatcaatgataaggaatgtgagcatttgctggggttgttgtcaaatagtatcagagaacagttaggactgagaggtgatttcttcttgacagaatttgatagaggccaaaaagccattacgaggatacctctgcttccagtgacagcagagtggattcacattgattgggcattgtcacggaaggctgactagctggaggacatcaggctgtgctatgcttccctagggaggacatgtgcccttccctccagattagaaaggctagaatcaagagtttcaagtgctcattttcttcaaggtccaaggttgggaactatttccctacagagaaatctgtttgagtttctggtgctccaggaaatgggttggcaggacacagaaatgagaaaccctgaggccaggaagaggccaatcctaggagatgttttccctccagattcattttaaggaatatctgtgcttcctgatgtgtgtgcttgagatttgggctctatatccagcatttgaactcacattctcagtggcagagtcatggtctgtggcaccatttcaaggccaaaaatcccatccaatttcccttcacatagatgacagaaaagcaagaaagtagctgccttaactcgaacagttctgggaaaaaaactgggggccttgtcctgaggctgtggagacttaattcttcagctgggtggttcccgtaggaacaaggaacactttagctacttcttactcttttaacaccaatggctgtgggagaaggaaaggctcaaggccagggctcagctcgcagagtccatcttctcccacagttgccacatttgagagggggcctgctgaatgcccttgctgtcccctatggcagtattgaggcctgaccgaagtctggtatgctgcttgctggctacaagaactggtcacaggatgaaaattggggaaaggatttgggggaggtgacaagggtggcatggaagtctaggggacaaagggacagggttgggaacaaattggttaactttgattgccactcactgtggtgctttccccctttcccttgaattctgctttgaaaagaataaatttgtacttgttt

SEQ ID NO: 122294 - DNA, 6835 bp, Artificial Sequence
  derived and/or modified sequence
tagcaacacagagcagctctgagaggggaggaggaggagaagaaggaagacagggaagtgggagagacagagggagagtgtgcatacagcagctgtcggcatccctgtctcagggacttctttgctgattcacagaggcagcccagccccggcctcccagcttacagctgccgcctgcttctcagacctgacggaatcagaaggttagagctgctgtcaccagccctgcacctcctcaagatggtgctggggttccctgcctaagcctaaagctgttgaacgggtctgttggtgcctctggacccctggaaccaccagccatgaatctgtgttggaatgaaataaaaaagaagtctcacaacctccgcgctcgcctagaggccttctcagaccacagtggaaagcttcagctccctcttcaagagattattgactggctcagccaaaaggatgaggagttgtcagctcagctgcccctacagggggatgtggccctggtgcaacaggagaaggagacacatgcggcctttatggaagaagtcaagtctcggggcccctacatctattctgtgctggagtcagctcaggccttcctgtcccagcacccatttgaggagttagaggagcctcattctgagagcaaagatacctccccgaaacagcggatccagaatctcagccgctttgtatggaagcaggcgacggtggccagtgaactgtgggagaagttgacagcccgctgtgtggaccagcaccgtcacattgagcggactctggagcagctcttggagattcaaggggcaatggaggaactaagcactactctgagccaagctgagggagtccgagccacttgggagcccattggggatctcttcattgattcactcccagagcacatccaggctattaagctgttcaaagaagaattctcccccatgaaagatggagtaaagttggtgaatgatctggcccaccaacttgccatttctgatgtgcacttgtcaatggagaattcccaggccctggaacagatcaacgtccgatggaaacaactacaggcgtcagttagtgagaggcttaagcagctccaggatgcccaccgggactttgggcctgggtcacagcactttctctcctcctctgtccaggttccctgggaaagagcaatttcacccaataaagttccctactacatcaaccaccaggctcagaccacatgctgggaccatcccaagatgacagagttataccaaaccctagctgatctgaacaacattaagttctcagcttatcgcactgccatgaaactccgcagagtccagaaagccctgcgcttggacctggtaactttaaccacagccctggaaatcttcaatgagcatgatctgcaggccagtgagcacgtgatggatgtggtagaggtcattcactgcctgactgccttatatgaacgtttggaggaggaaagaggcatcctggtcaacgtgccactctgtgtggacatgagcctcaattggctcctcaatgtttttgatagtggtcgcagcggaaagatgcgggcattgtcttttaagactggcattgcatgcttgtgtggcacggaagtgaaggaaaaacttcagtacctcttcagccaagtggccaactcaggcagccagtgtgaccagcgccaccttggtgtcctgcttcatgaggccattcaggtgccccgtcagctgggtgaagtggcagcctttgggggcagcaatgtggagcccagtgtccgtagttgcttccgttttagcaccgggaagccagtcattgaagcatcccagttcctggagtgggtcaacctggagccccagtccatggtgtggctggctgttctgcatcgggtcaccattgctgagcaagtgaagcatcagaccaagtgctctatctgtaggcagtgccccatcaaggggttcaggtaccggagtctgaagcaattcaacgttgacatctgccagacctgcttcttgacaggcagggccagcaaaggcaataagctgcactaccccatcatggagtattacacaccgaccacatccagtgagaacatgagggactttgccacaaccttaaagaacaaattccgctccaagcattatttcagcaaacaccctcagcgaggttatctgcctgtgcaatcagtgctggaggctgactacagtgagacgccggcttcttccccgatgtggccacacgccgacacacactcccgaattgagcattttgccagcaggcttgctgagatggaaagtcaaaattgctccttctttaatgacagcttgtccccagatgacagcatagacgaggaccagtacctgctgcggcactccagccccatcacagaccgggagccagcctttggacagcaggctccatgcagtgtggccacagaaagcaaaggggagctacagaagatcctggcccacttggaagatgagaaccggattctccagggagagctgaggcgcctgaagtggcagcatgaggaggcagctgaggcacccagtctggctgacggctccactgaggcagcaacagaccaccgcaatgaggagcttctggccgaggcccgtatccttcggcaacataagagccgcctggagacgcgcatgcagatcctcgaagatcacaacaagcagctagagtcccagctgcagcgtctgagggagcttctcctgcagccacccaccgaatcagatggcagtggctctgcaggctcgtccctagcttcctctccacagcagtcagaaggcagtcacccccgggagaagggacagactactccagataccgaggctgcagatgatgtggggtcaaagagccaggatgtcagcctgtgcttggaggacatcatggagaaactccgtcatgccttccccagtgtgcgaagttctgatgtgactgccaacaccctgctggcctcttgatggagccagatccccatcctatagttcatagtcctctcctggttccggtcaaagcctttcctcagccttcacccaacctttccagtttccactggccccacattcctcaactagtattatttgggctctgggcagcagcagggatctggtggtatgtgaggtgcatgcgggcagtgatgggagaaggggaggcatgattcttctgaccctagaaatgttccctttaatcttcaagttcgagatcagccctttaagtacctttctgttgcagcccaggcaaatatcacttggccattcagatggggagcagagaagctgccttgcagagctaagcggtacatgttggcccctcttccttctccgtggaattatggaaagagagaagcctaattaccccaaggttccatccagcattatgaatccacagggtttacccctactctctggcgcaactcagggaggcaaaagggtatccccgagacaccttccccaccccaagtgcccctgaaaaagtctgggcagtgtgtgttctattacttcagctccaggacagattgctagccatcctaatgctacctaggtattggtttctcctcaaatatcttcattttctttagcctcagtccctgacagaccttccttaaggggagaacagttcattctggttcttctacgttatatttggaagcattaaatccatacttatgggtttagattttttttttgccccacatcttcctatttcttaaagtcctcagcattttgagagacccactgagttgcgagttgctctggaaacctggctgaagccaccctttgctcctctgagtctgtcctcacagacctgaggacacagtggcagcttgctgagcaagggagtgttgctttccttgggtaaggaagaggaagcccacctcaagtctggagtagtatgactgccatccaacacccttccaggctgtgacccttctagctctcaggctgaatcaggtgaggtggctgattgtccccagctaatcataaggcatttgcaactggctaccgtgtgtagtggcccctccataggagccacaggccacaaatcaggaagctggccactttccacccagacaacaacagcaaggccttcctgtgcctaaaattgttatttctaactctggaaggtgaatccaatcctcaaactgaactagctcttcctaggcgacatataccatgatctctttatccagaaactgttcagaatagatagtaggggtgggggagtgggcttgggaatgttgaatagattcagagcccacttaggcagctttctcccaagaggagctttataacctagagccctgcagttgacttcatttgcctaagtttatatacatacatatctattctacatatctactgtacatcagtgctctcctggcctcactcacacattaaattctaatacctcttgaagtattaatgttctgccttgctctttgttagccccagcctctggttggaaagatagatgtatcctggctgttcccctaggatatctctctccattgatgtttggggtgggctgtcctcaagaccaaagcaacagaaacctgtggtcacagagaatctaacaggaagagtcactgttctcttcactcattccaaatcttgttcccttgagacctgggccttgggtgaattttcctgggctcccctaaatggttcaggtgccaaaatagagcaaacccaagctctgcccaccccatgcagaaaaggacaaacaggcctttattagcctttgccagctaagacacagagaacattctctggtcccttccagctcttatggtctcactcagggctaaagaaagcaacagttgccaccacaatcaggagggagtgacggttggggtgttgtattataatccagcagtgggccagtgggtagaactgctaggaacctagtttgatctgctgcaggggaggcagggcagtggcttgggtccagaagcttagggttgcctcctccaccactaagtcacaggtccagggtgtcagacttcacagcataacatctgccttagtgttcatgaggtctctgggcaggagaactgggtatctggatagatggttgagcaggtggtaggcgggcatcaatcatagaacctgggcatcagtcagagtgggagcatatttgtagaagcctagattgtgggcgggaatgtgggacggagggctcaaggactttggaggcatatgcctgcctaagccttaggcgggtacatgttatggagcaattttttaccaggaaagtcctggaaaatcttttctgttatccccaccccacctgagagctcttgggctgctgagggcctgtggcaactgcagtgggccaggcatggtagaaaagatgtagatcttgttatgtaggatttgcgttgtaggtggactgaagcagcaggtcaagagttgaattctcactaaggggtcactgacattttgtggtcctgtgtttaccttaatgcctaaggtgagtgtattgttcaagggtccagggacagtcactgcagtatgtgtggggaattttcccacagtaaggtaaatggatccttgggtactatgaatccaacttggggttggatttaccaaaatgtgttgtatgttgttagacatcttgttgtgtattagtcttctaaggatattgtgcatggcactgtgtagtttatagccctacactggaaggatggtgaagggagttgctagattgatagcctaaagaaaaccttctgactgtgggattagcatcaatgataaggaatgtgagcatttgctggggttgttgtcaaatagtatcagagaacagttaggactgagaggtgatttcttcttgacagaatttgatagaggccaaaaagccattacgaggatacctctgcttccagtgacagcagagtggattcacattgattgggcattgtcacggaaggctgactagctggaggacatcaggctgtgctatgcttccctagggaggacatgtgcccttccctccagattagaaaggctagaatcaagagtttcaagtgctcattttcttcaaggtccaaggttgggaactatttccctacagagaaatctgtttgagtttctggtgctccaggaaatgggttggcaggacacagaaatgagaaaccctgaggccaggaagaggccaatcctaggagatgttttccctccagattcattttaaggaatatctgtgcttcctgatgtgtgtgcttgagatttgggctctatatccagcatttgaactcacattctcagtggcagagtcatggtctgtggcaccatttcaaggccaaaaatcccatccaatttcccttcacatagatgacagaaaagcaagaaagtagctgccttaactcgaacagttctgggaaaaaaactgggggccttgtcctgaggctgtggagacttaattcttcagctgggtggttcccgtaggaacaaggaacactttagctacttcttactcttttaacaccaatggctgtgggagaaggaaaggctcaaggccagggctcagctcgcagagtccatcttctcccacagttgccacatttgagagggggcctgctgaatgcccttgctgtcccctatggcagtattgaggcctgaccgaagtctggtatgctgcttgctggctacaagaactggtcacaggatgaaaattggggaaaggatttgggggaggtgacaagggtggcatggaagtctaggggacaaagggacagggttgggaacaaattggttaactttgattgccactcactgtggtgctttccccctttcccttgaattctgctttgaaaagaataaatttgtacttgttt

SEQ ID NO: 122295 - protein, 896 aa, Artificial Sequence
  derived and/or modified sequence
MAAAGPRRSVRGAVCLHLLLTLVIFSRAGEACKKVILNVPSKLEADKIIGRVNLEECFRSADLIRSSDPDFRVLNDGSVYTARAVALSDKKRSFTIWLSDKRKQTQKEVTVLLEHQKKVSKTRHTRETVLRRAKRRWAPIPCSMQENSLGPFPLFLQQVESDAAQNYTVFYSISGRGVDKEPLNLFYIERDTGNLFCTRPVDREEYDVFDLIAYASTADGYSADLPLPLPIRVEDENDNHPVFTEAIYNFEVLESSRPGTTVGVVCATDRDEPDTMHTRLKYSILQQTPRSPGLFSVHPSTGVITTVSHYLDREVVDKYSLIMKVQDMDGQFFGLIGTSTCIITVTDSNDNAPTFRQNAYEAFVEENAFNVEILRIPIEDKDLINTANWRVNFTILKGNENGHFKISTDKETNEGVLSVVKPLNYEENRQVNLEIGVNNEAPFARDIPRVTALNRALVTVHVRDLDEGPECTPAAQYVRIKENLAVGSKINGYKAYDPENRNGNGLRYKKLHDPKGWITIDEISGSIITSKILDREVETPKNELYNITVLAIDKDDRSCTGTLAVNIEDVNDNPPEILQEYVVICKPKMGYTDILAVDPDEPVHGAPFYFSLPNTSPEISRLWSLTKVNDTAARLSYQKNAGFQEYTIPITVKDRAGQAATKLLRVNLCECTHPTQCRATSRSTGVILGKWAILAILLGIALLFSVLLTLVCGVFGATKGKRFPEDLAQQNLIISNTEAPGDDRVCSANGFMTQTTNNSSQGFCGTMGSGMKNGGQETIEMMKGGNQTLESCRGAGHHHTLDSCRGGHTEVDNCRYTYSEWHSFTQPRLGEKLHRCNQNEDRMPSQDYVLTYNYEGRGSPAGSVGCCSEKQEEDGLDFLNNLEPKFITLAEACTKR

SEQ ID NO: 122296 - DNA, 2691 bp, Artificial Sequence
  derived and/or modified sequence
atggcagcagccgggcccaggaggtccgtgagaggtgctgtgtgtctgcacctgctgctcaccctggtcatattttcccgtgcaggggaggcatgtaaaaaagtgatattgaatgtaccctctaagctcgaagccgataagataatcgggagagttaatttagaggaatgttttagaagcgccgatttgattcggagctccgacccagatttcagggtgctgaatgatggtagcgtctacactgctcgcgcagtggctctctccgataagaaacgcagtttcacgatctggctgagtgacaagcggaaacagactcagaaggaggttaccgtccttctggagcaccagaaaaaagtttcaaagacccgacacacacgggaaacagtgctgaggagagctaaacggagatgggctcctattccttgcagtatgcaggaaaattctctcggacctttccccctctttttgcagcaggtggaatccgacgctgcacagaactacaccgtattctacagcatctcaggcagaggcgtcgacaaggaacccctcaatctgttctacatagaaagggacaccgggaatctcttttgcactaggcccgtcgatcgggaggagtacgacgtgttcgatctaatcgcttatgctagcaccgctgacggttatagcgccgacctgccattgccccttcccattcgagtggaggatgagaatgacaaccacccagtgttcacagaagcaatctacaactttgaagtattggagtcctctaggcctggcaccactgtcggcgtggtctgcgctactgatagggacgagccggacactatgcacactaggttaaagtattcgatcctgcagcagacaccaaggtcaccagggttgtttagtgtgcacccttctactggagtgattacaacggtgtctcattacttagacagagaggtggtggataagtatagtctcataatgaaagtacaagacatggatggacagtttttcgggctcatcggaacaagcacgtgcatcatcactgtgactgatagcaacgataatgcaccaacattccgccagaatgcatacgaagcctttgtagaagaaaacgccttcaatgtcgagattctgcggatccccatcgaagacaaagacctgatcaacactgcaaactggcgcgtgaacttcactattctgaagggcaatgagaacggtcacttcaagattagcactgacaaggagactaacgagggcgtcctgtcagttgtgaaacctctcaactacgaggagaaccgtcaggtgaatctggagattggggtgaataacgaggctccattcgcccgagacattcccagggtgacagcactgaatcgggctttagttactgtgcacgtgcgcgatctagatgaaggtcctgaatgcaccccagcagcacagtacgtgaggattaaagaaaacctggccgttgggagtaagattaacggttacaaagcatatgatcccgaaaaccggaatggcaacggcctcaggtacaaaaaattacatgaccccaaaggatggataacgattgacgagatttccggatcaatcatcacgtccaagatactcgacagagaggtcgagaccccaaagaatgaactctataatataaccgtgctcgccatagataaggatgacagatcctgcaccgggacccttgctgtcaacatcgaagacgtcaacgacaacccaccagagattctgcaggagtatgtcgtaatctgtaaaccaaaaatggggtacactgatatattagccgtggacccagatgagcccgtccacggggcaccattctattttagcctgccgaataccagccctgaaatttcgcgcttgtggagcctaacgaaggtgaatgacacagcagctcggctgagctatcagaaaaacgctggattccaagagtatacaattcctataactgtcaaggatcgcgcaggacaagccgctactaaattactccgcgttaacctgtgcgagtgcacccaccccacccagtgtcgggctactagccggagtacaggggtgatcctgggcaaatgggccatccttgccatactgctgggcatagcactcctcttttcagtactcctgactctggtatgtggcgtgttcggcgccaccaagggaaaaagattccccgaagatttggcacaacagaatctcataatatcaaacacagaggccccaggcgatgatcgggtgtgcagtgcaaacgggttcatgactcagactactaacaactcttcacaggggttctgcggcacaatggggagtggcatgaagaacggtgggcaagagacaattgagatgatgaagggaggaaatcaaactctcgagtcttgtcggggcgcagggcaccaccataccctggacagctgccgtggcggccatacagaggtggacaattgcaggtatacttattccgagtggcactcatttactcagccccgtttaggagagaagctgcatagatgtaatcaaaatgaggataggatgccctcacaggattacgttctgacgtacaactacgaggggaggggctcccccgcggggagcgtgggctgttgctccgaaaaacaggaagaggacggcctggatttcctcaacaatctggagcctaagttcatcacacttgccgaggcatgtaccaaacgctag

SEQ ID NO: 122297 - DNA, 2691 bp, Artificial Sequence
  derived and/or modified sequence
atggctgctgctggccccaggagatctgtgagaggagctgtgtgcctgcacctgctgctgaccctggtgatcttcagccgggccggggaggcctgcaagaaggtgatcctgaatgtgcccagcaagctggaggccgacaagatcatcggccgggtgaacctggaggagtgcttccgctctgctgacctgatccgcagcagtgaccctgacttccgggtgctgaatgatggctctgtgtacacagcccgggctgtggccctgagtgacaagaagaggagcttcaccatctggctgagtgacaagaggaagcagacccagaaggaggtgacagtgctgctggagcaccagaagaaggtgtccaagaccaggcacacccgggagaccgtgctgcggcgggccaagaggcgctgggcccccatcccctgcagcatgcaggagaacagcctgggccccttccccctcttcctgcagcaggtggagagtgatgctgcccagaactacaccgtcttctacagcatcagcggccggggcgtggacaaggagcccctgaacctcttctacatcgagcgggacaccggcaacctcttctgcaccaggcctgtggaccgggaggagtatgatgtgtttgacctgattgcctatgccagcacagcagatggctacagcgctgacctgcccctgcccctgcccatccgggtggaggatgaaaatgacaaccaccctgtgttcacagaggccatctacaactttgaggtgctggagagcagccggcccggcaccaccgtgggcgtggtgtgtgccacagacagagatgagccagacaccatgcacacccggctgaagtacagcatcctgcagcagacccccaggagccctggcctcttctctgtgcaccccagcactggagtcatcaccaccgtgagccactacctggaccgggaggtggtggacaagtacagcctcatcatgaaggtgcaggacatggatggccagttcttcggcctcatcggcaccagcacctgcatcatcaccgtgacagacagcaatgacaatgcccccaccttccggcagaatgcctatgaggcctttgtggaggagaatgccttcaacgtggagatcctgcgcatccccatcgaggacaaggacctgatcaacacagccaactggagggtgaacttcaccatcctgaagggaaatgaaaatggccacttcaagatcagcacagacaaggagaccaatgaaggagtgctgtctgtggtgaagcccctgaactatgaagaaaatcggcaggtgaacctggagattggagtgaacaatgaggccccctttgcccgggacatcccccgggtgacagccctgaacagagccctggtgacagtgcacgtgcgggacctggatgagggccctgagtgcaccccagctgcccagtatgtgcgcatcaaggagaacctggccgtgggcagcaagatcaatggctacaaggcctatgaccctgaaaatagaaatggaaatggcctgcgctacaagaagctgcatgaccccaagggctggatcaccattgatgagatcagcggcagcatcatcaccagcaagatcctggaccgggaggtggagacccccaagaatgagctgtacaacatcaccgtgctggccatcgacaaggatgacaggagctgcaccggcaccctggccgtgaacattgaagatgtgaatgacaaccccccagagatcctgcaggagtatgtggtgatctgcaagcccaagatgggctacacagacatcctggccgtggaccctgatgagcctgtgcacggggcccccttctacttcagcctgcccaacaccagccctgagatcagccggctgtggagcctgaccaaggtgaatgacacagctgcccggctgagctaccagaagaatgccggcttccaggagtacaccatccccatcaccgtgaaggaccgggccggccaggccgccaccaagctgctgcgggtgaacctgtgtgagtgcacccaccccacccagtgccgggccaccagccgcagcactggagtcatcctgggcaagtgggccatcctggccatcctgctgggcatcgccctgctcttctctgtgctgctgaccctggtgtgtggggtgtttggagccaccaagggcaagcgcttccctgaggacctggcccagcagaacctgatcatcagcaacacagaggcccctggagatgacagagtgtgcagcgccaacggcttcatgacccagaccaccaacaacagcagccagggcttctgtggcaccatgggcagcggcatgaagaatggaggccaggagaccatcgagatgatgaagggcggcaaccagaccctggagagctgcagaggagctggccaccaccacaccctggacagctgccggggcggccacacagaggtggacaactgccgctacacctacagcgagtggcacagcttcacccagccccggctgggggagaagctgcaccgctgcaaccagaatgaagacaggatgcccagccaggactatgtgctgacctacaactatgagggccggggcagccctgctggctctgtgggctgctgcagcgagaagcaggaggaggatggcctggacttcctgaacaacctggagcccaagttcatcaccctggccgaggcctgcaccaagaggtag

SEQ ID NO: 122298 - DNA, 2691 bp, Artificial Sequence
  derived and/or modified sequence
atggccgccgccggcccccggcggagcgtgcggggcgccgtgtgcctccatctgctacttacactggtcatcttctcccgagctggagaggcttgtaaaaaggtgatccttaatgtgccatcaaagctggaggcggataagattatcgggcgcgtgaatctggaggaatgttttcgctccgcagatttgattaggagttctgacccagatttccgggtgctaaatgatggatcagtgtacactgcgcgggccgttgcgttgtcagacaaaaaacggagcttcaccatttggttgtccgataagcggaagcagacccagaaggaggtgaccgttttgctggagcaccagaaaaaggtatccaagactagacatacccgcgaaactgtgcttaggcgggccaaaaggaggtgggcaccaatcccctgcagcatgcaggaaaattctctgggaccatttcccttgttccttcagcaagtagaaagcgacgctgcccagaattatactgtgttctattctatcagcggccggggcgtggacaaagaaccgctcaacctcttttatatcgagcgtgatactgggaacctcttctgcaccagacccgtggaccgggaagagtacgatgtgttcgatctgatcgcctacgccagcaccgcagacggctactctgcagatttgccactcccattacctatacgtgtcgaagacgaaaacgataaccaccctgtgttcacagaggccatctacaattttgaagtgctggaatcaagtcgccccggaacaactgtcggggtcgtctgcgctaccgatagggacgagccggacacgatgcatacacggctcaagtacagtattctgcagcagacccccaggagccctggcctatttagtgtgcatccaagcacaggggtgataaccactgtatcccactacctggatagagaggttgtggataagtactcactgatcatgaaagtccaggatatggacgggcagttcttcggacttatcgggactagtacttgtatcatcacggtcactgactctaatgacaatgctccaacattccgccagaacgcctatgaggcatttgtggaggaaaatgcgtttaacgtcgagatcctcagaattcccatcgaagataaggacctaatcaacactgccaattggcgtgtgaatttcacgatcctaaaaggcaatgagaatggacactttaagataagcacagataaagaaaccaacgaaggagtcctgtcagtggtgaagccgttgaattacgaggaaaaccggcaggtgaacctcgagattggcgtgaacaacgaggccccatttgcacgggacataccccgggttaccgccttgaacagagccctggtgactgttcatgtcagagacctggacgaagggcctgaatgtacacccgctgcgcagtacgtgcgaataaaggagaacctcgccgtaggttctaagattaatgggtataaggcatacgacccagagaaccggaacggcaatggcttgagatataagaaactgcatgatcccaaaggctggatcacaattgatgaaattagtggcagtatcattacgagcaagatcctggacagggaggtcgagacacctaagaacgagctctataacatcaccgtgctcgctatcgacaaagacgaccgcagctgtacaggcactttggctgtgaacatcgaagatgtgaacgataatccaccagagattctacaggaatacgtcgtcatttgtaaacccaagatgggatataccgacattttagcagtggatccggacgagcctgtgcatggggccccgttttatttttccctgccaaacacgtctcccgagattagtaggctgtggtcactcactaaggtcaatgacaccgccgcccgcctctcctatcagaagaacgccggatttcaagaatataccattccaatcactgtgaaggaccgagctggacaagcagcgacgaaattgttgcgcgttaatctgtgcgaatgtacccatcccacccaatgccgtgctacaagccggtccactggggttattctgggcaaatgggcgattctggcaattctgctggggatcgctcttctcttcagcgtgctccttactctggtgtgtggggtgtttggtgcgactaagggaaaacggttcccagaagatctggctcagcagaatctgataatctcaaacaccgaggcccctggcgacgatcgcgtgtgcagcgccaatggctttatgactcagactacaaacaactcttcccaagggttttgtggcaccatgggctccggcatgaagaacggcggacaggaaaccattgagatgatgaagggtggcaaccagacgctcgaatcatgcagaggagccggccatcaccatactcttgattcttgcaggggaggccacacggaggtggacaattgccgatatacctattccgagtggcattccttcacacagccccgcctgggggaaaagctgcaccgctgtaaccagaacgaagacagaatgccctcacaagattatgttctcacatataattacgaaggacgagggtcgcccgccggcagcgtcgggtgttgctctgaaaagcaagaggaggacggattggacttccttaataacttagagcctaaatttataactttggctgaggcgtgcacaaaacggtag

SEQ ID NO: 122299 - DNA, 2691 bp, Artificial Sequence
  derived and/or modified sequence
atggcggctgccggacctcggagaagcgtgcgtggtgctgtgtgcttgcacctactgctaacactggttatcttttctagagctggcgaagcgtgtaaaaaggtgatcttaaacgttccgagcaaactcgaagcagacaaaatcatcggtcgtgtcaatctggaggagtgcttccgttccgcagaccttatcagatccagtgatccggactttcgtgtgttaaacgacgggtcagtatacacagccagagcagtcgccctctctgacaaaaaacggtcttttacaatctggctgtcagataagcgcaaacagacacagaaggaggtgacagtcctcctggagcaccaaaagaaagttagtaagaccagacacacaagggaaaccgtgctgcgacgggcaaagcgacgctgggccccaatcccttgttctatgcaagagaactccctagggccattcccgctctttctgcaacaggtggaatctgatgcagcccagaactatacagtgttctactcaatttccggacgtggagtggacaaagaacctctgaacttattttacattgagagggatactggaaatctgttctgcacccggccagttgatcgtgaggaatatgacgtatttgatctgattgcttacgctagcaccgcagatggatattcagcagacctcccccttccactgcctattcgggttgaggacgagaacgacaaccatcctgtgtttaccgaggccatttataacttcgaggtgttggagtcgtccagaccagggacaacagtaggcgtggtgtgtgcgacagatcgcgacgagccagatactatgcacaccaggttgaaatactcgatactgcagcaaactccccgaagccccggattgttttctgtgcacccatccacaggagtgataaccaccgtctcccactacctagatcgcgaggtggttgataagtacagtctcataatgaaagttcaggatatggacggccaattttttggactcatcggtacttccacctgcattatcactgtaactgactcaaacgataacgcacccactttcagacagaatgcttatgaagcctttgttgaggagaatgcattcaacgtagaaatcctccgcatacccattgaggataaagatcttatcaacaccgccaactggcgagtcaacttcaccatcctgaaaggaaatgaaaacggacattttaagatctctactgacaaagaaacaaacgaaggcgtccttagtgtcgtcaaaccacttaactacgaggaaaatcgccaggtgaatctggagattggggtgaacaacgaggccccattcgcacgagatatccctcgtgtgacagccttgaaccgagcactcgtaaccgtgcacgtacgcgatctggatgaaggaccagagtgcacacctgctgcccagtacgtgagaattaaggagaatctggcagttgggtcaaaaataaacggttacaaggcttacgaccctgaaaatcgaaatgggaacggcttgcgctacaagaagcttcatgacccaaaggggtggatcacgatcgatgagatttccggctcaattattacctccaagatactggacagagaagttgaaaccccaaagaatgagttatacaacataactgtcctggcgatcgacaaagatgatcgctcttgtacaggaaccctggcagttaacatcgaagacgtgaatgataacccaccggaaattcttcaggagtacgtggtgatttgtaagcctaaaatggggtatacagacattctggcagttgaccccgacgagcccgtccatggcgctcccttttacttctcattgccaaacacctcccccgaaataagccgcttgtggtctctgacgaaggtgaacgacaccgctgcaagattgagttatcagaagaacgccggatttcaggagtatactatcccaatcacagtgaaggatcgggcaggtcaggccgctaccaagctccttagggttaacctatgtgagtgcactcaccccacccagtgtagagcaacctcgagatcaaccggagtgatcttgggtaaatgggcaatattggcgattttgctgggcatagcattattattctctgttctactgaccttagtttgtggggtgttcggcgcaaccaaagggaaacggtttcccgaggacctggcccaacagaatctgataatcagtaataccgaggcaccaggggacgacagggtgtgttcagcgaacgggtttatgacgcagactaccaacaacagcagccagggcttctgcgggactatggggtccggcatgaaaaacgggggtcaggagacaatagaaatgatgaagggcggaaaccaaaccctggaaagctgtaggggggcaggccatcaccatactctcgatagttgtaggggtggccatacagaggtagacaactgccgctatacgtactctgaatggcatagtttcacacaacccagactgggagagaaattgcatagatgcaaccagaatgaggaccgaatgccctcccaggactatgtgctgacatacaactacgagggcagggggagcccggctggcagtgttgggtgctgcagcgaaaaacaggaggaagacggcctcgacttccttaataacctcgaaccaaagtttataactctagccgaggcttgtactaagcgctag

SEQ ID NO: 122300 - DNA, 2691 bp, Artificial Sequence
  derived and/or modified sequence
atggccgccgccggccccagaagaagcgtgagaggcgccgtgtgcctgcacctgctgctgaccctggtgatcttcagcagagccggcgaggcctgcaagaaggtgatcctgaacgtgcccagcaagctggaggccgacaagatcatcggcagagtgaacctggaggagtgcttcagaagcgccgacctgatcagaagcagcgaccccgacttcagagtgctgaacgacggcagcgtgtacaccgccagagccgtggccctgagcgacaagaagagaagcttcaccatctggctgagcgacaagagaaagcagacccagaaggaggtgaccgtgctgctggagcaccagaagaaggtgagcaagaccagacacaccagagagaccgtgctgagaagagccaagagaagatgggcccccatcccctgcagcatgcaggagaacagcctgggccccttccccctgttcctgcagcaggtggagagcgacgccgcccagaactacaccgtgttctacagcatcagcggcagaggcgtggacaaggagcccctgaacctgttctacatcgagagagacaccggcaacctgttctgcaccagacccgtggacagagaggagtacgacgtgttcgacctgatcgcctacgccagcaccgccgacggctacagcgccgacctgcccctgcccctgcccatcagagtggaggacgagaacgacaaccaccccgtgttcaccgaggccatctacaacttcgaggtgctggagagcagcagacccggcaccaccgtgggcgtggtgtgcgccaccgacagagacgagcccgacaccatgcacaccagactgaagtacagcatcctgcagcagacccccagaagccccggcctgttcagcgtgcaccccagcaccggcgtgatcaccaccgtgagccactacctggacagagaggtggtggacaagtacagcctgatcatgaaggtgcaggacatggacggccagttcttcggcctgatcggcaccagcacctgcatcatcaccgtgaccgacagcaacgacaacgcccccaccttcagacagaacgcctacgaggccttcgtggaggagaacgccttcaacgtggagatcctgagaatccccatcgaggacaaggacctgatcaacaccgccaactggagagtgaacttcaccatcctgaagggcaacgagaacggccacttcaagatcagcaccgacaaggagaccaacgagggcgtgctgagcgtggtgaagcccctgaactacgaggagaacagacaggtgaacctggagatcggcgtgaacaacgaggcccccttcgccagagacatccccagagtgaccgccctgaacagagccctggtgaccgtgcacgtgagagacctggacgagggccccgagtgcacccccgccgcccagtacgtgagaatcaaggagaacctggccgtgggcagcaagatcaacggctacaaggcctacgaccccgagaacagaaacggcaacggcctgagatacaagaagctgcacgaccccaagggctggatcaccatcgacgagatcagcggcagcatcatcaccagcaagatcctggacagagaggtggagacccccaagaacgagctgtacaacatcaccgtgctggccatcgacaaggacgacagaagctgcaccggcaccctggccgtgaacatcgaggacgtgaacgacaacccccccgagatcctgcaggagtacgtggtgatctgcaagcccaagatgggctacaccgacatcctggccgtggaccccgacgagcccgtgcacggcgcccccttctacttcagcctgcccaacaccagccccgagatcagcagactgtggagcctgaccaaggtgaacgacaccgccgccagactgagctaccagaagaacgccggcttccaggagtacaccatccccatcaccgtgaaggacagagccggccaggccgccaccaagctgctgagagtgaacctgtgcgagtgcacccaccccacccagtgcagagccaccagcagaagcaccggcgtgatcctgggcaagtgggccatcctggccatcctgctgggcatcgccctgctgttcagcgtgctgctgaccctggtgtgcggcgtgttcggcgccaccaagggcaagagattccccgaggacctggcccagcagaacctgatcatcagcaacaccgaggcccccggcgacgacagagtgtgcagcgccaacggcttcatgacccagaccaccaacaacagcagccagggcttctgcggcaccatgggcagcggcatgaagaacggcggccaggagaccatcgagatgatgaagggcggcaaccagaccctggagagctgcagaggcgccggccaccaccacaccctggacagctgcagaggcggccacaccgaggtggacaactgcagatacacctacagcgagtggcacagcttcacccagcccagactgggcgagaagctgcacagatgcaaccagaacgaggacagaatgcccagccaggactacgtgctgacctacaactacgagggcagaggcagccccgccggcagcgtgggctgctgcagcgagaagcaggaggaggacggcctggacttcctgaacaacctggagcccaagttcatcaccctggccgaggcctgcaccaagagatag

SEQ ID NO: 122301 - DNA, 6935 bp, Artificial Sequence
  derived and/or modified sequence
gaagttgctcccgggcaggcaagcctgagagaggccaaatacacttaaaaacaagcagcggcgagaaaagcacctcccgcgccctgcacctcggcaggtctcgctctcggcaccctcccggcgcccgcgttctcctggccctgcccggcatcccgatggccgccgctgggccccggcgctccgtgcgcggagccgtctgcctgcatctgctgctgaccctcgtgatcttcagtcgtgctggtgaagcctgcaaaaaggtgatacttaatgtaccttctaaactagaggcagacaaaataattggcagagttaatttggaagagtgcttcaggtctgcagacctcatccggtcaagtgatcctgatttcagagttctaaatgatgggtcagtgtacacagccagggctgttgcgctgtctgataagaaaagatcatttaccatatggctttctgacaaaaggaaacagacacagaaagaggttactgtgctgctagaacatcagaagaaggtatcgaagacaagacacactagagaaactgttctcaggcgtgccaagaggagatgggcacctattccttgctctatgcaagagaattccttgggccctttcccattgtttcttcaacaagttgaatctgatgcagcacagaactatactgtcttctactcaataagtggacgtggagttgataaagaacctttaaatttgttttatatagaaagagacactggaaatctattttgcactcggcctgtggatcgtgaagaatatgatgtttttgatttgattgcttatgcgtcaactgcagatggatattcagcagatctgcccctcccactacccatcagggtagaggatgaaaatgacaaccaccctgttttcacagaagcaatttataattttgaagttttggaaagtagtagacctggtactacagtgggggtggtttgtgccacagacagagatgaaccggacacaatgcatacgcgcctgaaatacagcattttgcagcagacaccaaggtcacctgggctcttttctgtgcatcccagcacaggcgtaatcaccacagtctctcattatttggacagagaggttgtagacaagtactcattgataatgaaagtacaagacatggatggccagttttttggattgataggcacatcaacttgtatcataacagtaacagattcaaatgataatgcacccactttcagacaaaatgcttatgaagcatttgtagaggaaaatgcattcaatgtggaaatcttacgaatacctatagaagataaggatttaattaacactgccaattggagagtcaattttaccattttaaagggaaatgaaaatggacatttcaaaatcagcacagacaaagaaactaatgaaggtgttctttctgttgtaaagccactgaattatgaagaaaaccgtcaagtgaacctggaaattggagtaaacaatgaagcgccatttgctagagatattcccagagtgacagccttgaacagagccttggttacagttcatgtgagggatctggatgaggggcctgaatgcactcctgcagcccaatatgtgcggattaaagaaaacttagcagtggggtcaaagatcaacggctataaggcatatgaccccgaaaatagaaatggcaatggtttaaggtacaaaaaattgcatgatcctaaaggttggatcaccattgatgaaatttcagggtcaatcataacttccaaaatcctggatagggaggttgaaactcccaaaaatgagttgtataatattacagtcctggcaatagacaaagatgatagatcatgtactggaacacttgctgtgaacattgaagatgtaaatgataatccaccagaaatacttcaagaatatgtagtcatttgcaaaccaaaaatggggtataccgacattttagctgttgatcctgatgaacctgtccatggagctccattttatttcagtttgcccaatacttctccagaaatcagtagactgtggagcctcaccaaagttaatgatacagctgcccgtctttcatatcagaaaaatgctggatttcaagaatataccattcctattactgtaaaagacagggccggccaagctgcaacaaaattattgagagttaatctgtgtgaatgtactcatccaactcagtgtcgtgcgacttcaaggagtacaggagtaatacttggaaaatgggcaatccttgcaatattactgggtatagcactgctcttttctgtattgctaactttagtatgtggagtttttggtgcaactaaagggaaacgttttcctgaagatttagcacagcaaaacttaattatatcaaacacagaagcacctggagacgatagagtgtgctctgccaatggatttatgacccaaactaccaacaactctagccaaggtttttgtggtactatgggatcaggaatgaaaaatggagggcaggaaaccattgaaatgatgaaaggaggaaaccagaccttggaatcctgccggggggctgggcatcatcataccctggactcctgcaggggaggacacacggaggtggacaactgcagatacacttactcggagtggcacagttttactcaaccccgtctcggtgaaaaattgcatcgatgtaatcagaatgaagaccgcatgccatcccaagattatgtcctcacttataactatgagggaagaggatctccagctggttctgtgggctgctgcagtgaaaagcaggaagaagatggccttgactttttaaataatttggaacccaaatttattacattagcagaagcatgcacaaagagataatgtcacagtgctacaattaggtctttgtcagacattctggaggtttccaaaaataatattgtaaagttcaatttcaacatgtatgtatatgatgatttttttctcaattttgaattatgctactcaccaatttatatttttaaagcaagttgttgcttatcttttccaaaaagtgaaaaatgttaaaacagacaactggtaaatctcaaactccagcactggaattaaggtctctaaagcatctgctcttttttttttttacggatattttagtaataaatatgctggataaatattagtccaacaatagctaagttatgctaatatcacattattatgtattcactttaagtgatagtttaaaaaataaacaagaaatattgagtatcactatgtgaagaaagttttggaaaagaaacaatgaagactgaattaaattaaaaatgttgcagctcataaagaattgggactcacccctactgcactaccaaattcatttgactttggaggcaaaatgtgttgaagtgccctatgaagtagcaattttctataggaatatagttggaaataaatgtgtgtgtgtatattattattaatcaatgcaatatttaaaatgaaatgagaacaaagaggaaaatggtaaaaacttgaaatgaggctggggtatagtttgtcctacaatagaaaaaagagagagcttcctaggcctgggctcttaaatgctgcattataactgagtctatgaggaaatagttcctgtccaatttgtgtaatttgtttaaaattgtaaataaattaaacttttctggtttctgtgggaaggaaatagggaatccaatggaacagtagctttgctttgcagtctgtttcaagatttctgcatccacaagttagtagcaaactggggaatactcgctgcagctggggttccctgctttttggtagcaagggtccagagatgaggtgtttttttcggggagctaataacaaaaacattttaaaacttacctttactgaagttaaatcctctattgctgtttctattctctcttatagtgaccaacatctttttaatttagatccaaataaccatgtcctcctagagtttagaggctagagggagctgaggggaggatcttactgaaagcaccctggggagattgattgtccttaaacctaagccccacaaacttgacacctgatcaggtctgggagctacaaaatttcatttttctcctcactgcccttcttctgagtggcattggcctgaatcaaggaaagccaggccttgtgggcccccttctttcggctttctgctaaagcaacacctccagcagagattcccttaagtgactccaggttttccaccatccttcagcgtgaattaatttttaatcagtttgctttctccagagaaattttaaaataatagaagaaatagaaattttgaatgtataaaagaaaaagatcaagttgtcattttagaacagagggaactttgggagaaagcagcccaagtaggttatttgtacagtcagagggcaacaggaagatgcaggccttcaagggcaaggagaggccacaaggaatatgggtgggagtaaaagcaacatcgtctgcttcatactttttcctaggcttggcactgccttttcctttctcaggccaatggcaactgccatttgagtccggtgagggatcagccaacctcttctctatggctcaccttatttggagtgagaaatcaaggagacagagctgactgcatgatgagtctgaaggcatttgcaggatgagcctgaactggttgtgcagaacaaacaaggcattcatgggaattgttgtattccttctgcagccctccttctgggcactaagaaggtctatgaattaaatgcctatctaaaattctgatttattcctacattttctgttttctaatttgaccctaaaatctatgtgttttagacttagactttttattgccccccccccccccttttttttttgagacggagtctcgctctgacgcacaggctggagtgcagtggctccgatctctgctcactgaaagctccgcctcccgggttcacgccattctcctgcctcagcctcctgagtagctgggactacaggcgcccaccaccacgcccggctaattttttgtatttttaatagagacggggtttcactgtgttagccaggatggtctcgatctcctgacctcgtgatccgcctgcctcggcctcccaaagtgctgggattacaggcatgacccaccgctcccggccttgttttccgtttaaagtcgtcttcttttaatgtaatcattttgaacatgtgtgaaagttgatcatacgaattggatcaatcttgaaatactcaaccaaaagacagtcgagaagccagggggagaaagaactcagggcacaaaatattggtctgagaatggaattctctgtaagcctagttgctgaaatttcctgctgtatccagaagccagttttatctaacggctactgaaacacccactgtgttttgctcactccctcactcaccgatcaaaacctgctacctccccaagactttactagtgccgataaactttctcaaagagcaaccagtatcacttccctgtttataaaacctctaaccatctctttgttctttgaacatgctgaaaaccacctggtctgcatgtatgcccgaatttgtaattcttttctctcaaatgaaaatttaattttagggattcatttctatattttcacatatgtagtattattatttccttatatgtgtaaggtgaaatttatggtatttgagtgtgcaagaaaatatatttttaaagctttcatttttcccccagtgaatgatttagaattttttatgtaaatatacagaatgttttttcttacttttataaggaagcagctgtctaaaatgcagtggggtttgttttgcaatgttttaaacagagttttagtattgctattaaaagaagttactttgcttttaaagaaacttggctgcttaaaataagcaaaaattggatgcgtaaagtaatatttacagatgtggggagatgtaataaaacaatattaacttggtttcttgtttttgctgtatttagagattaaataattctaagatgatcactttgcaaaattatgcttatggctggcatggaaatagaaataattatgtctttgttgtattaatggggaatattttggacaatgtttcattatcaaattgtcgacatcattaatatatattgtaatgttgggaagagatcactattttgaagcacagctttacagatgagtatctatgatacatatgtataataaattttgattgggtattaaaagtattagaaggtggttataattgcagagtattccatgaatagtacactgacacaggggttttactttgaggaccagtgtagtcaagggaaaacatgagttaaaaagaaaagcaggcgatattgcagtcttgattctgccacttacaggatagataacgcctgaactttaatgacaagatgatccaaccataaaggtgctctgtgcttcacagtgaatcttttccccatgcaggagtgtgctcccctacaaacgttaagactgatcatttcaaaaatctattagctatatcaaaagccttacattttaatataggttgaaccaaaatttcaattccagtaacttctattgtaaccattatttttgtgtatgtcttcaagaatgttcattggatttttgtttgtaatagtaaaataccggatacatttcacgtgtccttcagtattgatttggttgaatattgggtcataatggttgagaagcatggacactagagccagaatgcttggatatgaatcctggatctgtcacttacttctgtgtgacctttgaaaggctacttatttcctctcttagctttctcattaaaatcaatgaacaatgccagcctcatggggttgttgaatgattaaatgagttactatacctaaagtacatagaacactgcctgcacatagtaaaagaattataagtgtgaggtagttggtaaaattatgta

SEQ ID NO: 122302 - protein, 1049 aa, Artificial Sequence
  derived and/or modified sequence
MDWSFFRVVAMLFIFLVVVEVNSEFRIQVRDYNTKNGTIKWHSIRRQKREWIKFAAACREGEDNSKRNPIAKIHSDCAANQQVTYRISGVGIDQPPYGIFVINQKTGEINITSIVDREVTPFFIIYCRALNSMGQDLERPLELRVRVLDINDNPPVFSMATFAGQIEENSNANTLVMILNATDADEPNNLNSKIAFKIIRQEPSDSPMFIINRNTGEIRTMNNFLDREQYGQYALAVRGSDRDGGADGMSAECECNIKILDVNDNIPYMEQSSYTIEIQENTLNSNLLEIRVIDLDEEFSANWMAVIFFISGNEGNWFEIEMNERTNVGILKVVKPLDYEAMQSLQLSIGVRNKAEFHHSIMSQYKLKASAISVTVLNVIEGPVFRPGSKTYVVTGNMGSNDKVGDFVATDLDTGRPSTTVRYVMGNNPADLLAVDSRTGKLTLKNKVTKEQYNMLGGKYQGTILSIDDNLQRTCTGTININIQSFGNDDRTNTEPNTKITTNTGRQESTSSTNYDTSTTSTDSSQVYSSEPGNGAKDLLSDNVHFGPAGIGLLIMGFLVLGLVPFLMICCDCGGAPRSAAGFEPVPECSDGAIHSWAVEGPQPEPRDITTVIPQIPPDNANIIECIDNSGVYTNEYGGREMQDLGGGERMTGFELTEGVKTSGMPEICQEYSGTLRRNSMRECREGGLNMNFMESYFCQKAYAYADEDEGRPSNDCLLIYDIEGVGSPAGSVGCCSFIGEDLDDSFLDTLGPKFKKLADISLGKESYPDLDPSWPPQSTEPVCLPQETEPVVSGHPPISPHFGTTTVISESTYPSGPGVLHPKPILDPLGYGNVTVTESYTTSDTLKPSVHVHDNRPASNVVVTERVVGPISGADLHGMLEMPDLRDGSNVIVTERVIAPSSSLPTSLTIHHPRESSNVVVTERVIQPTSGMIGSLSMHPELANAHNVIVTERVVSGAGVTGISGTTGISGGIGSSGLVGTSMGAGSGALSGAGISGGGIGLSSLGGTASIGHMRSSSDHHFNQTIGSASPSTARSRITKYSTVQYSK

SEQ ID NO: 122303 - DNA, 3150 bp, Artificial Sequence
  derived and/or modified sequence
atggactggtccttctttcgggtcgtggccatgctgtttattttcttggtggtggtggaggtgaatagtgagttccgcatccaggttcgcgactataataccaagaatggcacaatcaagtggcattccatacggagacagaagagggagtggattaagtttgcagcggcatgcagggaaggcgaagataacagcaagcgcaaccccattgcaaaaattcactccgactgtgctgcaaatcagcaagtcacgtaccggatctctggcgtgggcatcgatcagccaccatatggaatattcgtaattaaccagaagaccggggagatcaacataacgtctattgtagaccgagaggtgacccccttcttcatcatttactgtcgggccctcaattctatgggccaggacctggagcgccccttagagctgcgtgttcgagttctcgacatcaatgacaatccccccgtgttttcaatggccacgtttgcaggacagatcgaagagaattctaatgctaatacacttgtcatgatcctgaatgccaccgatgctgacgagcctaacaatctgaattcaaagattgccttcaaaatcattcggcaggagccctccgactcacctatgttcattattaatcgaaacaccggagagatcaggacaatgaacaattttctggaccgggaacagtatgggcagtacgccctggcagtgcggggaagtgatcgggacggcggcgcagacggcatgtctgcagagtgtgagtgtaacattaaaatcctggatgtcaacgataacattccttatatggaacaatccagctataccatcgagatacaggagaacaccttgaactctaatctgctggagatccgcgtcatcgatctggacgaggaattctccgctaattggatggctgtgatttttttcatctccggcaacgagggaaactggtttgaaattgagatgaacgagcgcactaacgtgggcatattaaaagtcgtaaaaccacttgattatgaagctatgcagtcccttcagcttagcatcggggttcgaaacaaggctgaatttcatcacagcattatgagccagtataagctcaaagctagtgcaataagtgtaaccgtgctgaatgttatcgagggacctgtttttaggcctgggtcaaaaacatatgtagttaccggcaacatggggtccaacgataaagtgggggactttgtagccacagacctcgatacaggacggccaagcaccaccgttagatatgtgatggggaataatccggcggacctcctggccgtcgattctcgaacggggaagcttacactcaagaacaaagtgactaaggagcagtacaacatgctgggcggaaagtaccaaggcactattctaagcatcgacgacaaccttcaacggacctgcaccggaaccatcaacatcaacattcaatcttttggcaatgacgaccgcactaatacagagcctaataccaaaatcaccaccaatactggtcgacaggagtccacttcctccaccaactacgatacaagcacaaccagtacagatagtagccaagtctactctagtgagccaggcaatggtgcaaaggacctcttgagtgacaacgttcacttcggccccgctggaatcggcttgttgatcatgggctttctcgtccttggactggtcccatttctcatgatctgctgtgactgcggcggggccccacgaagcgccgcgggattcgaacccgttcctgagtgcagcgacggcgcaattcattcttgggcagtggaggggccacagcccgaaccaagagacattactactgtcattccacagatcccccctgacaacgccaacatcatcgaatgtatagacaactcgggtgtgtacaccaatgagtatggggggcgagagatgcaggacctcggtggaggagagcgaatgacgggttttgaactgacagagggtgtcaaaacaagtggaatgcccgaaatctgccaggagtactcggggactcttaggcggaatagcatgcgagagtgcagagagggtgggctcaacatgaacttcatggagtcatacttttgtcagaaagcatatgcatacgccgacgaggacgagggccggccttctaatgattgtctgctcatctatgatatagaaggggtgggcagcccagccggcagtgtgggatgctgtagcttcataggggaggacctcgatgactctttcctcgacacgctgggcccaaagttcaagaagttggctgatatttccctgggtaaggagtcctacccagatttggatcccagctggccgccccagtctacagagcctgtttgcctccctcaggagacagagcccgtggtctcaggtcatcctccgatttcaccacacttcggaacaaccactgtaatctcagagtcaacctacccttctggaccaggagttctgcatcctaaacccatactcgacccccttgggtacggtaatgtaacagttaccgagagctataccacctcggacacactgaaaccttcagtccacgtacacgacaacagaccagcgagcaatgtggttgtgactgaaagagtggtgggaccaatctcaggggctgacttgcacgggatgctggagatgcccgatttgagagatggctctaatgtgattgtcactgaaagagtcatcgctccctcctctagtcttcccacatcgctgaccatccatcacccccgtgagtcttccaacgtggtggtgaccgaacgagtgattcagcccacgtctgggatgatcggatctctcagtatgcatccagagctggcgaacgctcataatgtaatcgtaacggaacgagtggtttcaggcgccggagtaacaggaatcagtggtacgacgggaatcagcgggggcatcgggtcttctgggctcgttggcacaagcatgggtgctggaagtggagcccttagtggagcaggaatatctggaggcggaatcggcctgagctcactgggtgggaccgcatccatagggcacatgaggtcatcaagcgaccaccacttcaatcagacgatcggaagtgcctcaccaagtacagccagaagccgcataacaaagtacagcactgttcagtacagcaagtag

SEQ ID NO: 122304 - DNA, 3150 bp, Artificial Sequence
  derived and/or modified sequence
atggactggagcttcttccgggtggtggccatgctgttcatcttcctggtggtggtggaggtgaacagcgagttccgcatccaggtgcgggactacaacaccaagaatggcaccatcaagtggcacagcatccggcggcagaagcgggagtggatcaagtttgctgctgcctgccgggagggggaggacaacagcaagaggaaccccatcgccaagatccacagcgactgtgccgccaaccagcaggtgacctaccgcatcagcggcgtgggcatcgaccagcccccctacggcatcttcgtcatcaaccagaagacaggagagatcaacatcaccagcatcgtggaccgggaggtgacccccttcttcatcatctactgccgggccctgaacagcatgggccaggacctggagcggcccctggagctgcgggtgcgggtgctggacatcaatgacaacccccctgtgttctccatggccacctttgctggccagatcgaggagaacagcaatgccaacaccctggtgatgatcctgaatgccacagatgctgatgagcccaacaacctgaacagcaagatcgccttcaagatcatccggcaggagcccagcgacagccccatgttcatcatcaacagaaatactggagagatccgcaccatgaacaacttcctggaccgggagcagtatggccagtatgccctggccgtgcggggcagtgacagagatggaggagcagatggcatgtctgcagaatgtgagtgcaacatcaagatcctggatgtgaatgacaacatcccctacatggagcagagcagctacaccatcgagatccaggagaacaccctgaacagcaacctgctggagatccgggtgattgacctggatgaggagttcagcgccaactggatggctgtgatcttcttcatctctggaaatgaaggcaactggtttgaaattgagatgaatgaaagaacaaatgtgggcatcctgaaggtggtgaagcccctggactatgaggccatgcagagcctgcagctgagcattggagtgaggaacaaggccgagttccaccacagcatcatgagccagtacaagctgaaggccagcgccatctctgtgacagtgctgaatgtcatcgagggccctgtgttccggcccggcagcaagacctacgtggtgactggaaacatgggcagcaatgacaaggtgggggactttgtggccacagacctggacaccggccggcccagcaccaccgtgcgctacgtgatgggcaacaacccagctgacctgctggccgtggacagcaggacaggcaagctgaccctgaagaacaaggtgaccaaggagcagtacaacatgctgggcggcaagtaccagggcaccatcctgagcattgatgacaacctgcagaggacctgcaccggcaccatcaacatcaacatccagagctttggaaatgatgacaggaccaacacagagcccaacaccaagatcaccaccaacacaggccggcaggagagcaccagcagcaccaactatgacaccagcaccaccagcacagacagcagccaggtgtacagcagcgagcctggaaatggagccaaggacctgctgagtgacaacgtgcacttcggccctgctggcatcggcctgctgatcatgggcttcctggtgctgggcctggtgcccttcctgatgatctgctgtgactgtggcggggcccccaggtctgctgctggctttgagcctgtgcctgagtgcagtgatggagccatccacagctgggccgtggagggcccccagcctgagccccgggacatcaccaccgtcatcccccagatccccccagacaatgccaacatcattgaatgtattgacaacagcggcgtgtacaccaatgaatatggaggccgggagatgcaggacctgggcggcggggagaggatgacaggctttgagctgacagaaggagtgaagaccagcggcatgcctgagatctgccaggagtacagcggcaccctgcggaggaacagcatgagagaatgtcgggagggcggcctgaacatgaacttcatggagagctacttctgccagaaggcctatgcctatgcagatgaagatgagggccggcccagcaatgactgcctgctgatctatgacattgaaggagtgggcagccctgctggctctgtgggctgctgcagcttcatcggggaggacctggatgacagcttcctggacaccctgggccccaagttcaagaagctggccgacatcagcctgggcaaggagagctacccagacctggaccccagctggccaccccagagcacagagcctgtgtgcctgccccaggagacagagcctgtggtgtctggccacccccccatcagcccccacttcggcaccaccaccgtcatcagcgagagcacctaccccagcggccctggggtgctgcaccccaagcccatcctggaccccctgggctatggaaatgtgacagtgacagagagctacaccaccagtgacaccctgaagcccagcgtgcacgtgcatgacaacagacctgccagcaatgtggtggtgacagagcgggtggtgggccccatctctggagctgacctgcacggcatgctggagatgccagacctgagagatggcagcaatgtgattgtgacagagcgggtgattgcccccagcagcagcctgcccaccagcctgaccatccaccacccccgggagagcagcaatgtggtggtgacagagagggtcatccagcccaccagcggcatgattggcagcctgtccatgcaccctgagctggccaatgcccacaacgtcatcgtgacagagcgggtggtgtctggagctggggtgacaggcatcagcggcaccaccggcatcagcggcggcatcggcagcagcggcctggtgggcacctccatgggcgccggcagcggggccctgagcggggccggcatcagcggcggcggcatcggcctgagcagcctgggcggcacagccagcatcggccacatgaggagcagcagtgaccaccacttcaaccagaccatcggcagcgccagccccagcacagcccggagccgcatcaccaagtacagcacagtgcagtacagcaagtag

SEQ ID NO: 122305 - DNA, 3150 bp, Artificial Sequence
  derived and/or modified sequence
atggactggagcttcttccgggtggtggccatgctgttcatcttcctggtggtggttgaggtaaattctgagttccgcatccaggttcgagactacaacactaaaaacggcacaatcaaatggcatagcattcgtcggcagaaacgtgagtggatcaagttcgctgctgcctgtagggaaggcgaggataattctaagaggaacccaatcgccaaaatccactcagactgtgccgctaaccagcaagtcacctaccgcatttctggcgtgggaatcgatcagcccccatacggcatatttgtgattaaccagaagacaggggaaatcaacattacaagtatcgtggaccgggaggtgacaccctttttcattatatactgccgcgcattaaactctatggggcaggacctggagcggccgcttgagctgcgcgtccgcgttttagacattaacgataacccaccagtgtttagtatggccacatttgccggtcagatcgaagaaaacagcaacgctaacaccctggttatgatcctgaacgcaacagatgctgacgaacccaataatctcaactccaagatagctttcaagattatccgtcaggaaccttctgattccccaatgttcatcattaacagaaacactggggaaattcgcacaatgaacaatttccttgacagagagcaatatggccagtacgcccttgccgtgcgaggctctgacagagatggcggtgctgacggcatgagcgctgaatgcgaatgcaacatcaaaatattggatgtgaatgacaatattccctacatggaacaatcctcctacacaatcgagattcaggagaacacgctcaattctaacttactagagattagagtcatcgatctggatgaagagttttccgccaattggatggcagttattttcttcatttccggcaatgaagggaactggtttgaaatcgagatgaacgaaaggacaaacgtgggaatccttaaagttgtcaaaccattggactatgaagcaatgcagagccttcagctgtcaatcggagtccgcaataaagccgaattccaccattctatcatgtctcagtacaaactgaaggccagtgcgatcagcgttactgtactcaacgttatcgaaggccctgtgttccgcccaggatcaaagacttatgtggtgactggaaacatgggtagcaacgacaaagttggcgacttcgtagctactgatctggatacaggtaggccttccacgacagtacgctatgtgatggggaataatcccgccgaccttcttgcagtcgactcccggaccgggaagctaacgctgaaaaataaagtgacaaaggaacagtacaacatgctgggaggaaagtaccaggggacaatccttagtattgatgacaacctgcagaggacctgcactggcacaattaatatcaatattcagagcttcggcaacgatgataggacaaatactgagccgaacacgaaaatcaccaccaacaccggtcgccaggagagtacgagtagtacaaactacgatacgtcaacaacttcaaccgacagctctcaagtctattcctccgagccgggtaacggggccaaagaccttctgagcgacaacgtgcattttgggcctgcaggaattggactcttgatcatgggctttctagtgctcggcctcgtcccctttttgatgatttgttgcgactgcggaggcgcaccaaggtctgccgccggattcgaacccgtgcccgagtgctccgacggtgctattcattcctgggcagtcgagggtcctcaacctgaacccagagacatcacaacggtaatcccccaaatcccacccgacaacgctaacatcatcgaatgcattgacaatagtggggtgtacactaatgagtacggggggagagaaatgcaggatttggggggcggggagcgcatgacagggtttgagcttacagagggcgtgaaaacctccggtatgcccgagatatgccaggagtattcggggacactacgcaggaacagcatgagggagtgtcgcgaaggaggactcaatatgaactttatggagtcctatttctgccagaaggcttacgcttacgcagatgaggacgaaggaagaccttctaatgactgtcttctgatctacgacatcgaaggcgtgggcagtccagccgggagtgtcggatgttgctcattcatcggtgaggatcttgacgattcctttctcgacacactcggccctaaatttaagaagctcgctgatatcagcttgggcaaggagagctatcccgatctggatcccagctggcctcctcagagcaccgagcccgtgtgtctacctcaggagacggagcctgtggttagcggacaccctcctatctcccctcatttcggtaccaccactgtgatctccgagagtacatatccctccggccccggcgtgctgcatcccaaacctatcttggacccgttgggatatggtaatgtaaccgtgacagaatcatataccacctctgatactctaaaaccctctgtacatgtgcacgataacagacctgccagcaatgttgttgtcaccgagcgggtcgtcggaccaatcagtggagctgacctgcatgggatgcttgaaatgccagatctacgcgacggctctaacgtgattgtcacggagagagtgattgccccgtcttcctccctgccaacttcccttacaatccaccaccctcgcgaatcatcaaacgtggttgtaaccgaaagagttattcagcccactagcggtatgatcggttctttgtcaatgcaccccgagctggccaatgcccataacgtcatagtcaccgaaagggtcgtaagcggcgcaggcgttacaggaatttcaggaacaacagggatttctgggggcattggttcttccggattggtgggcacttcaatgggcgccggctccggcgctcttagtggcgcgggcatctccggcggaggcatcggcctgtcctcactcgggggtactgccagtataggtcatatgaggtcgtcctctgaccatcactttaaccagacaatcggctcggcatcgccaagtactgctaggtccaggattaccaagtactcgacggtgcagtatagtaagtag

SEQ ID NO: 122306 - DNA, 3150 bp, Artificial Sequence
  derived and/or modified sequence
atggactggtctttcttccgtgtagtggcgatgctgttcatcttcttggttgtggtcgaagtcaattctgaattccggatccaagtccgagattacaacactaagaatgggactattaagtggcactctattaggcgccagaagagagagtggattaaattcgccgctgcttgtagagagggcgaagacaattccaaaagaaatccaatcgctaagatccatagcgactgcgctgctaaccagcaagtgacctacaggatctctggggtgggaatcgatcagcccccatacggaatctttgtgataaaccagaaaactggcgagatcaatatcacttccattgtggaccgtgaagtgacacccttttttatcatctactgtcgagctctaaattctatgggccaggacctagagagaccactggagctcagggtgagagtgttggacatcaacgacaacccaccagtgttttctatggccacattcgcgggacaaatcgaggagaactccaacgccaataccctggtgatgatcctgaatgctaccgatgccgatgaacctaataatttgaactcaaagatagcgttcaagatcataagacaggagccatcagatagccccatgtttattattaatcggaatacaggcgagatccgaacaatgaataatttcctcgaccgcgagcagtacgggcagtacgcactagccgtgaggggtagcgacagggacgggggagccgacggaatgtcggcggagtgcgagtgtaacattaagattcttgatgtcaatgataatattccctacatggaacagagctcatacaccattgaaatccaggaaaataccctcaacagtaacctgttagaaatccgggttattgatttggacgaggaattctcggccaactggatggccgtcatcttctttatttccgggaacgagggcaattggtttgaaatcgaaatgaacgagcgcactaacgtgggtattctcaaggttgtcaaacctctcgattacgaggccatgcagtcccttcagctgagcattggcgtcaggaacaaagccgaattccatcattcaattatgagccagtacaagctgaaggcttctgctatcagtgtaactgttctgaatgtaattgaagggccagtcttcagacctgggtcgaaaacatacgttgtgacagggaatatgggtagcaacgacaaggtgggcgattttgtggccacagacttggacaccggcagaccaagtactaccgtcagatatgtgatgggcaacaaccccgctgatctgctcgccgtagattcccggacggggaaactcactctaaaaaataaggttaccaaagaacaatacaatatgcttggcggaaagtatcagggcacaatcttaagtatcgatgacaatctgcagagaacatgcaccggaacaatcaacatcaacatccagtcttttggcaacgacgatcgaaccaatactgaacccaataccaagatcaccactaacacgggcaggcaggaaagcacctcatcaactaactatgatacaagcacgacttcaaccgacagtagtcaggtctactcatctgaacctgggaacggcgctaaagacctattgtccgacaatgtccacttcggccctgcagggattgggttgctgattatggggtttctggtgctgggtcttgtccctttccttatgatctgttgcgactgcggaggggcacctagatctgccgctggcttcgaacccgtccctgagtgtagtgacggggctattcactcctgggcagtagaggggcctcagcctgagccacgagacatcactacagtgattccacagattccgcctgacaatgcaaatataattgagtgtattgataactctggcgtctacacgaatgaatacggcggtcgagagatgcaagacctcgggggaggagagcgcatgacaggattcgaactgacagagggagtaaagactagcggcatgcccgaaatctgtcaagaatacagtggaactctgagacggaattcaatgcgggagtgtagggagggaggcctgaacatgaacttcatggagtcctatttctgtcaaaaggcgtatgcttatgccgatgaggatgagggccgaccttctaatgactgcttgctgatctacgacatagaaggagttggcagtccagccggaagcgtgggttgctgtagtttcatcggggaggacctcgacgacagcttcctcgatacactgggcccaaagtttaagaaactcgctgatattagccttggcaaggaatcttatcccgaccttgatccctcgtggccgccacagtctactgagccagtttgtcttcctcaagaaactgagcccgtcgttagtggccaccccccaatttcgccccacttcgggacgacgaccgttattagtgagtctacatacccatccgggcctggtgtgctgcacccaaagcccatcttggatcccctggggtatggcaacgtgaccgtgaccgagtcatatactacatcagacacactaaagccatctgtgcacgtgcacgataaccggccagcgtcaaacgtcgtggtgaccgaaagggtagtcggacccatttctggggcagaccttcatgggatgctggaaatgcctgatttacgggatggtagcaatgttattgttaccgaacgggtgattgcaccatctagcagtctgccaactagtctcaccatccaccatcccagagaatcatctaacgtggtggttactgagagggttatacagcccacctctgggatgatcggcagcttatccatgcaccccgagcttgccaatgcccacaacgtcatcgtgacagagagggtggtctccggagctggcgtgaccggcatctcaggcaccaccggcatatctggtggtataggctcatctggattggtgggaacctcaatgggagccggttccggagcactgtctggcgcaggaatctcaggcggaggaatagggctctccagtctgggcggaactgccagtatcggccacatgcgaagctctagtgatcaccacttcaaccagaccatcggatccgctagcccctctaccgcccgtagcagaatcactaagtactcgacagtgcagtacagcaagtag

SEQ ID NO: 122307 - DNA, 3150 bp, Artificial Sequence
  derived and/or modified sequence
atggactggagcttcttcagagtggtggccatgctgttcatcttcctggtggtggtggaggtgaacagcgagttcagaatccaggtgagagactacaacaccaagaacggcaccatcaagtggcacagcatcagaagacagaagagagagtggatcaagttcgccgccgcctgcagagagggcgaggacaacagcaagagaaaccccatcgccaagatccacagcgactgcgccgccaaccagcaggtgacctacagaatcagcggcgtgggcatcgaccagcccccctacggcatcttcgtgatcaaccagaagaccggcgagatcaacatcaccagcatcgtggacagagaggtgacccccttcttcatcatctactgcagagccctgaacagcatgggccaggacctggagagacccctggagctgagagtgagagtgctggacatcaacgacaacccccccgtgttcagcatggccaccttcgccggccagatcgaggagaacagcaacgccaacaccctggtgatgatcctgaacgccaccgacgccgacgagcccaacaacctgaacagcaagatcgccttcaagatcatcagacaggagcccagcgacagccccatgttcatcatcaacagaaacaccggcgagatcagaaccatgaacaacttcctggacagagagcagtacggccagtacgccctggccgtgagaggcagcgacagagacggcggcgccgacggcatgagcgccgagtgcgagtgcaacatcaagatcctggacgtgaacgacaacatcccctacatggagcagagcagctacaccatcgagatccaggagaacaccctgaacagcaacctgctggagatcagagtgatcgacctggacgaggagttcagcgccaactggatggccgtgatcttcttcatcagcggcaacgagggcaactggttcgagatcgagatgaacgagagaaccaacgtgggcatcctgaaggtggtgaagcccctggactacgaggccatgcagagcctgcagctgagcatcggcgtgagaaacaaggccgagttccaccacagcatcatgagccagtacaagctgaaggccagcgccatcagcgtgaccgtgctgaacgtgatcgagggccccgtgttcagacccggcagcaagacctacgtggtgaccggcaacatgggcagcaacgacaaggtgggcgacttcgtggccaccgacctggacaccggcagacccagcaccaccgtgagatacgtgatgggcaacaaccccgccgacctgctggccgtggacagcagaaccggcaagctgaccctgaagaacaaggtgaccaaggagcagtacaacatgctgggcggcaagtaccagggcaccatcctgagcatcgacgacaacctgcagagaacctgcaccggcaccatcaacatcaacatccagagcttcggcaacgacgacagaaccaacaccgagcccaacaccaagatcaccaccaacaccggcagacaggagagcaccagcagcaccaactacgacaccagcaccaccagcaccgacagcagccaggtgtacagcagcgagcccggcaacggcgccaaggacctgctgagcgacaacgtgcacttcggccccgccggcatcggcctgctgatcatgggcttcctggtgctgggcctggtgcccttcctgatgatctgctgcgactgcggcggcgcccccagaagcgccgccggcttcgagcccgtgcccgagtgcagcgacggcgccatccacagctgggccgtggagggcccccagcccgagcccagagacatcaccaccgtgatcccccagatcccccccgacaacgccaacatcatcgagtgcatcgacaacagcggcgtgtacaccaacgagtacggcggcagagagatgcaggacctgggcggcggcgagagaatgaccggcttcgagctgaccgagggcgtgaagaccagcggcatgcccgagatctgccaggagtacagcggcaccctgagaagaaacagcatgagagagtgcagagagggcggcctgaacatgaacttcatggagagctacttctgccagaaggcctacgcctacgccgacgaggacgagggcagacccagcaacgactgcctgctgatctacgacatcgagggcgtgggcagccccgccggcagcgtgggctgctgcagcttcatcggcgaggacctggacgacagcttcctggacaccctgggccccaagttcaagaagctggccgacatcagcctgggcaaggagagctaccccgacctggaccccagctggcccccccagagcaccgagcccgtgtgcctgccccaggagaccgagcccgtggtgagcggccacccccccatcagcccccacttcggcaccaccaccgtgatcagcgagagcacctaccccagcggccccggcgtgctgcaccccaagcccatcctggaccccctgggctacggcaacgtgaccgtgaccgagagctacaccaccagcgacaccctgaagcccagcgtgcacgtgcacgacaacagacccgccagcaacgtggtggtgaccgagagagtggtgggccccatcagcggcgccgacctgcacggcatgctggagatgcccgacctgagagacggcagcaacgtgatcgtgaccgagagagtgatcgcccccagcagcagcctgcccaccagcctgaccatccaccaccccagagagagcagcaacgtggtggtgaccgagagagtgatccagcccaccagcggcatgatcggcagcctgagcatgcaccccgagctggccaacgcccacaacgtgatcgtgaccgagagagtggtgagcggcgccggcgtgaccggcatcagcggcaccaccggcatcagcggcggcatcggcagcagcggcctggtgggcaccagcatgggcgccggcagcggcgccctgagcggcgccggcatcagcggcggcggcatcggcctgagcagcctgggcggcaccgccagcatcggccacatgagaagcagcagcgaccaccacttcaaccagaccatcggcagcgccagccccagcaccgccagaagcagaatcaccaagtacagcaccgtgcagtacagcaagtag

SEQ ID NO: 122308 - DNA, 5045 bp, Artificial Sequence
  derived and/or modified sequence
ccagcccaagtttttagggtggggatccagactggttatacgtaccttcagtccttctcccagaggaaggcagaaacacctcaaagcctgcatgtaagaacatctactgagaaattattttaatcagacaccagctgagtgggagaaagaaaaagaacagagaagaacaaacaaaactcccttggtcttggatgtaagagaatccagcagagatggactggagtttcttcagagtagttgcaatgctgttcatttttctggtggtggtagaagttaacagtgaattccgaatccaggtaagagattataacactaaaaatggcaccatcaaatggcattcaatccgaaggcagaaacgtgaatggatcaagttcgcagcagcctgtcgtgaaggtgaagacaactcaaagaggaacccaatcgccaaaattcactcagattgtgctgcaaaccagcaagttacataccgcatctctggagtaggaattgatcagccaccatatgggatctttgtcattaatcagaaaactggtgaaattaatataacatccatagttgatcgagaggtcactcctttcttcattatctactgccgagctctgaactcaatgggccaagatttagagaggcctctagagctcagagtcagggttttggatataaatgacaaccctccagtgttttcaatggctacatttgcaggacaaatagaagaaaattctaatgcaaatacactggtgatgatactcaatgctactgacgcagatgaaccgaacaatttgaactcaaaaatagccttcaagattataagacaagaaccttcagattcaccaatgtttattatcaacagaaatactggagaaattcgaacgatgaataattttctagacagagagcaatacggccagtatgctcttgctgtaagaggctctgaccgagatggcggggcagatggcatgtcagcggaatgtgagtgcaacattaaaatcctcgatgtcaatgataatatcccttacatggaacagtcttcatataccatagaaattcaagaaaatactctaaattcaaatttgctcgagattagagtaattgatttggatgaagagttctcagctaactggatggcagtaattttctttatctctggaaatgaaggaaattggtttgagatagaaatgaatgaaagaacaaatgtgggaattttaaaggttgttaagcccttagattatgaagctatgcagagtctgcaactcagtattggtgtcagaaataaagctgaatttcatcattcaattatgtctcaatataaactgaaagcatctgcaatttctgtgactgtgttaaatgtaattgaaggcccagtgtttcgtccaggttcaaagacatatgttgtaactggtaatatgggatcaaatgataaagtgggagactttgtagctactgacctggacacaggtagaccttcaacgactgttaggtatgtaatgggaaataatccagctgacctgctagctgttgattcaagaacaggcaaactcactttgaaaaataaagttaccaaggaacagtacaatatgctcggaggaaaataccaaggaacgattctctctatagatgataatcttcaaagaacttgcactggtacaattaatattaacattcaaagttttggtaatgacgacaggactaatacagagccgaacactaaaattactaccaatactggcagacaagaaagtacttcttccactaactatgataccagcacaacttctactgactctagccaagtatattcttctgaacccggaaacggagccaaagatttgttatcagacaatgtacattttggtcctgctggcattggactcctcatcatgggattcttggtcttaggattggtcccatttttgatgatctgttgtgattgtggaggtgctcctcgtagtgcagctggctttgagcctgttcccgaatgttcagatggagcaattcattcatgggcagtagaaggaccacagcctgaacccagggatataaccactgtcataccacaaataccacctgataacgcaaatataattgaatgcattgacaactcaggagtttatacaaatgagtatggtggcagagaaatgcaagatctgggaggaggagagagaatgacaggatttgaactaacagagggagttaaaacttcaggaatgcctgagatatgtcaagaatactctggaacattaagaagaaattctatgagggaatgtagagaaggaggtctgaatatgaatttcatggaaagctacttctgtcagaaagcatatgcttacgcagatgaagatgaaggacgcccatctaatgactgtttgctcatatatgacatcgaaggtgtaggttcccctgctggctctgtgggttgttgtagcttcattggagaagacctggatgacagcttcttggataccctgggacctaaatttaagaagttggcagacatcagcctaggaaaagaatcatatccagaccttgatccttcttggccaccacaaagcactgaaccagtttgccttcctcaggaaacagagcccgttgttagtggacacccaccaatctccccacatttcggcactaccacagtaatttctgagagcacctatccctcgggacctggtgtactgcatcctaagcctattctcgatcctctgggctatggtaatgtcactgtgaccgagtcttacaccacctctgacactctgaagccctctgtgcacgttcacgataaccgaccagcatcaaacgtggtagtgacagagagagtggtcggcccaatctctggcgctgatttgcatggaatgttagagatgcctgacttgcgagatgggtcgaatgttatagtgacagaaagggtaatagcaccaagctctagtctacccacctctctgactatccatcatcctagagagtcttcaaatgtggtagtgacagaaagagtaatccaaccaacttccggcatgataggtagtctgagtatgcaccccgagttagccaatgcccacaatgtcattgtgacagagagggttgtttctggtgctggcgtaactggaattagtggcaccactgggatcagcggtggcataggcagcagtggcctggttggcaccagcatgggtgctgggagcggtgccctgagtggagctggcataagtggtggtggcattggcctgagcagcttgggagggacagccagcattggccacatgaggagttcctctgaccatcactttaaccaaaccattgggtccgcctcccctagcacagctcgaagtcgaatcacaaagtatagtaccgtgcaatatagcaagtagtcaggaccccagctcactttttcatagtcattgtggtttagatccaattcccaccactaaaaaaccaacaatgtgatttataacgcacaacttcgtgctcaggtcatctaggagcaaggtgagaaatcacaatgagaaaaataaatggaaacaccactgctaggggagagctctccttagcattcataaacttttctcttatattaggactaaggaactaaaacttgaggcagagtcttctttgtgcctgagtggcctgtagtccatctccagcatgtaactggccttacgatggcaattggcatcattctccttgctctgttttgcttttccatatagctcgagcaaaattcaaaaagaactaaatatgcaatatatgttcatatctatgggaaaaatctaaaatgtgtgccagatgccctgttggtttcacagataacataaataaaaattcaaccacagatttatacaagggttaaccattttttttaagtttgactacatagtcaagtccacaagccatcaagcactcctaccttaattattgcactagagaaaataaattccaaattaggaagtgtttcctaggaggaaaattccattagagagtggcaataggatgaggtttcttcagggtaaactagcaatgcctgagcctgaaccttaatgtggggcctcagttaaatctcctgtggagtcaaggattcttctgattctagtgtgtgtttagtgatagatgtagtcttgacgaatattgcttactggtgaggttgaggaatatcacactcgtctttccctttaccactgtggttttgacttaagaaagcaaaactcactaagtttacttctcgaattgaagcaagtgaggcctgacatggttgtcatcactagtggcaaatgaccttccaagtaagcagatgggaactgaattgtgttttcaggttttgtttttagtaggtgatattcattcgtatccagctctttattacatagctctgaagttaaaatgatttacataggccgagctgtggacaaaaaaaaaagaagcagcagcttgtagtatgcttaagctttggggaatttttttttaaggggatctaaaaaaatgtttttagaacatgtaaaatgtttaatggtgaaagttggaaaagaattcttctgtaaagtaataccatgctaattattcgcttttagtaagtaaagtagtggttgctttagcaaacctctgctgccattttgcaggaatcaaccaggaacctttagcagaattgacaatatggtgttgataagcatgaaataataatagaaacctattctgctagtttatctcaccctctaatttttctcactagcataaattttaaattcctgatttgatttgtcaataagatcttggcttatatatgctgatttataggtagtgtccaaattatatagtataacatatttttctagtttcaaaatttagtaatgtcctatttatgatatatcatttctgtgtgtttgctatgtagtattacccaattaaaaatctctaaaaagaattaaagcattctaagaaaaaggtaaatttactattgcatggtacagaaattttttctttcttaaatacaatgttactataagctcactaaaatgaaactctatatgacaaaataaaattagaaaaaaatttgccctgga

SEQ ID NO: 122309 - protein, 1118 aa, Artificial Sequence
  derived and/or modified sequence
MARSPGRAYALLLLLICFNVGSGLHLQVLSTRNENKLLPKHPHLVRQKRAWITAPVALREGEDLSKKNPIAKIHSDLAEERGLKITYKYTGKGITEPPFGIFVFNKDTGELNVTSILDREETPFFLLTGYALDARGNNVEKPLELRIKVLDINDNEPVFTQDVFVGSVEELSAAHTLVMKINATDADEPNTLNSKISYRIVSLEPAYPPVFYLNKDTGEIYTTSVTLDREEHSSYTLTVEARDGNGEVTDKPVKQAQVQIRILDVNDNIPVVENKVLEGMVEENQVNVEVTRIKVFDADEIGSDNWLANFTFASGNEGGYFHIETDAQTNEGIVTLIKEVDYEEMKNLDFSVIVANKAAFHKSIRSKYKPTPIPIKVKVKNVKEGIHFKSSVISIYVSESMDRSSKGQIIGNFQAFDEDTGLPAHARYVKLEDRDNWISVDSVTSEIKLAKLPDFESRYVQNGTYTVKIVAISEDYPRKTITGTVLINVEDINDNCPTLIEPVQTICHDAEYVNVTAEDLDGHPNSGPFSFSVIDKPPGMAEKWKIARQESTSVLLQQSEKKLGRSEIQFLISDNQGFSCPEKQVLTLTVCECLHGSGCREAQHDSYVGLGPAAIALMILAFLLLLLVPLLLLMCHCGKGAKGFTPIPGTIEMLHPWNNEGAPPEDKVVPSFLPVDQGGSLVGRNGVGGMAKEATMKGSSSASIVKGQHEMSEMDGRWEEHRSLLSGRATQFTGATGAIMTTETTKTARATGASRDMAGAQAAAVALNEEFLRNYFTDKAASYTEEDENHTAKDCLLVYSQEETESLNASIGCCSFIEGELDDRFLDDLGLKFKTLAEVCLGQKIDINKEIEQRQKPATETSMNTASHSLCEQTMVNSENTYSSGSSFPVPKSLQEANAEKVTQEIVTERSVSSRQAQKVATPLPDPMASRNVIATETSYVTGSTMPPTTVILGPSQPQSLIVTERVYAPASTLVDQPYANEGTVVVTERVIQPHGGGSNPLEGTQHLQDVPYVMVRERESFLAPSSGVQPTLAMPNIAVGQNVTVTERVLAPASTLQSSYQIPTENSMTARNTTVSGAGVPGPLPDFGLEESGHSNSTITTSSTRVTKHSTVQHSYS

SEQ ID NO: 122310 - DNA, 3357 bp, Artificial Sequence
  derived and/or modified sequence
atggcgaggagccctgggagggcctatgcactcttactactgttgatatgttttaatgtggggtccgggctccatttacaggtcctgtccacgcgcaatgaaaacaaactcctcccaaagcaccctcacctagtgcgccaaaagcgggcttggatcaccgcccccgtcgctctccgggagggagaagatttgtccaaaaaaaaccctatcgccaaaatacacagcgaccttgcagaagaacgaggattgaagattacctataagtataccggcaaggggattaccgagcctcctttcgggattttcgtgttcaacaaagacactggtgagctgaatgttacctctatattggaccgggaggaaacacctttttttctgcttacaggctacgcactggatgcacggggcaacaacgttgagaagcctttggagctccggataaaagtgctcgatatcaatgacaatgaaccagtctttacccaggatgtgttcgtggggagcgtggaagaactgtctgctgcacataccctcgtgatgaagatcaatgccacagacgcagatgaacccaataccttgaattctaagatttcctaccgaatcgtctcgctggagcccgcttacccaccagtgttctatctgaataaggacaccggcgaaatatacactacatccgtgaccctggatcgcgaggagcatagttcttacacgcttaccgtggaggccagggatgggaacggggaggtgaccgataaacctgtgaagcaggctcaggtgcagatcagaatattggacgtgaatgacaacatacctgtagtggaaaacaaagtgctggagggtatggtcgaggaaaatcaggtgaatgtcgaggtgaccagaatcaaggtcttcgacgccgatgagatcggcagcgataattggttagcaaactttactttcgctagcgggaacgaggggggttattttcacatcgaaactgacgcacagaccaatgagggtattgtcacgttaataaaggaggtagactacgaagaaatgaaaaatctggatttttcggtaatcgtggccaacaaagcagctttccataaaagcatccggagtaaatataagcccactcccattccgatcaaggttaaggtcaagaatgtgaaggaagggatccatttcaaatctagcgtgatcagtatatacgtgtctgagagcatggacaggagttctaagggacagatcatcgggaactttcaggccttcgatgaagacaccggcctacccgcccatgcccgatacgtgaagttggaggatagggacaattggatctccgtggactccgttacatcggaaattaagctcgctaaattgcctgactttgagtctagatacgtccagaacgggacatacactgttaagatcgtagcgatttccgaggactacccaaggaaaacaattactggaactgtcctaatcaatgtggaggacatcaatgacaactgtccaacgctgatcgagcctgttcagacgatttgccatgacgctgaatacgtgaatgttacagcagaagacttggacgggcatccgaactcggggcccttttcttttagcgtgattgacaagcctccgggaatggccgagaaatggaaaatagccagacaagaatccacctctgttctcctccagcagagtgaaaaaaagctcggcagatctgaaattcaatttctgatctccgacaatcaaggattcagttgcccagaaaaacaagtgctgaccttgaccgtgtgtgaatgcctccatggttccggatgccgagaggcgcaacatgactcctacgtgggcctgggtcccgcagcaatcgcgctcatgatcttggcatttctacttctgctgctggttccgctgttgcttttgatgtgtcattgcgggaagggagctaaagggtttacaccaatccccggaacgatagaaatgctccacccctggaacaacgagggggctccgcctgaagacaaggtggtaccctcatttctgcctgtcgatcaaggaggcagcttggtgggacggaatggggtgggaggaatggccaaggaggcaaccatgaaaggtagtagctccgcatctatcgtgaagggccaacacgagatgtcagaaatggatggtagatgggaggaacatcgttcactcctcagcggaagagctactcagtttacaggagccacgggggctattatgactacagaaactaccaaaaccgcccgcgcaacgggagcctccagggatatggcgggcgcccaagctgccgccgtggccctgaacgaggagtttcttcggaattattttactgacaaggctgcttcctataccgaagaggacgaaaaccacacagctaaggattgcctgctggtgtattcccaggaggaaactgagtctcttaatgcctccattggctgctgttcatttattgaaggggagctggatgacaggtttctggacgacctgggtcttaagttcaaaacactggcagaagtatgcctgggacagaagattgatattaataaggagattgagcaaaggcagaaacctgctaccgagaccagcatgaacaccgctagtcacagcttgtgcgagcaaacaatggttaactctgagaatacttacagtagtgggtcctcatttcccgtcccaaagtctttgcaagaagcaaacgccgaaaaagtcactcaagagatcgtcaccgagcgcagcgtgagttcccgccaagcacagaaggtggcaaccccgctcccagaccccatggcaagtagaaatgttatcgctaccgaaacatcctacgtaacagggagcaccatgccacccactaccgtgatactgggtccgtcccaaccccaatctctgatagtgacagaacgagtctacgctcccgcttctactctggtggatcaaccctatgccaacgaaggcaccgtggttgtcacggagcgggtgatccaaccgcacgggggaggaagtaaccctttagaaggcactcaacacctgcaggatgtgccatatgtcatggtccgggagagggaaagctttctggccccgagtagtggcgtccagcccactttagctatgccgaacatcgcggtgggacagaatgtcactgtgacagaacgcgtactggctcccgcgagtacattgcagtcatcttaccagattcctaccgaaaattctatgacggcgcggaacacgactgtttctggcgctggcgtacctgggcctctgcccgacttcggccttgaggagagcggacactcgaacagcacgataacaacttcttctacacgggtcaccaagcactccaccgttcagcactcctattcttag

SEQ ID NO: 122311 - DNA, 3357 bp, Artificial Sequence
  derived and/or modified sequence
atggcccggagccctggccgggcctatgccctgctgctgctgctgatctgcttcaacgtgggcagcggcctgcacctgcaggtgctgagcaccagaaatgaaaacaagctgctgcccaagcacccccacctggtgcggcagaagagggcctggatcacagcccctgtggccctgcgggagggggaggacctgagcaagaagaaccccatcgccaagatccacagcgacctggccgaggagcggggcctgaagatcacctacaagtacaccgggaagggcatcacagagcccccatttggcatctttgtgttcaacaaggacaccggggagctgaatgtgaccagcatcctggaccgggaggagacccccttcttcctgctgaccggctacgccctggatgcccggggcaacaacgtggagaagcccctggagctgcgcatcaaggtgctggacatcaatgacaatgaacctgtgttcacccaggatgtgtttgtgggctctgtggaggagctgtctgctgcccacaccctggtgatgaagatcaatgccacagatgctgatgagcccaacaccctgaacagcaagatctcctaccgcatcgtgtccctggagcccgcctacccacctgtgttctacctgaacaaggacacaggagagatctacaccacctctgtgaccctggaccgggaggagcacagcagctacaccctgactgtggaggccagagatggaaatggagaggtgacagacaagcctgtgaagcaggcccaggtgcagatccgcatcctggatgtgaatgacaacatccctgtggtggagaacaaggtgctggagggcatggtggaggagaaccaggtgaatgtggaggtgacccgcatcaaggtgtttgatgctgatgaaattggaagtgacaactggctggccaacttcacctttgccagcggaaatgaaggaggctacttccacattgaaacagatgcccagaccaatgaaggaattgtgaccctcatcaaggaggtggactatgaggagatgaagaacctggacttctctgtgattgtggccaacaaggccgccttccacaagagcatccgcagcaagtacaagcccacccccatccccatcaaggtgaaggtgaagaatgtgaaggagggcatccacttcaagagcagcgtcatcagcatctacgtgtctgagagcatggacaggagcagcaagggccagatcatcggcaacttccaggcctttgatgaggacaccggcctgcctgcccacgcccgctacgtgaagctggaggaccgggacaactggatctctgtggacagcgtgaccagcgagatcaagctggccaagctgcctgactttgagagccgctacgtgcagaatggcacctacacagtgaagatcgtggccatcagcgaggactaccccaggaagaccatcaccggcaccgtgctgatcaacgtggaggacatcaatgacaactgccccaccctcatcgagcctgtgcagaccatctgccatgatgctgaatatgtgaatgtgacagctgaggacctggatggccaccccaacagcggccccttctccttcagcgtcatcgacaagcccccaggcatggccgagaagtggaagatcgcccggcaggagagcacctctgtgctgctgcagcagagcgagaagaagctgggccgctctgagatccagttcctgatcagtgacaaccagggcttcagctgcccagagaagcaggtgctgaccctgactgtgtgtgagtgcctgcacggcagcggctgccgggaggcccagcacgacagctatgtgggcctgggccctgctgccatcgccctgatgatcctggccttcctgctgctgctgctggtgcccctgctgctgctgatgtgccactgtgggaaaggagccaagggcttcacccccatccctggcaccatcgagatgctgcacccctggaacaatgaaggagcccccccagaggacaaggtggtgcccagcttcctgcctgtggaccagggcggcagcctggtgggcagaaatggagtgggcggcatggccaaggaggccaccatgaagggcagcagcagcgccagcatcgtgaagggccagcacgagatgtctgagatggatggccgctgggaggagcacaggagcctgctgagcggccgggccacccagttcaccggggccaccggggccatcatgaccacagagaccaccaagacagcccgggccactggagccagccgggacatggccggggcccaggccgctgctgtggccctgaatgaggagttcctgaggaactacttcacagacaaggccgccagctacacagaggaggatgagaaccacacagccaaggactgcctgctggtgtacagccaggaggagacagagagcctgaatgccagcatcggctgctgcagcttcattgaaggagagctggatgaccgcttcctggatgacctgggcctgaagttcaagaccctggccgaggtgtgcctgggccagaagattgacatcaacaaggagattgagcagaggcagaagccagccacagagacctccatgaacacagccagccacagcctgtgtgagcagaccatggtgaacagcgagaacacctacagcagcggcagcagcttccctgtgcccaagagcctgcaggaggccaatgctgagaaggtgacccaggagatcgtgacagagaggtctgtgagcagccggcaggcccagaaggtggccacccccctgcctgaccccatggccagcagaaatgtcatcgccacagagaccagctatgtgacaggcagcaccatgccacccaccaccgtcatcctgggccccagccagccccagagcctcatcgtgacagagcgggtgtatgccccagccagcaccctggtggaccagccctatgccaatgaaggcaccgtggtggtgacagagagggtcatccagccccatggaggcggcagcaaccccctggagggcacccagcacctgcaggatgtgccctacgtgatggtgcgggagcgggagagcttcctggcccccagcagtggagtgcagcccaccctggccatgcccaacattgctgtgggccagaatgtgacagtgacagagcgggtgctggccccagccagcaccctgcagagcagctaccagatccccacagagaacagcatgacagccaggaacaccaccgtgtctggagctggggtgcccggccccctgcctgactttggcctggaggagagcggccacagcaacagcaccatcaccaccagcagcaccagggtgaccaagcacagcacagtgcagcacagctacagctag

SEQ ID NO: 122312 - DNA, 3357 bp, Artificial Sequence
  derived and/or modified sequence
atggcccggagccccggccgggcctacgccctgctgctgctgctgatatgctttaatgtggggagcggcttgcatctgcaggttctttcgaccaggaatgagaacaagctgttgcctaagcacccccatctcgtgcggcagaaacgcgcctggatcacagctcccgtggccttgagggagggagaagatctgtcaaagaaaaatcctatcgctaaaatacactcagatctggctgaggaacgcggactgaaaatcacctacaagtataccggcaaaggtatcacagagccccccttcggcattttcgtgtttaataaggatactggggaattgaatgtcacctccatcctggaccgcgaggagacaccatttttcctgctgaccggctatgcgctggacgctcgaggcaacaacgtggagaaacctcttgaactgcgtataaaggtattagatataaatgataacgagccagtgtttacacaggatgtatttgtggggtcagtagaggagctctcagccgctcacactcttgtgatgaagataaatgccactgatgcagacgagcccaacacactgaactcaaaaatttcctataggatcgtaagccttgaacccgcttacccacctgtcttttacctgaacaaggatactggcgagatctacaccaccagtgttacactcgacagggaagagcacagctcatataccctcacggtcgaagcccgagacggaaacggtgaggtgacagacaaacccgtaaagcaggcacaggttcagattcgaatcctcgacgtaaacgataacatccccgtggtggagaacaaggtgctcgagggaatggtcgaagagaatcaggtgaatgtcgaggtgacacgtatcaaagtgtttgacgccgatgaaatcggtagtgataactggcttgctaatttcacattcgcttctggtaacgagggggggtacttccatattgaaacagacgcccaaactaacgagggtatcgtgaccttaatcaaagaagtggactatgaggaaatgaaaaacctggattttagtgtcattgtggctaacaaggcagcgttccacaagtctattcgttcaaagtacaagccaacacccatccccattaaggtgaaggttaagaacgttaaggaaggcatacactttaaatctagcgtgattagcatctacgtgagtgagtccatggacaggtcgagcaagggacagattatcggcaactttcaggctttcgatgaggacacagggctgccagctcacgcccgctatgtgaaattagaggacagagataactggatctcagtagactccgtgacaagcgaaataaaactggcaaagttacccgacttcgaatctcgctacgtacagaatggcacttataccgtgaaaattgtggccattagtgaggactacccgcggaaaactatcacaggcacagtgcttatcaacgtagaggatattaacgacaactgtcctacattgatcgaaccagttcagaccatctgtcatgatgccgaatacgtgaacgtcactgctgaggacctcgatgggcaccctaattccgggccattcagcttttctgtaatagataaaccccctggaatggctgagaagtggaaaattgctaggcaagagtcgacgagcgttctgttacaacagagtgagaagaagctgggtcgttctgagatccagtttttgatatcggataatcagggtttttcttgtccagagaaacaggttttgaccttaacagtgtgcgaatgtttgcacgggtcaggctgcagagaagcacagcacgattcctacgtggggctgggccctgctgctatagccctgatgatattagcctttctgctcctgctgctggtgcctctgctgttgcttatgtgtcactgcggtaagggcgccaaggggttcacacccattcccggtacaatcgagatgctccatccatggaacaatgagggagcacccccagaagataaggttgtcccttcatttcttcctgtagatcagggaggttctctagtgggcaggaacggtgtaggaggtatggcaaaagaggctactatgaagggctcatctagcgcatctatagtgaagggccaacacgagatgagtgagatggatggacgctgggaagagcacaggtcgctgttgagcgggcgggcaacccagtttactggcgcgaccggcgccattatgactaccgagacaaccaaaacagcgagggcgacgggagcttctcgcgatatggccggcgcccaggctgccgccgtcgctctgaatgaagagtttctgcgaaactattttactgataaggctgcaagctatactgaggaagatgaaaatcatacggctaaggattgccttctggtatactctcaggaagaaacggaaagtctcaatgccagcatcggttgctgctcattcattgagggtgaacttgacgaccggttcctagatgacctggggttgaagttcaagaccctggcagaggtatgtctcggccagaaaattgatataaataaagaaatcgagcagcgacagaagcccgcaacagaaacaagcatgaacacggcttctcatagtctttgtgaacaaaccatggtaaactcagagaacacgtattcctcaggttcgtctttccccgttccgaaatcactgcaggaagccaatgccgagaaagtcacccaggaaatcgtgaccgagcgctccgtgagctcacgccaggctcagaaagtggccacccccctgcccgatcctatggcctccagaaacgtgatcgccaccgaaacatcgtacgtgaccgggtcaaccatgccacctaccaccgtgattctgggaccaagtcagcctcagtccctgatcgttaccgagcgggtgtacgcaccggcaagcacccttgttgatcaaccctacgcaaatgaggggaccgttgtggtcaccgagcgcgtaattcagccccacggcggaggctcaaacccactggagggcacgcagcacctccaggacgtgccttatgtgatggtgcgagagcgcgagtcatttctggccccaagtagcggcgtgcagccaactcttgcgatgcccaacatcgcagttggtcagaacgtgacagtgaccgagcgagtgctggctcccgctagcacccttcagagctcgtatcagattcccactgaaaatagcatgacagctcggaataccacagtcagtggggcgggtgtgcccggaccgcttcctgactttggcctcgaagaatccgggcattcgaattcaaccatcaccactagctccacgcgggtgaccaaacattctacagtccaacactcctacagttag

SEQ ID NO: 122313 - DNA, 3357 bp, Artificial Sequence
  derived and/or modified sequence
atggcgaggtcgccaggtcgtgcatatgccttgttgcttctactgatctgtttcaacgtcgggagcggactgcacctgcaggtcctgagcacacgaaatgagaataaattgttacccaagcaccctcacctcgtacgtcagaagagggcctggattacagccccagtggcgctgagagaaggcgaggacctgtcaaaaaaaaatccgatcgcaaaaatccactcggacctcgcagaggagagggggttgaaaatcacttataagtacactggaaagggcatcacggaaccacctttcggtatctttgtttttaataaggacactggcgaattaaatgttactagcattctggatcgtgaagaaaccccgttttttctgcttacagggtacgcactggatgcccgtgggaacaatgttgagaaaccactggaattacgcatcaaggtgttggacattaatgataatgagccagtgtttacccaggatgtatttgtaggaagcgtggaagagctttctgccgcacatactcttgttatgaaaatcaatgctaccgatgctgacgagcctaacaccctgaacagcaaaatctcatacagaatcgtgtcactggagccagcctacccccctgtcttctatctgaacaaagacacgggggagatctacactacatctgtaaccctcgacagggaagaacattcaagctatacactgaccgtcgaggcaagagatggaaatggagaggttacagacaagcccgtcaagcaagcacaggtccaaatccgaattctcgatgtgaacgacaacattcctgtcgtggaaaacaaggttctggaaggaatggtggaagaaaatcaggtcaatgtggaagtgacccgcattaaagtcttcgatgctgacgagataggatctgacaactggctggctaatttcacctttgcttctggcaatgaaggaggctactttcatattgaaacggatgcccagacaaacgagggcatcgtcaccttaatcaaagaggttgactatgaggaaatgaaaaatctcgatttttctgtcatcgtagcaaataaggcggcatttcacaagagcattcgctctaaatacaagcctacacccattcctataaaggtgaaagtcaagaatgtgaaggaaggtatacacttcaaatcttcagtcatctctatctacgtaagcgaatccatggatagatcttcaaaaggccaaattataggtaacttccaagcttttgatgaggatactggacttccggctcacgctcgatacgttaaacttgaagatagagataactggatttcggtggactccgtgacatccgagataaagttggccaagctgcccgacttcgaatctagatacgtgcagaacggaacatataccgttaagatagtggcaatcagtgaggattacccacgtaagacaattactggtaccgttctcatcaacgtggaagatattaacgacaactgcccaacattgatagaacccgtgcagaccatctgccatgatgccgagtacgtcaatgtcacagcagaggatctcgacggacatccaaattccggacccttttcattctccgtcatcgataaaccccctggtatggccgaaaagtggaagattgcaagacaggagtctacatcagttttgcttcaacagagtgagaagaaactaggccgaagtgagatccagtttcttataagcgacaaccaggggttcagctgtcctgagaaacaggttctaaccctgacagtgtgtgaatgcctgcacggctccggctgcagggaagctcagcatgactcatatgtcggacttggacctgctgccattgctctgatgatcctggcatttctgctgctgttgctcgtccccctgctgctgttgatgtgtcattgtggaaagggggcaaaaggctttacgcctataccaggcactatcgagatgctccacccgtggaataatgagggagctcctccagaagataaggtagtgcctagcttcctgcctgtcgaccaagggggaagcctagtcggcaggaacggcgttgggggtatggctaaggaagcaacgatgaagggctcctcttctgccagtatcgtcaaaggccagcatgagatgtcggagatggacggaagatgggaagagcatcgatctctactgagtggtagagctacccagttcactggggcaaccggcgctatcatgactaccgagaccacaaagaccgcaagggccacaggcgcttctcgcgacatggcaggcgcacaggccgcagctgtggccctgaacgaggaattcttgcgtaattactttacggacaaagcggcatcatatacggaggaagatgagaatcacacggccaaggactgcttgctagtctactcgcaggaagagaccgagtcactcaacgcaagcattgggtgttgcagtttcatcgaaggcgaactggatgatcgattccttgacgatttgggcctgaagttcaagaccctcgcagaggtttgtttgggccagaagatcgacattaacaaggaaattgaacaaagacaaaagcccgctacagagacctcaatgaataccgcaagtcacagcctgtgcgaacagactatggtaaactcggaaaacacttacagttcagggtctagttttccagtgcccaagagtctgcaggaggccaatgccgagaaggtaactcaggagatcgtgactgaaaggtccgtctcctcacgccaggctcagaaagttgccactcctttgcctgaccccatggcctcccgcaacgtaatcgccactgagacatcctatgtgaccggctcaaccatgcccccaacgactgtgattctgggcccatcccagcctcagtccctgattgttaccgagcgagtctacgcccctgcgtccacactggtggaccagccttacgccaatgagggcaccgtggtcgtgacagagagggtaatacagccccatggcggaggcagtaaccccctggagggcactcagcatctgcaggatgtcccctacgtgatggtgagagagagggagtcatttctagccccttcttccggggtgcagcctacactggccatgcctaacatcgccgttggacagaatgtgaccgttaccgaaagggtgctggctcccgctagtacactgcaatcctcctatcagattccaacagagaactctatgacagcacggaatactactgtttctggagccggagtcccgggtccactgcctgacttcggcctggaggaatccggccactccaactctacaattaccacctccagcactcgagttactaaacactccacagttcagcactcatacagctag

SEQ ID NO: 122314 - DNA, 3357 bp, Artificial Sequence
  derived and/or modified sequence
atggccagaagccccggcagagcctacgccctgctgctgctgctgatctgcttcaacgtgggcagcggcctgcacctgcaggtgctgagcaccagaaacgagaacaagctgctgcccaagcacccccacctggtgagacagaagagagcctggatcaccgcccccgtggccctgagagagggcgaggacctgagcaagaagaaccccatcgccaagatccacagcgacctggccgaggagagaggcctgaagatcacctacaagtacaccggcaagggcatcaccgagccccccttcggcatcttcgtgttcaacaaggacaccggcgagctgaacgtgaccagcatcctggacagagaggagacccccttcttcctgctgaccggctacgccctggacgccagaggcaacaacgtggagaagcccctggagctgagaatcaaggtgctggacatcaacgacaacgagcccgtgttcacccaggacgtgttcgtgggcagcgtggaggagctgagcgccgcccacaccctggtgatgaagatcaacgccaccgacgccgacgagcccaacaccctgaacagcaagatcagctacagaatcgtgagcctggagcccgcctacccccccgtgttctacctgaacaaggacaccggcgagatctacaccaccagcgtgaccctggacagagaggagcacagcagctacaccctgaccgtggaggccagagacggcaacggcgaggtgaccgacaagcccgtgaagcaggcccaggtgcagatcagaatcctggacgtgaacgacaacatccccgtggtggagaacaaggtgctggagggcatggtggaggagaaccaggtgaacgtggaggtgaccagaatcaaggtgttcgacgccgacgagatcggcagcgacaactggctggccaacttcaccttcgccagcggcaacgagggcggctacttccacatcgagaccgacgcccagaccaacgagggcatcgtgaccctgatcaaggaggtggactacgaggagatgaagaacctggacttcagcgtgatcgtggccaacaaggccgccttccacaagagcatcagaagcaagtacaagcccacccccatccccatcaaggtgaaggtgaagaacgtgaaggagggcatccacttcaagagcagcgtgatcagcatctacgtgagcgagagcatggacagaagcagcaagggccagatcatcggcaacttccaggccttcgacgaggacaccggcctgcccgcccacgccagatacgtgaagctggaggacagagacaactggatcagcgtggacagcgtgaccagcgagatcaagctggccaagctgcccgacttcgagagcagatacgtgcagaacggcacctacaccgtgaagatcgtggccatcagcgaggactaccccagaaagaccatcaccggcaccgtgctgatcaacgtggaggacatcaacgacaactgccccaccctgatcgagcccgtgcagaccatctgccacgacgccgagtacgtgaacgtgaccgccgaggacctggacggccaccccaacagcggccccttcagcttcagcgtgatcgacaagccccccggcatggccgagaagtggaagatcgccagacaggagagcaccagcgtgctgctgcagcagagcgagaagaagctgggcagaagcgagatccagttcctgatcagcgacaaccagggcttcagctgccccgagaagcaggtgctgaccctgaccgtgtgcgagtgcctgcacggcagcggctgcagagaggcccagcacgacagctacgtgggcctgggccccgccgccatcgccctgatgatcctggccttcctgctgctgctgctggtgcccctgctgctgctgatgtgccactgcggcaagggcgccaagggcttcacccccatccccggcaccatcgagatgctgcacccctggaacaacgagggcgccccccccgaggacaaggtggtgcccagcttcctgcccgtggaccagggcggcagcctggtgggcagaaacggcgtgggcggcatggccaaggaggccaccatgaagggcagcagcagcgccagcatcgtgaagggccagcacgagatgagcgagatggacggcagatgggaggagcacagaagcctgctgagcggcagagccacccagttcaccggcgccaccggcgccatcatgaccaccgagaccaccaagaccgccagagccaccggcgccagcagagacatggccggcgcccaggccgccgccgtggccctgaacgaggagttcctgagaaactacttcaccgacaaggccgccagctacaccgaggaggacgagaaccacaccgccaaggactgcctgctggtgtacagccaggaggagaccgagagcctgaacgccagcatcggctgctgcagcttcatcgagggcgagctggacgacagattcctggacgacctgggcctgaagttcaagaccctggccgaggtgtgcctgggccagaagatcgacatcaacaaggagatcgagcagagacagaagcccgccaccgagaccagcatgaacaccgccagccacagcctgtgcgagcagaccatggtgaacagcgagaacacctacagcagcggcagcagcttccccgtgcccaagagcctgcaggaggccaacgccgagaaggtgacccaggagatcgtgaccgagagaagcgtgagcagcagacaggcccagaaggtggccacccccctgcccgaccccatggccagcagaaacgtgatcgccaccgagaccagctacgtgaccggcagcaccatgccccccaccaccgtgatcctgggccccagccagccccagagcctgatcgtgaccgagagagtgtacgcccccgccagcaccctggtggaccagccctacgccaacgagggcaccgtggtggtgaccgagagagtgatccagccccacggcggcggcagcaaccccctggagggcacccagcacctgcaggacgtgccctacgtgatggtgagagagagagagagcttcctggcccccagcagcggcgtgcagcccaccctggccatgcccaacatcgccgtgggccagaacgtgaccgtgaccgagagagtgctggcccccgccagcaccctgcagagcagctaccagatccccaccgagaacagcatgaccgccagaaacaccaccgtgagcggcgccggcgtgcccggccccctgcccgacttcggcctggaggagagcggccacagcaacagcaccatcaccaccagcagcaccagagtgaccaagcacagcaccgtgcagcacagctacagctag

SEQ ID NO: 122315 - DNA, 5652 bp, Artificial Sequence
  derived and/or modified sequence
ctggagccgcgcctttgggttgggctgggctgggccgcgcaaccgccacgggaagacagccctcggggcggggagggagagggtggccgggccggggggaggccggggccagggaggagccgagtgcgcgctcggggcaggcggcggcgcggagcggtgcggcggcgggaggcggaggcgagggtgcgatggcgcggagcccgggacgcgcgtacgccctgctgcttctcctgatctgctttaacgttggaagtggacttcacttacaggtcttaagcacaagaaatgaaaataagctgcttcctaaacatcctcatttagtgcggcaaaagcgcgcctggatcaccgcccccgtggctcttcgggagggagaggatctgtccaagaagaatccaattgccaagatacattctgatcttgcagaagaaagaggactcaaaattacttacaaatacactggaaaagggattacagagccaccttttggtatatttgtctttaacaaagatactggagaactgaatgttaccagcattcttgatcgagaagaaacaccattttttctgctaacaggttacgctttggatgcaagaggaaacaatgtagagaaacccttagagctacgcattaaggttcttgatatcaatgacaacgaaccagtgttcacacaggatgtctttgttgggtctgttgaagagttgagtgcagcacatactcttgtgatgaaaatcaatgcaacagatgcagatgagcccaataccctgaattcgaaaatttcctatagaatcgtatctctggagcctgcttatcctccagtgttctacctaaataaagatacaggagagatttatacaaccagtgttaccttggacagagaggaacacagcagctacactttgacagtagaagcaagagatggcaatggagaagttacagacaaacctgtaaaacaagctcaagttcagattcgtattttggatgtcaatgacaatatacctgtagtagaaaataaagtgcttgaagggatggttgaagaaaatcaagtcaacgtagaagttacgcgcataaaagtgttcgatgcagatgaaataggttctgataattggctggcaaattttacatttgcatcaggaaatgaaggaggttatttccacatagaaacagatgctcaaactaacgaaggaattgtgacccttattaaggaagtagattatgaagaaatgaagaatcttgacttcagtgttattgtcgctaataaagcagcttttcacaagtcgattaggagtaaatacaagcctacacccattcccatcaaggtcaaagtgaaaaatgtgaaagaaggcattcattttaaaagcagcgtcatctcaatttatgttagcgagagcatggatagatcaagcaaaggccaaataattggaaattttcaagcttttgatgaggacactggactaccagcccatgcaagatatgtaaaattagaagatagagataattggatctctgtggattctgtcacatctgaaattaaacttgcaaaacttcctgattttgaatctagatatgttcaaaatggcacatacactgtaaagattgtggccatatcagaagattatcctagaaaaaccatcactggcacagtccttatcaatgttgaagacatcaacgacaactgtcccacactgatagagcctgtgcagacaatctgtcacgatgcagagtatgtgaatgttactgcagaggacctggatggacacccaaacagtggccctttcagtttctccgtcattgacaaaccacctggcatggcagaaaaatggaaaatagcacgccaagaaagtaccagtgtgctgctgcaacaaagtgagaaaaagcttgggagaagtgaaattcagttcctgatttcagacaatcagggttttagttgtcctgaaaagcaggtccttacactcacagtttgtgagtgtctgcatggcagcggctgcagggaagcacagcatgactcctatgtgggcctgggacccgcagcaattgcgctcatgattttggcctttctgctcctgctattggtaccacttttactgctgatgtgccattgcggaaagggcgccaaaggctttacccccatacctggcaccatagagatgctgcatccttggaataatgaaggagcaccacctgaagacaaggtggtgccatcatttctgccagtggatcaagggggcagtctagtaggaagaaatggagtaggaggtatggccaaggaagccacgatgaaaggaagtagctctgcttccattgtcaaagggcaacatgagatgtccgagatggatggaaggtgggaagaacacagaagcctgctttctggtagagctacccagtttacaggggccacaggcgctatcatgaccactgaaaccacgaagaccgcaagggccacaggggcttccagagacatggccggagctcaggcagctgctgttgcactgaacgaagaattcttaagaaattatttcactgataaagcggcctcttacactgaggaagatgaaaatcacacagccaaagattgccttctggtttattctcaggaagaaactgaatcgctgaatgcttctattggttgttgcagttttattgaaggagagctagatgaccgcttcttagatgatttgggacttaaattcaagacactagctgaagtttgcctgggtcaaaaaatagatataaataaggaaattgagcagagacaaaaacctgccacagaaacaagtatgaacacagcttcacattcactctgtgagcaaactatggttaattcagagaatacctactcctctggcagtagcttcccagttccaaaatctttgcaagaagccaatgcagagaaagtaactcaggaaatagtcactgaaagatctgtgtcttctaggcaggcgcaaaaggtagctacacctcttcctgacccaatggcttctagaaatgtgatagcaacagaaacttcctatgtcacagggtccactatgccaccaaccactgtgatcctgggtcctagccagccacagagccttattgtgacagagagggtgtatgctccagcttctaccttggtagatcagccttatgctaatgaaggtacagttgtggtcactgaaagagtaatacagcctcatgggggtggatcgaatcctctggaaggcactcagcatcttcaagatgtaccttacgtcatggtgagggaaagagagagcttccttgcccccagctcaggtgtgcagcctactctggccatgcctaatatagcagtaggacagaatgtgacagtgacagaaagagttctagcacctgcttccactctgcaatccagttaccagattcccactgaaaattctatgacggctaggaacaccacggtgtctggagctggagtccctggccctctgccagattttggtttagaggaatctggtcattctaattctaccataaccacatcttccaccagagttaccaagcatagcactgtacagcattcttactcctaaacagcagtcagccacaaactgacccagagtttaattagcagtgactaatttcatgtttccaatgtacctgatttttcatgagccttacagacacacagagacacatacacattgatcttaaaatttttctcagtcactgatatgcaaaggaccacactgtctctgcttccaggagtattttagaaatgttccacaatttactgaagacatagagatgatgctgctgcttaggtgccttttagcaagctatgcaaacaatcctgataaaacaagatacatagagagtcaatctggcttctgagaatttaccaagtgaacagagtacctagttcatcagccgtccagtaaagcaacccaggaaactgactgggtctctttgcctaccgtattaacattaaacattgatgttctgtattctgtactttactgcacccagcagactttcaacaactcattgatccaaagatacatgcacagtctgagcaccagctatggtgctcataacttctttaagacttgaaccctttcaatctgtgtgattcattaaattggaccattgatgataagaatacacattgtatgtttctgtgcacatgacagtgtgtgtgtgtgcacgtacatactgtatagtcttaaaaatagcattatactggccaggggtggtggctaacgcctgtaatcccagcactttgggaggccgaggcgggtggatcaactgtggtcaggagtttgagatcagccaggccaacctggtgaaaccccgtctctactaaaaatacaaaaattagctgggcgtgatggtgggcgcctgtaatcccagctacttgggaggctgaggcaggagaatcacttgaacccgggaggcggaggttgcagtgagccgagatcgcaccattgcactccagtctgggcaacagagtgagattccgtctcaaaaaaaaaaagaaaaggaaaaaaaaatagcattatacctcttccttgtctcaaccgccatgaaaattctgaacactccaaattcagttgaataatccaaaacaaaatttataagtataaaataattttacttcttatagtaatagtatactttaaaaagcctcagggtatattatcttctaaacagctacaattcagtgcagctacattaaccaactatgttctctagttgagaacaactaggcctatttcactgctgtgtagcctcagtgcctaacatgggtgccaaataaatattcgtagaattacactgaattgtaaaaaccattcgtttttgtttacaattgccaaaaatctcaaaaggccctgtatttatgtaattctttgaaattattattttattttgatttctcagttattgactggctgggtgtgacttagtacataagtactcaatattataaaaacctcaaataattgacttgattttacacaacatccttcccttttctacaagttaatttttttacaaatcatttgggttatctcctaaataggttatattttattgcttctagaaacaatgtttcaaaatatatgtgcattatcagtaataatttgtataaatatttcccacaacaattttcataattttcaaagactaatttcttgactgaagatattttgctagggaagtgaaactttaaaattttgtagattttaaaaaatattgttgaatggtgtcatgcaaaggatttatatagtgtgctcccactaactgtacagatcaggacacatatttttagacatctaagtctgtagcttaaatggaggttactcttccatcatctagaattgtttacttagtaattgttgtttcttttattattatagacttactatcagttttattttgccaagtatgcaacaggtatatcactagtatatgaaaatgtaaatatcacttgtgtactcaaacaaaagttggtcttaagcttccaccttgagcagccttggaaacctaacctgcctcttttagcataatcacattttctaaatgattttctttgttcctgaaaaagtgatttgtattagttttacatttgttttttggaagattatatttgtatatgtatcatcataaaatatttaaataaaaagtatctttagagtg

SEQ ID NO: 122316 - protein, 999 aa, Artificial Sequence
  derived and/or modified sequence
MMGLFPRTTGALAIFVVVILVHGELRIETKGQYDEEEMTMQQAKRRQKREWVKFAKPCREGEDNSKRNPIAKITSDYQATQKITYRISGVGIDQPPFGIFVVDKNTGDINITAIVDREETPSFLITCRALNAQGLDVEKPLILTVKILDINDNPPVFSQQIFMGEIEENSASNSLVMILNATDADEPNHLNSKIAFKIVSQEPAGTPMFLLSRNTGEVRTLTNSLDREQASSYRLVVSGADKDGEGLSTQCECNIKVKDVNDNFPMFRDSQYSARIEENILSSELLRFQVTDLDEEYTDNWLAVYFFTSGNEGNWFEIQTDPRTNEGILKVVKALDYEQLQSVKLSIAVKNKAEFHQSVISRYRVQSTPVTIQVINVREGIAFRPASKTFTVQKGISSKKLVDYILGTYQAIDEDTNKAASNVKYVMGRNDGGYLMIDSKTAEIKFVKNMNRDSTFIVNKTITAEVLAIDEYTGKTSTGTVYVRVPDFNDNCPTAVLEKDAVCSSSPSVVVSARTLNNRYTGPYTFALEDQPVKLPAVWSITTLNATSALLRAQEQIPPGVYHISLVLTDSQNNRCEMPRSLTLEVCQCDNRGICGTSYPTTSPGTRYGRPHSGRLGPAAIGLLLLGLLLLLLAPLLLLTCDCGAGSTGGVTGGFIPVPDGSEGTIHQWGIEGAHPEDKEITNICVPPVTANGADFMESSEVCTNTYARGTAVEGTSGMEMTTKLGAATESGGAAGFATGTVSGAASGFGAATGVGICSSGQSGTMRTRHSTGGTNKDYADGAISMNFLDSYFSQKAFACAEEDDGQEANDCLLIYDNEGADATGSPVGSVGCCSFIADDLDDSFLDSLGPKFKKLAEISLGVDGEGKEVQPPSKDSGYGIESCGHPIEVQQTGFVKCQTLSGSQGASALSTSGSVQPAVSIPDPLQHGNYLVTETYSASGSLVQPSTAGFDPLLTQNVIVTERVICPISSVPGNLAGPTQLRGSHTMLCTEDPCSRLI

SEQ ID NO: 122317 - DNA, 3000 bp, Artificial Sequence
  derived and/or modified sequence
atgatgggcctgttccccagaaccaccggcgccctggccatcttcgtggtggtgatcctggtgcacggcgagctgagaatcgagaccaagggccagtacgacgaggaggagatgaccatgcagcaggccaagagaagacagaagagagagtgggtgaagttcgccaagccctgcagagagggcgaggacaacagcaagagaaaccccatcgccaagatcaccagcgactaccaggccacccagaagatcacctacagaatcagcggcgtgggcatcgaccagccccccttcggcatcttcgtggtggacaagaacaccggcgacatcaacatcaccgccatcgtggacagagaggagacccccagcttcctgatcacctgcagagccctgaacgcccagggcctggacgtggagaagcccctgatcctgaccgtgaagatcctggacatcaacgacaacccccccgtgttcagccagcagatcttcatgggcgagatcgaggagaacagcgccagcaacagcctggtgatgatcctgaacgccaccgacgccgacgagcccaaccacctgaacagcaagatcgccttcaagatcgtgagccaggagcccgccggcacccccatgttcctgctgagcagaaacaccggcgaggtgagaaccctgaccaacagcctggacagagagcaggccagcagctacagactggtggtgagcggcgccgacaaggacggcgagggcctgagcacccagtgcgagtgcaacatcaaggtgaaggacgtgaacgacaacttccccatgttcagagacagccagtacagcgccagaatcgaggagaacatcctgagcagcgagctgctgagattccaggtgaccgacctggacgaggagtacaccgacaactggctggccgtgtacttcttcaccagcggcaacgagggcaactggttcgagatccagaccgaccccagaaccaacgagggcatcctgaaggtggtgaaggccctggactacgagcagctgcagagcgtgaagctgagcatcgccgtgaagaacaaggccgagttccaccagagcgtgatcagcagatacagagtgcagagcacccccgtgaccatccaggtgatcaacgtgagagagggcatcgccttcagacccgccagcaagaccttcaccgtgcagaagggcatcagcagcaagaagctggtggactacatcctgggcacctaccaggccatcgacgaggacaccaacaaggccgccagcaacgtgaagtacgtgatgggcagaaacgacggcggctacctgatgatcgacagcaagaccgccgagatcaagttcgtgaagaacatgaacagagacagcaccttcatcgtgaacaagaccatcaccgccgaggtgctggccatcgacgagtacaccggcaagaccagcaccggcaccgtgtacgtgagagtgcccgacttcaacgacaactgccccaccgccgtgctggagaaggacgccgtgtgcagcagcagccccagcgtggtggtgagcgccagaaccctgaacaacagatacaccggcccctacaccttcgccctggaggaccagcccgtgaagctgcccgccgtgtggagcatcaccaccctgaacgccaccagcgccctgctgagagcccaggagcagatcccccccggcgtgtaccacatcagcctggtgctgaccgacagccagaacaacagatgcgagatgcccagaagcctgaccctggaggtgtgccagtgcgacaacagaggcatctgcggcaccagctaccccaccaccagccccggcaccagatacggcagaccccacagcggcagactgggccccgccgccatcggcctgctgctgctgggcctgctgctgctgctgctggcccccctgctgctgctgacctgcgactgcggcgccggcagcaccggcggcgtgaccggcggcttcatccccgtgcccgacggcagcgagggcaccatccaccagtggggcatcgagggcgcccaccccgaggacaaggagatcaccaacatctgcgtgccccccgtgaccgccaacggcgccgacttcatggagagcagcgaggtgtgcaccaacacctacgccagaggcaccgccgtggagggcaccagcggcatggagatgaccaccaagctgggcgccgccaccgagagcggcggcgccgccggcttcgccaccggcaccgtgagcggcgccgccagcggcttcggcgccgccaccggcgtgggcatctgcagcagcggccagagcggcaccatgagaaccagacacagcaccggcggcaccaacaaggactacgccgacggcgccatcagcatgaacttcctggacagctacttcagccagaaggccttcgcctgcgccgaggaggacgacggccaggaggccaacgactgcctgctgatctacgacaacgagggcgccgacgccaccggcagccccgtgggcagcgtgggctgctgcagcttcatcgccgacgacctggacgacagcttcctggacagcctgggccccaagttcaagaagctggccgagatcagcctgggcgtggacggcgagggcaaggaggtgcagccccccagcaaggacagcggctacggcatcgagagctgcggccaccccatcgaggtgcagcagaccggcttcgtgaagtgccagaccctgagcggcagccagggcgccagcgccctgagcaccagcggcagcgtgcagcccgccgtgagcatccccgaccccctgcagcacggcaactacctggtgaccgagacctacagcgccagcggcagcctggtgcagcccagcaccgccggcttcgaccccctgctgacccagaacgtgatcgtgaccgagagagtgatctgccccatcagcagcgtgcccggcaacctggccggccccacccagctgagaggcagccacaccatgctgtgcaccgaggacccctgcagcagactgatctag

SEQ ID NO: 122318 - DNA, 5525 bp, Artificial Sequence
  derived and/or modified sequence
ttttcttagacatcaactgcagacggctggcaggatagaagcagcggctcacttggactttttcaccagggaaatcagagacaatgatggggctcttccccagaactacaggggctctggccatcttcgtggtggtcatattggttcatggagaattgcgaatagagactaaaggtcaatatgatgaagaagagatgactatgcaacaagctaaaagaaggcaaaaacgtgaatgggtgaaatttgccaaaccctgcagagaaggagaagataactcaaaaagaaacccaattgccaagattacttcagattaccaagcaacccagaaaatcacctaccgaatctctggagtgggaatcgatcagccgccttttggaatctttgttgttgacaaaaacactggagatattaacataacagctatagtcgaccgggaggaaactccaagcttcctgatcacatgtcgggctctaaatgcccaaggactagatgtagagaaaccacttatactaacggttaaaattttggatattaatgataatcctccagtattttcacaacaaattttcatgggtgaaattgaagaaaatagtgcctcaaactcactggtgatgatactaaatgccacagatgcagatgaaccaaaccacttgaattctaaaattgccttcaaaattgtctctcaggaaccagcaggcacacccatgttcctcctaagcagaaacactggggaagtccgtactttgaccaattctcttgaccgagagcaagctagcagctatcgtctggttgtgagtggtgcagacaaagatggagaaggactatcaactcaatgtgaatgtaatattaaagtgaaagatgtcaacgataacttcccaatgtttagagactctcagtattcagcacgtattgaagaaaatattttaagttctgaattacttcgatttcaagtaacagatttggatgaagagtacacagataattggcttgcagtatatttctttacctctgggaatgaaggaaattggtttgaaatacaaactgatcctagaactaatgaaggcatcctgaaagtggtgaaggctctagattatgaacaactacaaagcgtgaaacttagtattgctgtcaaaaacaaagctgaatttcaccaatcagttatctctcgataccgagttcagtcaaccccagtcacaattcaggtaataaatgtaagagaaggaattgcattccgtcctgcttccaagacatttactgtgcaaaaaggcataagtagcaaaaaattggtggattatatcctgggaacatatcaagccatcgatgaggacactaacaaagctgcctcaaatgtcaaatatgtcatgggacgtaacgatggtggatacctaatgattgattcaaaaactgctgaaatcaaatttgtcaaaaatatgaaccgagattctactttcatagttaacaaaacaatcacagctgaggttctggccatagatgaatacacgggtaaaacttctacaggcacggtatatgttagagtacccgatttcaatgacaattgtccaacagctgtcctcgaaaaagatgcagtttgcagttcttcaccttccgtggttgtctccgctagaacactgaataatagatacactggcccctatacatttgcactggaagatcaacctgtaaagttgcctgccgtatggagtatcacaaccctcaatgctacctcggccctcctcagagcccaggaacagatacctcctggagtataccacatctccctggtacttacagacagtcagaacaatcggtgtgagatgccacgcagcttgacactggaagtctgtcagtgtgacaacaggggcatctgtggaacttcttacccaaccacaagccctgggaccaggtatggcaggccgcactcagggaggctggggcctgccgccatcggcctgctgctccttggtctcctgctgctgctgttggccccccttctgctgttgacctgtgactgtggggcaggttctactgggggagtgacaggtggttttatcccagttcctgatggctcagaaggaacaattcatcagtggggaattgaaggagcccatcctgaagacaaggaaatcacaaatatttgtgtgcctcctgtaacagccaatggagccgatttcatggaaagttctgaagtttgtacaaatacgtatgccagaggcacagcggtggaaggcacttcaggaatggaaatgaccactaagcttggagcagccactgaatctggaggtgctgcaggctttgcaacagggacagtgtcaggagctgcttcaggattcggagcagccactggagttggcatctgttcctcagggcagtctggaaccatgagaacaaggcattccactggaggaaccaataaggactacgctgatggggcgataagcatgaattttctggactcctacttttctcagaaagcatttgcctgtgcggaggaagacgatggccaggaagcaaatgactgcttgttgatctatgataatgaaggcgcagatgccactggttctcctgtgggctccgtgggttgttgcagttttattgctgatgacctggatgacagcttcttggactcacttggacccaaatttaaaaaacttgcagagataagccttggtgttgatggtgaaggcaaagaagttcagccaccctctaaagacagcggttatgggattgaatcctgtggccatcccatagaagtccagcagacaggatttgttaagtgccagactttgtcaggaagtcaaggagcttctgctttgtccacctctgggtctgtccagccagctgtttccatccctgaccctctgcagcatggtaactatttagtaacggagacttactcggcttctggttccctcgtgcaaccttccactgcaggctttgatccacttctcacacaaaatgtgatagtgacagaaagggtgatctgtcccatttccagtgttcctggcaacctagctggcccaacgcagctacgagggtcacatactatgctctgtacagaggatccttgctcccgtctaatatgaccagaatgagctggaataccacactgaccaaatctggatctttggactaaagtattcaaaatagcatagcaaagctcactgtattgggctaataatttggcacttattagcttctctcataaactgatcacgattataaattaaatgtttgggttcataccccaaaagcaatatgttgtcactcctaattctcaagtactattcaaattgtagtaaatcttaaagtttttcaaaaccctaaaatcatattcgccaggaaattttcctaaacattcttaagcttctatttttcccctgccaaaggaaggtgtttatcattttaaaatgcaatgtgatttagtggattaagcaggagcgctggttcttgtctccattgccttttcttatatcattgataatgatgtaagaatcacaaggggccgggcgcggtggctcacgcctgtaatcccagcactttgggaggccgaggcaggtggatcatgaggtcaggagatcgagaccatcctggctaacaaggtgaaaccccgtctctactaaaaatacaaaaaattagccgggcgcagtggcgggcgcctgtagtcccagctactcgggaggctgaggcaggagaatggcatgaacccgggaagcggagcttgcagtgagccgagattgcgccactgcagtccgcagtccggcctgggcgacagagcgagactccgtctcaaaaaaaaaaaaaaaaaaagaatcacaaggtatttgctaaagcattttgagctgcttggaaaaagggaagtagttgcagtagagtttcttccatcttcttggtgctgggaagccatatatgtgtcttttactcaagctaaggggtataagcttatgtgttgaatttgctacatctatatttcacatattctcacaataagagaattttgaaatagaaatatcatagaacatttaagaaagtttagtataaataatattttgtgtgttttaatccctttgaagggatctatccaaagaaaatattttacactgagctccttcctacacgtctcagtaacagatcctgtgttagtctttgaaaatagctcattttttaaatgtcagtgagtagatgtagcatacatatgatgtataatgacgtgtattatgttaacaatgtctgcagattttgtaggaatacaaaacatggccttttttataagcaaaacgggccaatgactagaataacacatagggcaatctgtgaatatgtattataagcagcattccagaaaagtagttggtgaaataattttcaagtcaaaaagggatatggaaagggaattatgagtaacctctattttttaagccttgcttttaaattaaacagctacagccatttaagccttgaggataataaagcttgagagtaataatgttaggttagcaaaggtttagatgtatcacttcatgcatgctaccatgatagtaatgcagctcttcgagtcatttctggtcattcaagatattcacccttttgcccatagaaagcaccctacctcacctgcttactgacattgtcttagctgatcacaagatcattatcagcctccattattccttactgtatataaaatacagagttttatattttcctttcttcgtttttcaccatattcaaaacctaaatttgtttttgcagatggaatgcaaagtaatcaagtgtttgtgctttcacctagaagggtgtggtcctgaaggaaagaggtcccctaaatatcccccaccctggtgctcctccctctccctggtaccctgactaccaggaagtcaggtgctagagcagctggagaagtgcaggcagcctgtgcttccacagatgggggtgctgctgcaacaaggctttcaatgtgcccatcttaggtgggagaagctagatcctgtgcagcagcctggtaagtcctgaggaggttccattgctcttcctgctgctgtcctttgcttctcaacggtggctcgctctacagtctagagcacatgcagctaacttgtgcctctgcttatgcatgagggttaaattaacaaccataaccttcatttgaagttcaaaggtgtattcaggatcctcaaagcattttaaccttgccgcttaaaacccaatttaccgtgaaatgggaattttgctgcattgttaaactgtagtggaaaccatgctatagtaataaaggttatataagagagaaattgaaattaaatgtgtttttaaatttcaaaaaaaaatcaatctttaggatgacttaaaaattgatttgccatgtaaaatgtatctgcattttttacacaaaacttgttttaagcataaaattttaaaactgtactacttgatgtattatacattttgaaccatatgtattaaaccataaacagtataatgttgttataataaaacaggcaataaatttataaataaaagctgaa

SEQ ID NO: 122319 - DNA, 3000 bp, Artificial Sequence
  derived and/or modified sequence
atgatgggcctgttcccaaggacgacaggagctttggccatttttgtggttgtgattcttgtacatggcgagctgagaatagagaccaagggacagtacgatgaggaagagatgaccatgcaacaggctaagcgtagacagaaacgggagtgggtgaagttcgccaagccttgtcgggagggagaagacaacagcaaaagaaatcccatagctaaaatcacctccgactatcaggccacacagaaaatcacataccgaatttcaggggtgggaatcgatcagcccccttttggcatctttgtagtagacaagaatactggcgatatcaatataaccgcaatcgtggacagagaagagaccccttccttcttaatcacctgtcgggccttgaatgcacaaggtctggatgtcgagaaacccctgatcctaacagttaagatactggatataaacgacaacccgcctgttttctctcagcagatatttatgggggaaattgaggagaactcagcaagtaattctctggtaatgattctgaacgccacagacgcagatgagcccaaccacctgaattcgaaaatcgcctttaagatcgtgagccaagagcctgctgggactcccatgttccttctgagcagaaacacgggcgaagtgaggactttaactaattcactggatcgcgaacaggcttccagttaccggcttgtcgtgtcgggggcagataaggacggcgagggacttagcactcagtgtgaatgtaacataaaagtgaaggatgtcaatgataactttcctatgttccgcgatagccagtattcagcccggatagaagaaaacatcttgtcctcggagctgctcaggttccaggtgactgatcttgatgaagaatacactgataattggctagccgtctacttctttacatccggaaacgagggaaactggttcgaaattcaaacggaccctaggacgaacgaaggcatattaaaagttgttaaggctctcgactacgagcagctgcaaagcgttaaactatcaatcgcagtcaagaataaagcggaattccaccagtccgttatctcaaggtatcgggtccaatctacgcctgtgactatacaggtcatcaatgtccgtgagggaattgcgttcaggccagcaagcaagaccttcaccgttcagaaggggattagcagcaaaaaactggtcgattacattctggggacttatcaggcaatcgatgaagatactaataaggccgcttccaacgtgaagtatgttatggggcgcaacgacggaggctaccttatgattgattcgaagacggccgaaatcaaatttgtgaagaacatgaatcgagactctacgtttattgtcaataagaccattactgccgaggtgctcgcaatcgatgagtataccggcaaaactagtacaggcacagtgtacgtgcgagtcccagatttcaacgataactgccctactgctgttctcgagaaagatgccgtttgctcttccagtccgagcgtggtcgtttccgccagaacactgaacaatcgatatactggcccttatactttcgctctggaagaccagcccgtgaagctccctgccgtgtggtcgataacgactctgaacgccacctctgcactgttacgagcacaggagcaaattcctcccggagtttatcacatcagtttggtgttgacagacagccagaataatagatgcgagatgcctcggtcattaacgctggaggtgtgtcagtgtgacaaccgtgggatttgcggcacctcctatcccaccacatctccaggcaccaggtacggcaggccccactctggtcgattgggccccgcagcaattggcttgctgcttctggggctccttttgcttcttctggcgccattactgctgctgacatgcgattgtggagccggctccactggaggagtgaccggagggttcataccagtgccagacggctcggagggaaccatccaccaatggggtatagaaggcgcgcatcctgaagacaaagaaattactaatatatgtgtgccaccggtcacagcaaatggtgcagatttcatggagagtagcgaagtgtgcacgaatacctacgccaggggaaccgcggtggaaggaacatctgggatggaaatgacgactaaactgggggcggcaacagagagtggcggggctgccggatttgcgaccggcactgtttccggagcggccagcggctttggcgcagctaccggcgtgggaatctgttcttctggccagagtggcactatgcggacgcgccacagcactggggggacgaataaggactacgccgacggggctatttccatgaacttcctcgatagctacttttcccagaaggcttttgcatgcgcggaggaagatgatgggcaagaggcgaatgattgcttactcatatatgacaatgagggcgccgacgcaacaggatctcccgtcggcagcgtggggtgttgtagctttatcgccgacgacctggacgactctttcttggactcccttggacccaaattcaaaaaattggctgaaatatctctgggagtcgacggggagggtaaggaagtccagcctccctccaaagactctggatacggcatagaatcttgcgggcacccaatcgaagttcagcagacaggattcgttaaatgccagacgctcagcggctcacagggggcaagtgctttgagcacctccgggtccgtgcagcctgctgtatccatacccgaccctttgcagcacggtaattatttggtgaccgagacatatagcgccagtggttccttagtgcaaccctcaaccgcaggcttcgaccctctattaacccagaacgttattgtcactgagcgggtgatctgccccatctcaagtgtcccggggaatctggctggcccgacccagttgagaggatcacataccatgttgtgtaccgaggacccttgcagccgactgatatag

SEQ ID NO: 122320 - DNA, 3000 bp, Artificial Sequence
  derived and/or modified sequence
atgatgggcctcttccccaggaccactggagccctggccatctttgtggtggtgatcctggtgcacggggagctgagaattgagaccaagggccagtatgatgaggaggagatgaccatgcagcaggccaagaggcggcagaagcgggagtgggtgaagtttgccaagccctgccgggagggggaggacaacagcaagaggaaccccatcgccaagatcaccagtgactaccaggccacccagaagatcacctaccgcatcagcggcgtgggcatcgaccagcccccatttggcatctttgtggtggacaagaacacaggagacatcaacatcacagccatcgtggaccgggaggagacccccagcttcctgatcacctgccgggccctgaatgcccagggcctggatgtggagaagcccctcatcctgactgtgaagatcctggacatcaatgacaacccccctgtgttcagccagcagatcttcatgggagaaattgaggagaacagcgccagcaacagcctggtgatgatcctgaatgccacagatgctgatgagcccaaccacctgaacagcaagatcgccttcaagatcgtgtcccaggagcccgccggcacccccatgttcctgctgagcagaaatactggagaggtgaggaccctgaccaacagcctggaccgggagcaggccagcagctaccgcctggtggtgtctggagctgacaaggatggagagggcctgagcacccagtgtgagtgcaacatcaaggtgaaggatgtgaatgacaacttccccatgttccgggacagccagtacagcgcccgcatcgaggagaacatcctgagcagcgagctgctgcgcttccaggtgacagacctggatgaggagtacacagacaactggctggccgtgtacttcttcaccagcggaaatgaaggcaactggtttgagatccagacagaccccaggaccaatgaaggcatcctgaaggtggtgaaggccctggactatgagcagctgcagagcgtgaagctgagcattgctgtgaagaacaaggccgagttccaccagagcgtcatcagccgctacagagtgcagagcacccctgtgaccatccaggtgatcaacgtgcgggagggcatcgccttccggcctgccagcaagaccttcaccgtgcagaagggcatcagcagcaagaagctggtggactacatcctgggcacctaccaggccattgatgaggacaccaacaaggccgccagcaatgtgaagtatgtgatgggcagaaatgatggcggctacctgatgattgacagcaagacagctgagatcaagtttgtgaagaacatgaacagagacagcaccttcatcgtgaacaagaccatcacagctgaggtgctggccattgatgagtacacaggcaagaccagcacaggcaccgtgtatgtgcgggtgcctgacttcaatgacaactgccccacagctgtgctggagaaggatgctgtgtgcagcagcagccccagcgtggtggtgtctgcccggaccctgaacaaccgctacacaggcccctacacctttgccctggaggaccagcctgtgaagctgcctgctgtgtggagcatcaccaccctgaatgccaccagcgccctgctgcgggcccaggagcagatccccccaggagtgtaccacatcagcctggtgctgacagacagccagaacaacagatgtgagatgcccaggagcctgaccctggaggtgtgccagtgtgacaacagaggcatctgtggcaccagctaccccaccaccagccctggcaccaggtatggccggccccacagcggccgcctgggccctgctgccatcggcctgctgctgctgggcctgctgctgctgctgctggcccccctgctgctgctgacctgtgactgtggggccggcagcactggaggagtgactggaggcttcatccctgtgcctgatggcagcgagggcaccatccaccagtggggcattgaaggagcccaccctgaggacaaggagatcaccaacatctgtgtgccccctgtgacagccaacggggctgacttcatggagagcagcgaggtgtgcaccaacacctacgcccggggcacagctgtggagggcaccagcggcatggagatgaccaccaagctgggcgccgccacagaaagtggaggagctgctggctttgccactggaacagtgtctggagctgccagcggctttggagctgccactggagtgggcatctgcagcagcggccagagcggcaccatgaggaccaggcacagcactggaggcaccaacaaggactatgcagatggagccatctccatgaacttcctggacagctacttcagccagaaggcctttgcctgtgccgaggaggatgatggccaggaggccaatgactgcctgctgatctatgacaatgaaggagcagatgccaccggcagccctgtgggctctgtgggctgctgcagcttcatcgcagatgacctggatgacagcttcctggacagcctgggccccaagttcaagaagctggccgagatcagcctgggcgtggatggagagggcaaggaggtgcagccccccagcaaggacagcggctatggaattgagagctgtggccaccccatcgaggtgcagcagacaggctttgtgaagtgccagaccctgagcggcagccagggcgccagcgccctgagcaccagcggctctgtgcagcctgctgtgtccatcccagaccccctgcagcacggcaactacctggtgacagagacctacagcgccagcggcagcctggtgcagcccagcacagctggctttgaccccctgctgacccagaatgtcatcgtgacagagagggtcatctgccccatcagctctgtgcccggcaacctggccggccccacccagctgcggggcagccacaccatgctgtgcacagaggacccctgcagccgcctcatctag

SEQ ID NO: 122321 - DNA, 3000 bp, Artificial Sequence
  derived and/or modified sequence
atgatgggcctgttcccccggaccaccggcgccctggccatcttcgtggtggttatccttgtgcatggggagttgaggattgagacgaaaggtcagtacgacgaagaagaaatgaccatgcagcaggcaaagagacgacagaagagagagtgggttaagttcgccaagccgtgtcgggagggagaggacaattcaaaaagaaaccccatcgcaaaaatcacctcagattaccaggcaactcagaaaattacctataggatatccggggtgggcattgatcagcctccctttggaatttttgtagtcgataagaatactggcgatatcaacatcacagccatcgtggaccgggaggaaactcctagcttcttgatcacatgtcgagcactgaacgcgcaaggcctggatgtggagaaaccgctcattctgactgtgaaaattcttgatattaatgacaatccccccgtgtttagtcagcagatctttatgggcgaaattgaagagaactccgcctccaattccctcgtaatgattctgaacgcgacagacgccgatgaacctaaccatctcaacagcaagatcgcgttcaagattgtgtcccaggagcccgccggtacgcctatgtttctcctgtcaaggaacaccggcgaagtccggaccttgacaaacagccttgatagggagcaagcaagttcctacagacttgtggttagtggtgcagacaaggacggagagggtctttcgacccagtgcgagtgcaacatcaaggtgaaggacgtgaatgataattttccaatgtttagggatagtcagtactcagccagaatagaagagaatattttgtcatcggaactgttgcgattccaggtgaccgacctggatgaagagtacacagataactggctggccgtgtacttttttactagcggcaacgaagggaactggttcgaaattcagacagatccacgaaccaacgagggcatcctcaaggttgtgaaggccctcgattatgaacagctccagtcagtcaagctgtccatcgccgttaaaaacaaagctgagttccaccagagcgtgatcagcagatatagggtgcagtccactcccgtgaccatccaagtcatcaacgtgagagagggcatagcatttagacccgcttccaagacttttaccgttcagaagggaatatccagtaaaaaactagtggattacattctgggcacctatcaggcaatcgacgaggacaccaacaaggccgccagcaacgtgaagtacgtgatggggcgaaacgatggagggtatctcatgatcgactccaagactgccgagatcaagttcgtgaaaaatatgaacagggatagtactttcatagtcaacaaaactattacagcggaggtgctcgcaattgacgagtatacgggaaagacatccacgggcaccgtctatgtaagagtgcctgactttaacgacaattgccctacggctgtgcttgagaaagatgccgtctgctcttcttctccctctgtggtagtgtccgcccgcactcttaataaccgctacaccgggccctatacattcgcattggaggaccaacccgttaagctgcctgctgtctggtccatcaccactctcaatgccacttctgctctccttcgagcacaggaacagattccacctggcgtttaccatatcagcctggtcctgacagactctcagaacaatagatgcgagatgccacggtccctgaccctggaggtgtgtcagtgtgacaaccggggaatttgcggcaccagttaccccacaactagccctggaacacgatacgggcgcccacattccggcaggctgggtcccgccgctattggactgttgctattgggattattgctgctcctgttggcccctctccttctgcttacatgcgattgtggcgccggctccacagggggcgtgaccggtggatttattcctgtgcccgacgggagcgaggggacgattcatcagtggggcatcgaaggcgctcatccagaggacaaggagataacgaatatctgcgttcccccggtgacagcaaacggagctgattttatggagtcatccgaagtctgtacaaatacatacgctaggggcacggcggtcgagggcacgagtgggatggaaatgaccacgaaattgggtgctgccacagaatctggcggagcggccggcttcgccacaggaacggtttccggtgcagcctcaggttttggcgctgcgaccggcgtgggaatttgctcatcaggtcaatcaggcacaatgaggacgcgtcatagcaccggaggaacaaataaggattacgctgacggagctatttcaatgaatttcctggactcctacttttctcagaaagcctttgcctgcgcagaagaagatgacggacaagaagccaatgattgtctgctcatttacgataatgagggagctgacgcaaccgggtcgcccgtcggatccgtgggatgctgtagctttattgccgacgacctggatgacagtttcctggacagcctgggccccaaatttaaaaaactggcagagatctccctgggagtcgacggggaggggaaggaggttcagccacctagtaaagacagcgggtacgggattgaaagctgtggtcaccctatcgaagtgcagcaaacaggcttcgtaaagtgccaaaccctgagcgggtctcagggcgcttcggccctgagcacctctggttccgtgcagcctgctgttagcatccctgatcccctgcagcatggcaactatctcgttactgagacctactcagcgagcggtagcctcgtccagccatccaccgctggattcgacccacttctgactcagaacgttatcgtgacagaacgggtgatttgtccaattagcagtgtgcctgggaacctggcaggtcccacccagcttcggggttcccacactatgctctgcacggaggacccttgtagtcgcctgatctag

SEQ ID NO: 122322 - DNA, 3000 bp, Artificial Sequence
  derived and/or modified sequence
atgatggggttgtttcctaggactaccggcgctcttgctatatttgtggtggtcatattggttcatggggaattgagaatcgaaaccaaggggcagtatgatgaggaggagatgaccatgcagcaggccaagcggaggcaaaagagagaatgggtcaagttcgcgaaaccatgtcgagagggtgaggacaacagcaagagaaatcccatagccaagattacatctgattatcaggccactcaaaaaattacttaccggattagcggcgtcgggatcgaccaacccccattcggcatatttgttgtcgataagaacacaggggatatcaacattaccgcgattgttgaccgcgaagagaccccgagcttcctgattacatgtcgcgcactcaatgcacagggcttggatgtcgagaagccactgattctcactgtaaagatcttggatatcaacgacaaccccccagtgttctcacagcagatctttatgggcgagatcgaggagaattcagcgtctaattccctcgtgatgatcctaaacgcaacagacgcagatgagcctaaccacctgaacagtaaaatagctttcaagatcgtgagccaggagccagccggaactccgatgtttcttctgagtcgtaacactggcgaggtgcgcactctcactaactcactcgacagagaacaggctagctcttatcggctggtggtttccggcgctgataaggacggtgaggggttgagcacccaatgtgaatgtaacatcaaagtgaaggacgtcaacgacaatttccccatgttcagagattctcagtactccgctagaatcgaagaaaatattctgagctccgaactcctgagatttcaggtaaccgaccttgacgaagaatacacagataattggctggctgtgtacttctttacttcaggtaacgaagggaattggttcgagatacagaccgacccccgtaccaatgaagggattctgaaagtggtcaaggcgctggattacgaacagctccagtctgtaaagctgagtattgcagtgaagaacaaagcagaattccaccagagcgtgatttcacggtacagagtgcagtcgacaccagtcaccattcaggtcatcaacgttagagagggtatagctttcaggcctgcttccaaaacctttacagttcagaaaggcatatcctccaagaaactggtggattatatcctcgggacataccaagccattgacgaggacactaacaaggccgcttccaacgtgaaatatgttatgggacggaatgacggaggctatttaatgattgacagtaaaacggcagagatcaagtttgtgaaaaacatgaatcgtgactcaacattcatagtcaataagacgataacggcagaggttctggccatcgatgaatacacaggaaagacgtctaccgggacagtttacgttagggtccctgactttaacgacaattgtcctaccgctgtgctggagaaagacgctgtgtgtagtagcagccctagtgtcgtcgtatctgcaaggacactgaataatcggtatactgggccatacacctttgcactcgaggatcaacccgtcaagcttcccgctgtttggtcaatcacaaccttaaacgccacctcggcactgttgagggcacaagaacagattccgccaggagtgtaccacataagtctcgtactgacagatagccagaataaccggtgcgaaatgccacggtctctgactctcgaggtgtgtcagtgcgacaacagaggaatctgtgggacctcctatccaacaactagtcccggtaccaggtatgggcgtccacactccggaaggctggggcctgccgcaatcggattgttgctgctgggcctactgcttttgctgctcgcccctctgctgttgctgacctgcgactgtggcgctgggtccacggggggagtgacaggtggcttcatccccgtccctgatggaagcgagggcacaattcaccagtgggggatagaaggcgctcaccctgaagataaggagatcacgaacatctgcgtgcccccagtgaccgcaaacggagcggacttcatggagagcagcgaagtctgcaccaacacttacgccagaggcaccgctgtggaaggcacatcaggcatggaaatgacgacaaaattaggagccgctaccgagagcggaggggcagcaggattcgccaccggaaccgttagtggcgctgctagtggattcggggcagctacaggcgttggcatttgtagtagtggacagtcaggcaccatgcgtactagacactccactgggggtactaataaagactatgctgacggagctatctccatgaattttctggattcctacttcagccagaaggcctttgcctgtgccgaggaggacgacgggcaggaagccaacgactgcctgctaatatatgacaacgagggggctgacgctaccgggagccccgtgggatccgtgggctgttgctcttttatcgccgatgacctggatgactcctttttggacagcctgggacctaagtttaaaaagcttgcagaaattagtctcggcgtggacggagaaggaaaggaggtgcagcccccatcgaaggattccggatacggtatagagtcgtgcggacacccaattgaggtccagcaaaccggctttgtaaagtgtcaaacactgagtggatcacagggcgcttccgctctctcgacctccggaagtgtgcaaccggctgtctctatccccgatccactgcaacatgggaattatctggtgacagagacatactcagcgtctggctccctggtgcaaccttctaccgccggttttgaccctcttctgacgcagaacgtgattgtgaccgagcgggtgatctgtcccatctcaagcgtcccaggtaatcttgcagggcctacacagctccgaggttctcacaccatgctctgtaccgaggatccctgtagtcggctgatctag

SEQ ID NO: 122323 - protein, 208 aa, Artificial Sequence
  derived and/or modified sequence
MKLLPSVVLKLFLAAVLSALVTGESLERLRRGLAAGTSNPDPPTVSTDQLLPLGGGRDRKVRDLQEADLDLLRVTLSSKPQALATPNKEEHGKRKKKGKGLGKKRDPCLRKYKDFCIHGECKYVKELRAPSCICHPGYHGERCHGLSLPVENRLYTYDHTTILAVVAVVLSSVCLLVIVGLLMFRYHRRGGYDVENEEKVKLGMTNSH

SEQ ID NO: 122324 - DNA, 627 bp, Artificial Sequence
  derived and/or modified sequence
atgaagctgctgcccagcgtggtgctgaagctgttcctggccgccgtgctgagcgccctggtgaccggcgagagcctggagagactgagaagaggcctggccgccggcaccagcaaccccgacccccccaccgtgagcaccgaccagctgctgcccctgggcggcggcagagacagaaaggtgagagacctgcaggaggccgacctggacctgctgagagtgaccctgagcagcaagccccaggccctggccacccccaacaaggaggagcacggcaagagaaagaagaagggcaagggcctgggcaagaagagagacccctgcctgagaaagtacaaggacttctgcatccacggcgagtgcaagtacgtgaaggagctgagagcccccagctgcatctgccaccccggctaccacggcgagagatgccacggcctgagcctgcccgtggagaacagactgtacacctacgaccacaccaccatcctggccgtggtggccgtggtgctgagcagcgtgtgcctgctggtgatcgtgggcctgctgatgttcagataccacagaagaggcggctacgacgtggagaacgaggagaaggtgaagctgggcatgaccaacagccactag

SEQ ID NO: 122325 - DNA, 627 bp, Artificial Sequence
  derived and/or modified sequence
atgaaacttctccccagtgtggtgctgaagctcttcttggccgctgtcctctctgcgttagttacaggagagtccctggaacgcctccgtcgtggactggccgccggcacctctaaccccgatccacctaccgttagcaccgaccagttgttaccgctcggggggggcagagacaggaaagtgcgcgacctgcaggaggccgacctggacttgcttcgcgtgaccctctccagcaagcctcaagccttagcaactccaaacaaggaagaacatggaaaacgcaagaagaagggcaagggactaggaaaaaagagggatccttgtttaagaaaatacaaggatttttgtatccacggtgagtgcaagtacgtaaaagagcttcgggctccctcatgcatctgccatcctggttatcacggagagaggtgccacgggctgtcactccccgtcgagaaccgcctatatacctatgatcacaccaccatcctagctgttgtcgccgtcgtgcttagttctgtctgccttttggtcattgtcgggcttctgatgtttagataccataggagaggcggatatgatgtggagaacgaggagaaagtcaagttgggcatgaccaacagtcactag

SEQ ID NO: 122326 - DNA, 627 bp, Artificial Sequence
  derived and/or modified sequence
atgaagctgctgcccagcgtggtgctgaagctgttcctggccgctgtgctgagcgccctggtgactggagagagcctggagcggctgcggcggggcctggccgccggcaccagcaacccagacccccccaccgtgtccacagaccagctgctgcccctgggcggcggccgggacaggaaggtgcgggacctgcaggaggccgacctggacctgctgcgggtgaccctgagcagcaagccccaggccctggccacccccaacaaggaggagcacggcaagaggaagaagaagggcaagggcctgggcaagaagagggacccctgcctgaggaagtacaaggacttctgcatccacggggagtgcaagtatgtgaaggagctgcgggcccccagctgcatctgccaccctggctaccatggagagcgctgccacggcctgagcctgcctgtggagaaccggctgtacacctatgaccacaccaccatcctggccgtggtggccgtggtgctgagctctgtgtgcctgctggtgattgtgggcctgctgatgttccgctaccaccggcggggcggctatgatgtggagaatgaggagaaggtgaagctgggcatgaccaacagccactag

SEQ ID NO: 122327 - DNA, 627 bp, Artificial Sequence
  derived and/or modified sequence
atgaagctgctgcccagcgtggtgctgaagctgttcctggccgccgtcctttctgccctggttactggggagtcactcgagcgattaaggaggggactagccgccgggacctcaaatccagacccccctaccgtttctactgatcagctgttaccgcttggagggggtagggacaggaaggtgcgcgacttacaagaggccgacctcgaccttttgcgcgtgactctgagctcaaagccgcaggcactagcgacaccaaataaggaggagcacggaaagcggaagaaaaaaggcaagggattagggaagaagcgggatccctgtcttcggaagtataaggacttctgcatccatggcgagtgtaagtacgtgaaagaactcagagctccttcttgtatttgccatcctggataccacggcgagcgttgtcacggcctcagcctgccagttgaaaataggctctatacatacgaccataccaccattctggcagtcgtagctgtggtgctctcctccgtttgtctgttggtcatcgtcggccttctcatgttcaggtaccatcggcgtggaggctatgacgtggaaaatgaggagaaagttaagctgggtatgactaatagtcattag

SEQ ID NO: 122328 - DNA, 627 bp, Artificial Sequence
  derived and/or modified sequence
atgaaactcttgcctagcgtggtgttaaagcttttcctggccgcagtcttgtccgccctcgtgactggtgaaagtcttgaacgcctgcggcgaggactagccgcaggcacctcaaacccggaccctcccactgtgagcactgaccaactccttccattgggcggtggcagggataggaaggtgcgagacctgcaggaggctgatcttgacttacttagggtcaccctgtcctctaaacctcaggccctggcaacgccgaacaaagaagagcacgggaagagaaagaagaaaggcaaaggtctagggaagaagcgggatccatgcctgcgcaagtacaaggacttctgtattcacggcgaatgcaagtacgtgaaagaactgagggccccttcatgcatatgtcaccctgggtatcacggggaacgctgtcacggtctgagcctgccagttgagaaccgcctgtatacctacgaccacacaactattttagcggtggtagctgtggtgctctcctcagtttgcctgctcgtgatcgtgggtctgctgatgttccgctatcaccgtagaggtggttacgacgtggaaaacgaggaaaaagtaaaactcggcatgaccaattcccattag

SEQ ID NO: 122329 - DNA, 627 bp, Artificial Sequence
  derived and/or modified sequence
atgaaactccttccatctgtagttctgaagctgtttctggccgcggtgctttcagccctcgtcactggagaaagcttagaaagacttcgtcgcggattggccgctggtacttcaaacccagaccctccaacagtaagcacagaccagctgttgcccttaggtgggggccgggatcgaaaggtgagggacctgcaggaagcagatctggacctactgagggtgaccctgtcctccaagccccaagccctcgccacaccgaacaaggaagaacatggaaagcgaaagaagaagggtaagggcctgggtaaaaagcgagacccatgtctgcgcaagtataaggacttttgcatccatggggaatgcaagtacgtcaaggaactgagagcaccaagctgcatctgtcaccctgggtaccacggagagaggtgccacggtctgagcctgcccgtggagaaccgactctacacctacgaccacaccacaattcttgctgttgtcgccgtggtgctgtcctcagtgtgtcttcttgttatcgtgggattgttgatgttccgctaccaccggcggggtggttatgacgttgaaaatgaggagaaggtgaagttaggaatgactaacagccattag

SEQ ID NO: 122330 - DNA, 627 bp, Artificial Sequence
  derived and/or modified sequence
atgaagctgctgcccagcgtggtgctgaagctgttcctggccgccgttttgtctgcactggtaacgggcgagtctctggaaagactgaggcgcggcttagccgccggcacttctaaccctgatcctcccactgtatctactgatcagctcttaccacttggtggcggacgggaccgaaaagtgcgcgacctgcaggaagcagacctggacctattacgagtaaccctgtcaagtaagccccaggctctggcaactccaaataaggaagaacatggcaagaggaaaaagaaaggtaagggcttgggaaagaaacgggacccatgtcttagaaaatacaaagatttctgcattcatggcgagtgtaaatacgttaaggaattgagggcccccagctgtatctgtcatccaggttatcacggcgaacggtgtcatggactgtccctgcccgtcgaaaatcggctttacacgtacgaccacacgacaatcctggccgtggtcgccgtagtgctttctagtgtctgtctgctggtgatcgtgggcctgctgatgttcagatatcacaggcgaggcgggtatgacgttgagaatgaagaaaaagtgaagttgggaatgaccaactctcattag

SEQ ID NO: 122331 - DNA, 627 bp, Artificial Sequence
  derived and/or modified sequence
atgaagttattgcctagcgtcgtgctgaagctgttcctcgctgctgtgctttcggccttggttacgggcgagagcctggagcgcctcaggaggggactcgcggctggaacaagcaacccagacccgcctactgtctcaaccgatcaattgctgcccttagggggaggcagagacaggaaggtacgggatctgcaggaggccgatctcgatctgttgcgcgtcactttgagttccaagccccaggcgctggctaccccaaataaggaggagcatggaaaacgcaaaaagaagggaaaggggctgggaaagaaaagagacccatgcctcagaaagtacaaggacttttgtatccatggggagtgtaagtatgtcaaggagctcagagccccatcctgcatctgtcaccccggatatcacggtgagcgttgccacggactgtcccttcctgtggagaacaggctgtatacctacgaccacaccacgattttggctgtggttgcagtagtattgtcctccgtttgtctgctggtgatcgttggattgctgatgttcagataccaccggagggggggatatgacgtcgagaatgaggaaaaagttaaattaggtatgacaaattcccattag

SEQ ID NO: 122332 - DNA, 2386 bp, Artificial Sequence
  derived and/or modified sequence
attcccggccgcgagccgggcagcgctcattcggccgaaggagctacgcgggccacgctgctggctggcctgacctaggcgcgcggggtcgggcggccgcgcgggcgggctgagtgagcaagacaagacactcaagaagagcgagctgcgcctgggtcccggccaggcttgcacgcagaggcgggcggcagacggtgcccggcggaatctcctgagctccgccgcccagctctggtgccagcgcccagtggccgccgcttcgaaagtgactggtgcctcgccgcctcctctcggtgcgggaccatgaagctgctgccgtcggtggtgctgaagctctttctggctgcagttctctcggcactggtgactggcgagagcctggagcggcttcggagagggctagctgctggaaccagcaacccggaccctcccactgtatccacggaccagctgctacccctaggaggcggccgggaccggaaagtccgtgacttgcaagaggcagatctggaccttttgagagtcactttatcctccaagccacaagcactggccacaccaaacaaggaggagcacgggaaaagaaagaagaaaggcaaggggctagggaagaagagggacccatgtcttcggaaatacaaggacttctgcatccatggagaatgcaaatatgtgaaggagctccgggctccctcctgcatctgccacccgggttaccatggagagaggtgtcatgggctgagcctcccagtggaaaatcgcttatatacctatgaccacacaaccatcctggccgtggtggctgtggtgctgtcatctgtctgtctgctggtcatcgtggggcttctcatgtttaggtaccataggagaggaggttatgatgtggaaaatgaagagaaagtgaagttgggcatgactaattcccactgagagagacttgtgctcaaggaatcggctggggactgctacctctgagaagacacaaggtgatttcagactgcagaggggaaagacttccatctagtcacaaagactccttcgtccccagttgccgtctaggattgggcctcccataattgctttgccaaaataccagagccttcaagtgccaaacagagtatgtccgatggtatctgggtaagaagaaagcaaaagcaagggaccttcatgcccttctgattcccctccaccaaaccccacttcccctcataagtttgtttaaacacttatcttctggattagaatgccggttaaattccatatgctccaggatctttgactgaaaaaaaaaaagaagaagaagaaggagagcaagaaggaaagatttgtgaactggaagaaagcaacaaagattgagaagccatgtactcaagtaccaccaagggatctgccattgggaccctccagtgctggatttgatgagttaactgtgaaataccacaagcctgagaactgaattttgggacttctacccagatggaaaaataacaactatttttgttgttgttgtttgtaaatgcctcttaaattatatatttattttattctatgtatgttaatttatttagtttttaacaatctaacaataatatttcaagtgcctagactgttactttggcaatttcctggccctccactcctcatccccacaatctggcttagtgccacccacctttgccacaaagctaggatggttctgtgacccatctgtagtaatttattgtctgtctacatttctgcagatcttccgtggtcagagtgccactgcgggagctctgtatggtcaggatgtaggggttaacttggtcagagccactctatgagttggacttcagtcttgcctaggcgattttgtctaccatttgtgttttgaaagcccaaggtgctgatgtcaaagtgtaacagatatcagtgtctccccgtgtcctctccctgccaagtctcagaagaggttgggcttccatgcctgtagctttcctggtccctcacccccatggccccaggcccacagcgtgggaactcactttcccttgtgtcaagacatttctctaactcctgccattcttctggtgctactccatgcaggggtcagtgcagcagaggacagtctggagaaggtattagcaaagcaaaaggctgagaaggaacagggaacattggagctgactgttcttggtaactgattacctgccaattgctaccgagaaggttggaggtggggaaggctttgtataatcccacccacctcaccaaaacgatgaagttatgctgtcatggtcctttctggaagtttctggtgccatttctgaactgttacaacttgtatttccaaacctggttcatatttatactttgcaatccaaataaagataacccttattccata

SEQ ID NO: 122333 - DNA, 1298 bp, Artificial Sequence
  derived and/or modified sequence
attcggccgaaggagctacgcgggccacgctgctggctggcctgacctaggcgcgcggggtcgggcggccgcgcgggcgggctgagtgagcaagacaagacactcaagaagagcgagctgcgcctgggtcccggccaggcttgcacgcagaggcgggcggcagacggtgcccggcggaatctcctgagctccgccgcccagctctggtgccagcgcccagtggccgccgcttcgaaagtgactggtgcctcgccgcctcctctcggtgcgggaccatgaagctgctgccgtcggtggtgctgaagctctttctggctgcagttctctcggcactggtgactggcgagagcctggagcggcttcggagagggctagctgctggaaccagcaacccggaccctcccactgtatccacggaccagctgctacccctaggaggcggccgggaccggaaagtccgtgacttgcaagaggcagatctggaccttttgagagtcactttatcctccaagccacaagcactggccacaccaaacaaggaggagcacgggaaaagaaagaagaaaggcaaggggctagggaagaagagggacccatgtcttcggaaatacaaggacttctgcatccatggagaatgcaaatatgtgaaggagctccgggctccctcctgcatctgccacccgggttaccatggagagaggtgtcatgggctgagcctcccagtggaaaatcgcttatatacctatgaccacacaaccatcctggccgtggtggctgtggtgctgtcatctgtctgtctgctggtcatcgtggggcttctcatgtttaggtaccataggagaggaggttatgatgtggaaaatgaagagaaagtgaagttgggcatgactaattcccactgagagagacttgtgctcaaggaatcggctggggactgctacctctgagaagacacaaggtgatttcagactgcagatggttctgtgacccatctgtagtaatttattgtctgtctacatttctgcagatcttccgtggtcagagtgccactgcgggagctctgtatggtcaggatgtaggggttaacttggtcagagccactctatgagttggacttcagtcttgcctaggcgattttgtctaccatttgtgttttgaaagcccaaggtgctgatgtcaaagtgtaacagatatcagtgtctccccgtgtcctctccctgccaagtctcagaagaggttgggcttccatgcctgtagctttcctggtccctcacccccatggccccaggcccacagcg

SEQ ID NO: 122334 - protein, 381 aa, Artificial Sequence
  derived and/or modified sequence
MIDTLRPVPFASEMAISKTVAWLNEQLELGNERLLLMDCRPQELYESSHIESAINVAIPGIMLRRLQKGNLPVRALFTRGEDRDRFTRRCGTDTVVLYDESSSDWNENTGGESVLGLLLKKLKDEGCRAFYLEGGFSKFQAEFSLHCETNLDGSCSSSSPPLPVLGLGGLRISSDSSSDIESDLDRDPNSATDSDGSPLSNSQPSFPVEILPFLYLGCAKDSTNLDVLEEFGIKYILNVTPNLPNLFENAGEFKYKQIPISDHWSQNLSQFFPEAISFIDEARGKNCGVLVHCLAGISRSVTVTVAYLMQKLNLSMNDAYDIVKMKKSNISPNFNFMGQLLDFERTLGLSSPCDNRVPAQQLYFTTPSNQNVYQVDSLQST

SEQ ID NO: 122335 - DNA, 1146 bp, Artificial Sequence
  derived and/or modified sequence
atgatcgacaccctgagacccgtgcccttcgccagcgagatggccatcagcaagaccgtggcctggctgaacgagcagctggagctgggcaacgagagactgctgctgatggactgcagaccccaggagctgtacgagagcagccacatcgagagcgccatcaacgtggccatccccggcatcatgctgagaagactgcagaagggcaacctgcccgtgagagccctgttcaccagaggcgaggacagagacagattcaccagaagatgcggcaccgacaccgtggtgctgtacgacgagagcagcagcgactggaacgagaacaccggcggcgagagcgtgctgggcctgctgctgaagaagctgaaggacgagggctgcagagccttctacctggagggcggcttcagcaagttccaggccgagttcagcctgcactgcgagaccaacctggacggcagctgcagcagcagcagcccccccctgcccgtgctgggcctgggcggcctgagaatcagcagcgacagcagcagcgacatcgagagcgacctggacagagaccccaacagcgccaccgacagcgacggcagccccctgagcaacagccagcccagcttccccgtggagatcctgcccttcctgtacctgggctgcgccaaggacagcaccaacctggacgtgctggaggagttcggcatcaagtacatcctgaacgtgacccccaacctgcccaacctgttcgagaacgccggcgagttcaagtacaagcagatccccatcagcgaccactggagccagaacctgagccagttcttccccgaggccatcagcttcatcgacgaggccagaggcaagaactgcggcgtgctggtgcactgcctggccggcatcagcagaagcgtgaccgtgaccgtggcctacctgatgcagaagctgaacctgagcatgaacgacgcctacgacatcgtgaagatgaagaagagcaacatcagccccaacttcaacttcatgggccagctgctggacttcgagagaaccctgggcctgagcagcccctgcgacaacagagtgcccgcccagcagctgtacttcaccacccccagcaaccagaacgtgtaccaggtggacagcctgcagagcacctag

SEQ ID NO: 122336 - DNA, 4359 bp, Artificial Sequence
  derived and/or modified sequence
tttgtttctgcactctacattgttttaatgaaaataaaatgttattttaagaaaaaaggttttcttctgattttctgcacaaccagacgtttgtttgtttgctttaaaatgtttcaacaaaatcctggtttgtttcgaaatatgttggattagcatttaacacctcatcggtcactaaagcccagtcagttcaccagccccaacacagcctcggctaaaagaacatcagagcaaacagagctgggcctttaaaagtggcaaacaaatgccacacaccgcctaaagaaggggggttgggggaggggagggttaaggcgaacttgggtccaaatgagtttgaagggaatacaaagaacgaaaagtcagcacaagttttcctaaagctagctcgcgaacgcaagcgtcgcgaacaagggcttttgtgcatgctaattgcgccattggtgcgcaaaagttccgacgcgaagtgtgaactctcaacagaaggaaacatgagacaactgaagtgccctggtttatgtgccctgctcctcctccgctgccgcctccccttctttctccttcctcccgccgagcccgctgttgcagcttgtttgcactggggcttatccggagcggaaattcctttccgtttttgtgaatgacaaactcattaacaattcatcaacacaacctgttccagccggcccgtccccacggcaacagccccttccgcagcacgctcattggctggcccggagaatgtatccattgagacgctcgctgtttgtatccattgaggagctgcctcgcgcagggggtgtgcgaggctgagtccaagagatagcaaatcgagtcttaaataatccggggagaaagacgcccgggtagatttgaggtgcagccttggagggagggattagaagccgctagactttttttcctcccctctcagtagcacggagtccgaattaattggatttcattcactggggaggaacaaaaactatctgggcagcttcattgagagagattcattgacactaagagccagcggctgcagctgggtgcagagagaacctccggctttacttctgtctcgtctgccccaaccgctagcctcggcttgggtaaggcgaggcggaattaaaccccgctccgagagcggcagcttcgcgcgcggtgcgctcggcctatgcctgccccgaggggcgtctggtaggcaccccgccctctcccgcagctcgacccccatgatagatacgctcagacccgtgcccttcgcgtcggaaatggcgatcagcaagacggtggcgtggctcaacgagcagctggagctgggcaacgagcggctgctgctgatggactgccggccgcaggagctatacgagtcgtcgcacatcgagtcggccatcaacgtggccatcccgggcatcatgctgcggcgcctgcagaagggtaacctgccggtgcgcgcgctcttcacgcgcggcgaggaccgggaccgcttcacccggcgctgtggcaccgacacagtggtgctctacgacgagagcagcagcgactggaacgagaatacgggcggcgagtcggtgctcgggctgctgctcaagaagctcaaggacgagggctgccgggcgttctacctggaaggtggcttcagtaagttccaagccgagttctccctgcattgcgagaccaatctagacggctcgtgtagcagcagctcgccgccgttgccagtgctggggctcgggggcctgcggatcagctctgactcttcctcggacatcgagtctgaccttgaccgagaccccaatagtgcaacagactcggatggtagtccgctgtccaacagccagccttccttcccagtggagatcttgcccttcctctacttgggctgtgccaaagactccaccaacttggacgtgttggaggaattcggcatcaagtacatcttgaacgtcacccccaatttgccgaatctctttgagaacgcaggagagtttaaatacaagcaaatccccatctcggatcactggagccaaaacctgtcccagtttttccctgaggccatttctttcatagatgaagcccggggcaagaactgtggtgtcttggtacattgcttggctggcattagccgctcagtcactgtgactgtggcttaccttatgcagaagctcaatctgtcgatgaacgacgcctatgacattgtcaaaatgaaaaaatccaacatatcccctaacttcaacttcatgggtcagctgctggacttcgagaggacgctgggactcagcagcccatgtgacaacagggttccagcacagcagctgtattttaccaccccttccaaccagaatgtataccaggtggactctctgcaatctacgtgaaagaccccacacccctccttgctggaatgtgtctggcccttcagcagtttctcttggcagcatcagctgggctgctttctttgtgtgtggccccaggtgtcaaaatgacaccagctgtctgtactagacaaggttaccaagtgcggaattggttaatactaacagagagatttgctccattctctttggaataacaggacatgctgtatagatacaggcagtaggtttgctctgtacccatgtgtacagcctacccatgcagggactgggattcgaggacttccaggcgcatagggtagaaccaaatgatagggtaggagcatgtgttctttagggccttgtaaggctgtttccttttgcatctggaactgactatataattgtcttcaatgaagactaattcaattttgcatatagaggagccaaagagagatttcagctctgtatttgtggtatcagtttggaaaaaaaaatctgatactccatttgattattgtaaatatttgatcttgaatcacttgacagtgtttgtttgaattgtgtttgttttttcctttgatgggcttaaaagaaattatccaaagggagaaagagcagtatgccacttcttaaaacagaacaaaacaaaaaaagaaaattgtgctcttttctaatccaaagggtatatttgcagcatgcttgactttaccaattctgatgacatctttacggacactattatcactaagaccttgttatggcgaagtctttagtctttttcatgtattttcctcatgattttttctctttatgtagtttgactatgccttacctttgtaaatatttttgcttgtgttgtcgcaaaggggataatctgggaaagacaccaaatcatgggctcactttaaaaaaagaaagaataaaaaaaccttcagctgtgctaaacagtatattacctctgtataaaattcttcagggagtgtcacctcaaatgcaatactttgggttggtttctttcctttaaaaaaatttgtataaaactggaagtgtgtgtgtgtgagcatgggtacccatttgataagagaaatgcatttgattgtgaagaagggagagttaaattctccattatgttcgtggtgtaaagtttagagctggaatttattataagaatgtaaaaccttaaattattaataaataactattttggctattgaatgtgtgtttttaaaaactcagttatacctatgtgtgaagtgacacattttagaactttttcattcagggattgattttgacttgtaggcatagtagggcaaggttcttttaagcttttcctagaacgtttttcagcagcagtttatgaaattcatcgtttgccacgaataaagatgacatcctagaatggaccgactgtaccgtgtatatgaacaatacctcttatgagtatagttccggcttaagattttaaagcccctgaagaaaaatgaacctatagagcatagcttgctgaggaatacaatttggatattaaccacagagaggtgtagcagaataccaagatgacagccacatgttaacctcctccctatccttcactgtcaggatcttctgctttataatgctgagataatgccaaagaggaagtagggataattctttttccagtctgttgtcatgggcaattctacctgcagatatcctagtgtgagaatgctgaatccagaatgatgtctccactttttcccctagcatgcgcatggcaaggcatatctaagcttcctcaccgtgtcaggatatggctttagaattttacattggcacttaggaggcaactttgtcatccctgttgtaatgtgcttttttgtttaactggcttgggatgtgggtcagaaacccttattgaaacttgtggggattattttagtttcttttcaagctaaagactttatatcttgccatttttcttgggacctaccctctccttacctcaaatgtaaaaata

SEQ ID NO: 122337 - DNA, 1146 bp, Artificial Sequence
  derived and/or modified sequence
atgattgatactcttaggccggtcccgtttgcatcagaaatggcaatctcgaagaccgttgcgtggcttaacgagcaacttgaattgggaaacgagagacttctgctgatggactgtagaccacaggaattgtatgaaagttcccacatagaaagcgccatcaacgtggccatcccaggcattatgctgcgcaggttacagaaaggtaacctcccagtcagagcactattcaccagaggagaagatagggacaggtttacacgccgatgtggtacagatacagttgttttatatgatgagtctagctccgattggaacgagaacaccggcggggagtctgttctgggcctgttgcttaaaaaactcaaggatgagggttgtagagcattctatcttgagggcggctttagcaaatttcaggccgagttttctttgcattgtgagacgaacctagacggctcgtgcagcagcagcagtccccccctgccagtcctcggtctgggcgggttacggatcagctccgattcatccagtgacatcgaatcagacctcgaccgagatccgaattctgcaacggattccgacggatcccccctgtccaactcgcagccgagcttccctgtggaaattctgccatttctgtaccttggctgtgccaaagatagcacaaacttagacgtactggaagagttcggtatcaaatatatcctgaatgtcacccccaacttaccaaacctgtttgagaatgctggggaattcaaatataaacagattcccatctctgatcactggtcccagaacttgagtcagttttttccagaggccatatcctttattgatgaggccaggggcaagaactgcggcgtgttggtgcactgtctggcaggcatttccaggagtgtgactgttaccgtggcatacctcatgcagaagttaaacctctcgatgaacgacgcctatgatattgtgaagatgaagaaatctaatattagccctaacttcaattttatgggccaattattagatttcgagcgaacgttggggctgagctcgccatgtgacaatcgcgtccccgctcagcagctgtactttacgacaccctccaaccagaatgtttatcaagttgattcgcttcagagcacctag

SEQ ID NO: 122338 - DNA, 1146 bp, Artificial Sequence
  derived and/or modified sequence
atgattgacaccctgcggcctgtgccctttgccagcgagatggccatcagcaagacagtggcctggctgaatgagcagctggagctgggcaatgaaaggctgctgctgatggactgccggccccaggagctgtatgagagcagccacatcgagagcgccatcaacgtggccatccctggcatcatgctgcggcggctgcagaagggcaacctgcctgtgcgggccctcttcaccagaggagaagatcgggaccgcttcacccggcgctgtggcacagacacagtggtgctgtatgatgagagcagcagtgactggaatgaaaatactggaggagagagcgtgctgggcctgctgctgaagaagctgaaggatgagggctgccgggccttctacctggagggcggcttcagcaagttccaggccgagttcagcctgcactgtgagaccaacctggatggcagctgcagcagcagcagcccccccctgcctgtgctgggcctgggcggcctgcgcatcagcagtgacagcagcagtgacatcgagagtgacctggaccgggaccccaacagcgccacagacagtgatggcagccccctgagcaacagccagcccagcttccctgtggagatcctgcccttcctgtacctgggctgtgccaaggacagcaccaacctggatgtgctggaggagtttggcatcaagtacatcctgaatgtgacccccaacctgcccaacctgtttgaaaatgctggggagttcaagtacaagcagatccccatcagtgaccactggagccagaacctgagccagttcttccctgaggccatctccttcattgatgaggcccggggcaagaactgtggggtgctggtgcactgcctggccggcatcagccgctctgtgacagtgacagtggcctacctgatgcagaagctgaacctgtccatgaatgatgcctatgacatcgtgaagatgaagaagagcaacatcagccccaacttcaacttcatgggccagctgctggactttgagaggaccctgggcctgagcagcccctgtgacaacagagtgcctgcccagcagctgtacttcaccacccccagcaaccagaatgtgtaccaggtggacagcctgcagagcacctag

SEQ ID NO: 122339 - DNA, 1146 bp, Artificial Sequence
  derived and/or modified sequence
atgatcgacaccctgcggcccgtgcccttcgccagcgagatggccatttctaagaccgtcgcatggctaaacgagcaacttgagttaggaaatgagcggcttctcctgatggactgtagaccccaggaactgtacgaaagttcccatatcgaatctgcaattaatgtggctattccagggatcatgctgcgccgccttcagaagggcaacttgcctgtacgggcactattcacccgaggagaggatagggaccggttcacaagacggtgcggcacggacaccgttgttttgtacgatgaatcctccagtgattggaacgagaacactgggggcgagagtgttctgggtctgctgctgaagaagctgaaagatgaggggtgtagagctttttacttggaggggggtttctctaagttccaggccgagttctccctgcactgcgaaacaaacctcgatggctcttgctcctcttcctctcctccactcccagtcctggggcttggcggtcttaggattagttctgactcatcctccgacatcgagagcgatctggacagagaccctaattccgccaccgactctgacggcagccccctgtcaaattctcagcccagctttccagtggaaatcctgccgtttctctatcttggctgcgcaaaggatagtacaaatctggacgtcctggaggagttcggtatcaagtacattctgaatgtgacaccaaacctgcctaatttgtttgagaacgccggcgagtttaaatataagcagatccctatttcagatcattggtcacaaaacctgtcccagttcttccccgaagccataagttttatcgatgaagccaggggcaaaaattgtggggtcctagtgcactgtttagccgggatcagtagatcagtcaccgtcaccgtagcctacctaatgcaaaaactgaacctgtctatgaatgacgcttacgatatcgtgaagatgaagaaatcgaacattagtccaaacttcaatttcatgggccaactcctggatttcgagcggactttggggctatcctccccatgcgacaaccgggtgcctgcccagcaattgtatttcacaaccccttctaatcaaaatgtttatcaggtggatagcctgcaatcaacctag

SEQ ID NO: 122340 - DNA, 1146 bp, Artificial Sequence
  derived and/or modified sequence
atgattgacacgctgcgcccagtgcccttcgccagcgagatggccatctctaaaactgtcgcgtggctgaatgagcagctcgaactgggaaatgagaggctgttactaatggattgtcgccctcaggagctttacgagtcaagtcatattgaatcggctattaacgtggccatccctggcattatgcttcgccgactgcaaaaaggtaacttaccagttcgcgctctctttaccagaggtgaggaccgggacaggttcacgcggaggtgtggaaccgatacggtcgtcctgtatgatgagagcagtagcgattggaacgagaacacagggggtgagagtgtacttggtctgctgctcaaaaaattgaaggacgaagggtgtagagccttttacctggagggcggatttagcaagtttcaggccgagttttccctacattgtgagacgaacctcgacggatcatgtagtagtagttccccacctttaccagtgctggggctgggcggtctccgaatttctagcgatagtagctccgacatcgaatctgacctggatcgagacccgaactccgccactgactccgacggctccccactcagcaatagtcagccaagcttcccggtggagattctgccattcttgtacctcggttgcgccaaagacagcaccaaccttgatgttctggaagaattcggaattaagtacatcctcaatgtgacccccaacctgccaaacctgtttgagaacgccggagaatttaaatacaagcaaataccaatttctgatcattggtctcaaaacctgtcgcaattcttcccagaagccattagctttatagacgaagcacgaggcaagaactgcggagtgcttgtgcactgtcttgcgggaatcagtcggtctgtaaccgtgaccgtcgcatacttgatgcagaaattgaacctgagcatgaacgacgcctatgatatcgtcaagatgaaaaaatcaaatatctcacctaattttaattttatgggacagctgctcgactttgaaagaactcttggcctctcctctccttgtgataaccgggttcctgcccaacagttgtacttcaccacccccagtaatcagaacgtttaccaagtggactcgctccaatccacgtag

SEQ ID NO: 122341 - protein, 368 aa, Artificial Sequence
  derived and/or modified sequence
MPCKSAEWLQEELEARGGASLLLLDCRPHELFESSHIETAINLAIPGLMLRRLRKGNLPIRSIIPNHADKERFATRCKAATVLLYDEATAEWQPEPGAPASVLGLLLQKLRDDGCQAYYLQGGFNKFQTEYSEHCETNVDSSSSPSSSPPTSVLGLGGLRISSDCSDGESDRELPSSATESDGSPVPSSQPAFPVQILPYLYLGCAKDSTNLDVLGKYGIKYILNVTPNLPNAFEHGGEFTYKQIPISDHWSQNLSQFFPEAISFIDEARSKKCGVLVHCLAGISRSVTVTVAYLMQKMNLSLNDAYDFVKRKKSNISPNFNFMGQLLDFERTLGLSSPCDNHASSEQLYFSTPTNHNLFPLNTLEST

SEQ ID NO: 122342 - protein, 419 aa, Artificial Sequence
  derived and/or modified sequence
MKNQLRGPPARAHMSTSGAAAAGGTRAGSEPGAGSGSGAGTGAGAATGAGAMPCKSAEWLQEELEARGGASLLLLDCRPHELFESSHIETAINLAIPGLMLRRLRKGNLPIRSIIPNHADKERFATRCKAATVLLYDEATAEWQPEPGAPASVLGLLLQKLRDDGCQAYYLQGGFNKFQTEYSEHCETNVDSSSSPSSSPPTSVLGLGGLRISSDCSDGESDRELPSSATESDGSPVPSSQPAFPVQILPYLYLGCAKDSTNLDVLGKYGIKYILNVTPNLPNAFEHGGEFTYKQIPISDHWSQNLSQFFPEAISFIDEARSKKCGVLVHCLAGISRSVTVTVAYLMQKMNLSLNDAYDFVKRKKSNISPNFNFMGQLLDFERTLGLSSPCDNHASSEQLYFSTPTNHNLFPLNTLEST

SEQ ID NO: 122343 - DNA, 1107 bp, Artificial Sequence
  derived and/or modified sequence
atgccctgcaagtctgcagagtggctacaagaagaactggaggccagaggcggggcctccttgttgctactggactgcaggcctcacgagctctttgaatccagccatattgaaaccgctatcaacctcgcaatccctggactcatgctccgtagactgaggaaaggcaatctgcccatccgcagtattatccctaatcatgccgacaaagaaaggttcgccacaaggtgcaaagcagcgaccgtgttgctttatgatgaggccactgccgagtggcagcccgagccgggtgctccggcgtcagttcttggcctacttctccaaaagcttagggacgacggctgtcaggcttattacctccaggggggctttaataagttccaaactgagtatagtgaacactgcgagaccaacgtcgacagtagttctagtccaagcagctctccgccaacgtcagttctcggacttggcgggctcaggatctcatccgactgcagcgatggcgaatctgaccgagagttgccatcctctgcgaccgagtctgatgggagcccagttcccagttcacagccagctttccctgtgcagatcctgccctatctctacctcgggtgtgcaaaggattcaaccaacttggacgtcctcgggaagtatggaatcaaatacattctgaacgtcactcccaaccttcccaatgctttcgaacacggaggggaatttacctataaacagatcccgatctctgaccattggtcgcagaatctgtctcagttttttccggaggccatatctttcatcgacgaggcacggtcgaaaaagtgcggggtgctggttcactgcctagccggaattagcaggagtgtcacagtgactgtggcataccttatgcaaaagatgaatctgtccctcaatgacgcatatgattttgtgaaaaggaagaagagtaatatctcaccaaactttaatttcatgggccaactgttagacttcgaacgcaccctcggactgagctctccatgcgataatcatgcgagcagcgagcagttatatttttccacacctactaaccataatctgttccccttaaacacactggaatccacctag

SEQ ID NO: 122344 - DNA, 1260 bp, Artificial Sequence
  derived and/or modified sequence
atgaaaaaccagctacggggccctccggccagagcccacatgagcacttccggggccgctgcagctggcggaacacgggccggcagtgagccgggggccggctctggcagcggagcagggaccggggctggggctgcgacaggagctggagctatgccctgtaagagcgcagagtggctgcaagaggagctggaagcccgcgggggcgcgtctctgctcctgctcgactgccgcccacatgaattatttgaatcctctcacattgaaaccgcaatcaaccttgccattcctggcctgatgctgagacgcctaaggaaggggaacctcccgattcgctctatcattccaaatcacgccgacaaggaacgctttgccacccgctgcaaggccgcaactgtgctcttgtatgatgaagcaaccgcggaatggcagcctgagcctggcgctcctgcctctgtgctcggcctcctgttacagaagctgcgggacgacggttgtcaggcatattatctgcagggtggcttcaacaagttccaaacagaatactctgagcactgcgagacaaatgttgattcttcttcatctccgagcagctccccccccacttccgtactcggcctcggcgggcttaggatctcctcagattgtagcgacggcgagtctgacagagagctgcccagctctgctactgagtccgacgggtcccccgttccatcctctcagccagcttttccagtccagatactgccatacttgtacctcgggtgcgctaaagactccactaatctcgatgtgttgggcaagtatggcattaagtacatcctcaacgtgacgccaaatcttcctaacgcattcgagcatggtggcgaatttacgtacaagcagattcccatatctgatcactggagtcaaaatttgtctcaatttttccctgaggcgatttcatttatagatgaggcccggagcaaaaagtgcggagtgctggtgcactgtctggccggtatttcccgatcagtgaccgtgacagtggcatatcttatgcagaagatgaacttgtccctgaacgatgcttacgacttcgtgaagcggaaaaagtccaatatctcccctaattttaactttatgggacagctgcttgatttcgaaagaactctgggactgagcagtccatgcgacaatcacgcgagttcagaacagctgtatttcagtactcccacaaatcacaatctctttcctctaaatactctcgaatccacatag

SEQ ID NO: 122345 - DNA, 1107 bp, Artificial Sequence
  derived and/or modified sequence
atgccctgcaagtctgctgagtggctgcaggaggagctggaggcccggggcggggccagcctgctgctgctggactgccggccccatgagctgtttgagagcagccacattgaaacagccatcaacctggccatccctggcctgatgctgcggcggctgaggaaaggaaacctgcccatccgcagcatcatccccaaccacgccgacaaggagagatttgccacccgctgcaaggccgccaccgtgctgctgtatgatgaggccacagctgagtggcagcctgagcccggggccccagcctctgtgctgggcctgctgctgcagaagctgagagatgatggctgccaggcctactacctgcagggcggcttcaacaagttccagacagagtacagcgagcactgtgagaccaacgtggacagcagcagcagccccagcagcagcccccccacctctgtgctgggcctgggcggcctgcgcatcagcagtgactgcagtgatggagagagtgaccgggagctgcccagcagcgccacagaaagtgatggcagccctgtgcccagcagccagcctgccttccctgtgcagatcctgccctacctgtacctgggctgtgccaaggacagcaccaacctggatgtgctgggcaagtatggcatcaagtacatcctgaatgtgacccccaacctgcccaatgcctttgagcacggcggggagttcacctacaagcagatccccatcagtgaccactggagccagaacctgagccagttcttccctgaggccatctccttcattgatgaggcccggagcaagaagtgtggggtgctggtgcactgcctggccggcatcagccgctctgtgacagtgacagtggcctacctgatgcagaagatgaacctgagcctgaatgatgcctatgactttgtgaagaggaagaagagcaacatcagccccaacttcaacttcatgggccagctgctggactttgagaggaccctgggcctgagcagcccctgtgacaaccacgccagcagcgagcagctgtacttcagcacccccaccaaccacaacctcttccccctgaacaccctggagagcacctag

SEQ ID NO: 122346 - DNA, 1260 bp, Artificial Sequence
  derived and/or modified sequence
atgaagaaccagctgcggggccccccagcccgggcccacatgagcaccagcggggctgctgctgctgggggcaccagggctggcagcgagcctggagctggcagcggcagcggggccggcactggagctggagctgccactggagctggggccatgccctgcaagtctgctgagtggctgcaggaggagctggaggcccggggcggggccagcctgctgctgctggactgccggccccatgagctgtttgagagcagccacatcgagacagccatcaacctggccatccctggcctgatgctgcggcggctgaggaagggcaacctgcccatccgcagcatcatccccaaccacgccgacaaggagagatttgccacccgctgcaaggccgccaccgtgctgctgtatgatgaggccacagctgagtggcagcctgagcccggggccccagcctctgtgctgggcctgctgctgcagaagctgagagatgatggctgccaggcctactacctgcagggcggcttcaacaagttccagacagagtacagcgagcactgtgagaccaacgtggacagcagcagcagccccagcagcagcccccccacctctgtgctgggcctgggcggcctgcgcatcagcagtgactgcagtgatggagagagtgaccgggagctgcccagcagcgccacagaaagtgatggcagccctgtgcccagcagccagcctgccttccctgtgcagatcctgccctacctgtacctgggctgtgccaaggacagcaccaacctggatgtgctgggcaagtatggcatcaagtacatcctgaatgtgacccccaacctgcccaatgcctttgaacatggaggagagttcacctacaagcagatccccatcagtgaccactggagccagaacctgagccagttcttccctgaggccatctccttcattgatgaggcccggagcaagaagtgtggggtgctggtgcactgcctggccggcatcagccgctctgtgacagtgacagtggcctacctgatgcagaagatgaacctgagcctgaatgatgcctatgactttgtgaagaggaagaagagcaacatcagccccaacttcaacttcatgggccagctgctggactttgagaggaccctgggcctgagcagcccctgtgacaaccacgccagcagcgagcagctgtacttcagcacccccaccaaccacaacctcttccccctgaacaccctggagagcacctag

SEQ ID NO: 122347 - DNA, 1107 bp, Artificial Sequence
  derived and/or modified sequence
atgccctgcaagagcgccgagtggctgcaggaggagctggaggccaggggaggagcgtccctcttattgttggactgtcggccacacgaattgttcgagtcctcccacatcgaaactgccatcaaccttgcaatacccgggttgatgctgagacggctgcgaaaagggaatctacccattaggagcatcatcccaaaccatgctgacaaggaacgcttcgcgacacggtgcaaggctgcaacggttctgctctacgacgaggcaacagcagagtggcagccggaacctggagcacccgccagcgtgctcgggctgctgctgcagaagctccgcgatgatggctgtcaagcttactacttgcagggcggctttaataagttccagaccgagtacagcgagcactgcgagactaatgttgactcttcaagttccccctcaagctcgccgcccactagtgtcctggggctcggcggtttaaggatctcctccgattgctccgatggtgagtctgaccgggagctgccctcttccgcgacggaatctgacggcagcccagtccctagcagtcaacctgccttccccgttcaaatactcccctatttatacctcgggtgtgccaaggattccaccaacctcgatgttcttgggaagtacgggatcaaatatattcttaatgtgaccccaaacctgcctaatgcttttgaacatggcggggaatttacatataaacagattcctatcagcgaccattggtcacaaaaccttagccagttttttcccgaagcaatctctttcatcgatgaggctcgctccaagaaatgcggtgtcctggtgcactgcctggcagggatctcaaggtcagtgacagtgacggtggcatacctgatgcagaagatgaatttgagcttaaacgacgcctacgatttcgtaaagcgcaaaaaaagtaacatctctcctaacttcaattttatgggtcaactcttggacttcgagaggacacttggcttgagctctccttgcgacaatcacgcctcttccgagcagttgtatttcagcaccccaactaatcataatctttttccactgaatacactggaatctacctag

SEQ ID NO: 122348 - DNA, 1260 bp, Artificial Sequence
  derived and/or modified sequence
atgaagaaccagctgcggggcccccccgcccgggcccacatgagcacgtctggggctgccgccgcgggaggaacccgcgccgggtcggagcctggagctggatctggcagcggggccggaacaggtgccggcgcggctacgggggctggcgccatgccctgtaagtccgccgagtggctgcaagaggagcttgaggcaagaggcggtgcctcactcctcttgcttgactgtagacctcacgagctattcgagagcagccacattgaaaccgctataaacctagcgatccctggtcttatgctgcgccgcctccggaaaggcaaccttccgattagaagtattatcccaaaccacgccgataaagagcgattcgctactcgctgtaaggctgccacagtgctcctctacgacgaagcgacagccgagtggcagccggagccaggcgcccctgccagcgtgctgggactgctgctgcagaagctaagggacgacgggtgtcaagcctactatctgcaaggaggattcaacaagttccagactgagtattcagagcattgcgaaaccaatgtcgatagcagctcctctccatcgagcagcccgcccacgagcgtgttggggctgggcggcttgcggatttcttccgattgctctgatggcgagagcgaccgggaacttccatcctccgctactgaatcagacggttcccctgttccttcaagccagcctgcctttccagtgcagatcctgccctatctgtacctaggatgcgccaaagattcgactaatctggatgtgctggggaagtatgggattaagtacatcctgaacgtgaccccgaatttgcccaacgcttttgagcacgggggcgagtttacctacaagcagattcccattagcgatcactggagtcaaaacttgagccagttttttccggaagcgatctctttcattgatgaggcgagaagtaagaagtgtggagtcctcgtgcactgtcttgctggtattagccggtccgtgacagtcactgtggcgtatctgatgcaaaagatgaacctgagcctgaacgacgcatacgactttgtcaaacgaaaaaagtcaaatatttctccaaacttcaatttcatgggccaactgcttgacttcgaacgcacattgggcctgtccagtccctgcgacaatcacgccagctctgaacagttgtatttctccacccctacgaatcacaatctctttcctctgaacactcttgagtccacgtag

SEQ ID NO: 122349 - DNA, 1107 bp, Artificial Sequence
  derived and/or modified sequence
atgccatgcaagagcgctgagtggctgcaggaggagcttgaggctaggggtggcgcttctttactgctgcttgattgccgaccacacgagctgttcgagtcaagtcacatcgagacagccatcaacctggcaattcccggtctgatgcttcggcgtttgcggaagggcaacctgcctattagaagtataattcccaatcatgcagataaagagaggttcgcgaccagatgtaaggctgctactgtgcttctctacgacgaggctactgctgagtggcagcctgagcctggtgcccctgcttcagtgttgggcctcctgctccaaaagttgcgtgatgatggatgtcaggcctactatctgcaaggtggctttaataaattccagactgagtattcagaacattgtgaaacgaatgtggactcgagtagtagtccctcaagcagccctccgacttctgtactgggactgggaggacttaggattagttccgattgttcagatggagagtccgacagagaacttccaagcagcgcaacagagtccgacggctcccccgtcccgtcttcccagcccgcttttcctgtccagatcctgccctacctgtacttagggtgtgcaaaagattctaccaatctcgacgtcttagggaaatacggcatcaaatatatcctgaacgtgacacccaatctgccaaacgcattcgagcatggaggggaattcacctacaagcagatccctatctcagaccactggtcacagaacttgagccagtttttccccgaagcaatatcattcattgacgaggctcggagtaaaaaatgcggcgtactggtacattgtctggctgggatcagccggagcgtgacggttactgtcgcgtatctgatgcaaaaaatgaacctttccctcaacgacgcttacgactttgtgaaacgtaaaaaatctaacatctcacctaatttcaacttcatgggacagttactcgatttcgaaagaacactcggcctgagctctccatgcgataaccacgcatcatctgaacagctctacttttccacaccaaccaatcacaatctgtttcccttgaatacactcgaatccacatag

SEQ ID NO: 122350 - DNA, 1260 bp, Artificial Sequence
  derived and/or modified sequence
atgaaaaatcaactccgaggtcccccagctcgggctcatatgtctacaagtggtgcggcagcagccggaggaacccgggcaggctcagaacccggagctggctccggcagcggcgcagggactggcgcaggggcagcgactggtgcgggagcgatgccctgcaagagcgctgagtggttgcaggaggagcttgaagcgaggggaggtgcaagcctgctattgctagattgcaggccccacgagcttttcgaaagctcccacatagaaaccgctatcaacctggcgatccccggtcttatgcttagaaggctgagaaagggaaatctgcccattagatccattatacctaaccatgccgacaaggaaaggttcgccaccagatgcaaggctgcaaccgtgctgctgtacgatgaggcaacagccgaatggcagcctgagccaggcgcacctgcctctgtgcttgggctactcctgcagaaactgcgcgacgacggatgtcaggcatactatctgcaagggggatttaacaaattccaaaccgagtactccgagcactgtgaaacaaatgtcgactcatccagtagcccctcgagcagcccgccaacaagtgttctggggctgggaggcctgcgcatctcctcagattgtagtgatggggagagtgatagagagcttccaagcagtgctaccgaaagtgatggctccccagtgccctctagccagcctgcgtttccggtgcagatcttgccttatctctacttgggttgcgccaaggactctaccaaccttgacgtcttgggcaagtatggaatcaagtacattcttaatgttacacccaatttacccaacgccttcgagcacggcggagaatttacatataagcagatccccattagcgatcactggtcacagaatctgtctcagttttttcccgaggctatttcctttatcgatgaagccagaagcaagaaatgtggcgttctggtgcattgtcttgctggcatctcaaggagcgtcactgtgacggtggcctacctgatgcagaaaatgaacctcagccttaatgatgcctatgatttcgtcaagcggaagaagagcaacatctctcctaattttaactttatggggcagctgctcgactttgaaaggacactgggcctgagctcgccatgtgataaccatgccagttcagaacaactgtatttttcaacccccacgaatcataatctattccccttgaatacactcgaaagcacatag

SEQ ID NO: 122351 - DNA, 1107 bp, Artificial Sequence
  derived and/or modified sequence
atgccctgcaagagcgccgagtggctgcaggaggagctggaggccagaggcggcgccagcctgctgctgctggactgcagaccccacgagctgttcgagagcagccacatcgagaccgccatcaacctggccatccccggcctgatgctgagaagactgagaaagggcaacctgcccatcagaagcatcatccccaaccacgccgacaaggagagattcgccaccagatgcaaggccgccaccgtgctgctgtacgacgaggccaccgccgagtggcagcccgagcccggcgcccccgccagcgtgctgggcctgctgctgcagaagctgagagacgacggctgccaggcctactacctgcagggcggcttcaacaagttccagaccgagtacagcgagcactgcgagaccaacgtggacagcagcagcagccccagcagcagcccccccaccagcgtgctgggcctgggcggcctgagaatcagcagcgactgcagcgacggcgagagcgacagagagctgcccagcagcgccaccgagagcgacggcagccccgtgcccagcagccagcccgccttccccgtgcagatcctgccctacctgtacctgggctgcgccaaggacagcaccaacctggacgtgctgggcaagtacggcatcaagtacatcctgaacgtgacccccaacctgcccaacgccttcgagcacggcggcgagttcacctacaagcagatccccatcagcgaccactggagccagaacctgagccagttcttccccgaggccatcagcttcatcgacgaggccagaagcaagaagtgcggcgtgctggtgcactgcctggccggcatcagcagaagcgtgaccgtgaccgtggcctacctgatgcagaagatgaacctgagcctgaacgacgcctacgacttcgtgaagagaaagaagagcaacatcagccccaacttcaacttcatgggccagctgctggacttcgagagaaccctgggcctgagcagcccctgcgacaaccacgccagcagcgagcagctgtacttcagcacccccaccaaccacaacctgttccccctgaacaccctggagagcacctag

SEQ ID NO: 122352 - DNA, 1260 bp, Artificial Sequence
  derived and/or modified sequence
atgaagaaccagctgagaggcccccccgccagagcccacatgagcaccagcggcgccgccgccgccggcggcaccagagccggcagcgagcccggcgccggcagcggcagcggcgccggcaccggcgccggcgccgccaccggcgccggcgccatgccctgcaagagcgccgagtggctgcaggaggagctggaggccagaggcggcgccagcctgctgctgctggactgcagaccccacgagctgttcgagagcagccacatcgagaccgccatcaacctggccatccccggcctgatgctgagaagactgagaaagggcaacctgcccatcagaagcatcatccccaaccacgccgacaaggagagattcgccaccagatgcaaggccgccaccgtgctgctgtacgacgaggccaccgccgagtggcagcccgagcccggcgcccccgccagcgtgctgggcctgctgctgcagaagctgagagacgacggctgccaggcctactacctgcagggcggcttcaacaagttccagaccgagtacagcgagcactgcgagaccaacgtggacagcagcagcagccccagcagcagcccccccaccagcgtgctgggcctgggcggcctgagaatcagcagcgactgcagcgacggcgagagcgacagagagctgcccagcagcgccaccgagagcgacggcagccccgtgcccagcagccagcccgccttccccgtgcagatcctgccctacctgtacctgggctgcgccaaggacagcaccaacctggacgtgctgggcaagtacggcatcaagtacatcctgaacgtgacccccaacctgcccaacgccttcgagcacggcggcgagttcacctacaagcagatccccatcagcgaccactggagccagaacctgagccagttcttccccgaggccatcagcttcatcgacgaggccagaagcaagaagtgcggcgtgctggtgcactgcctggccggcatcagcagaagcgtgaccgtgaccgtggcctacctgatgcagaagatgaacctgagcctgaacgacgcctacgacttcgtgaagagaaagaagagcaacatcagccccaacttcaacttcatgggccagctgctggacttcgagagaaccctgggcctgagcagcccctgcgacaaccacgccagcagcgagcagctgtacttcagcacccccaccaaccacaacctgttccccctgaacaccctggagagcacctag

SEQ ID NO: 122353 - DNA, 3231 bp, Artificial Sequence
  derived and/or modified sequence
gcggctggggcccgcgcggccggggcgccgtcccagggcagggctgcccggccccggccccgggccgcccgcgctccccatgaaaaaccagctccgcggccccccagcgcgggcgcacatgtcgacttcgggggcggcggcggctgggggcacccgggcggggtccgagcccggtgcggggtcggggtccggcgcaggcaccggggcgggcgcggcgacgggggcaggggccatgccctgcaagagcgccgagtggctgcaggaggagctggaggcgcgcggcggcgcgtccttgctgctgctcgactgccggccgcacgagctcttcgagtcgtcgcacatcgagacggccatcaacctggccatcccgggcctcatgttgcgccgcctgcgcaagggcaacctgcccatccgctccatcatccccaaccacgccgacaaggagcgcttcgccacgcgctgcaaggcggccaccgtgctgctctacgacgaggccacggccgagtggcagcccgagcccggcgctcccgcctccgtgctcggcctgctcctacagaagctgcgcgacgacggctgccaggcctactacctccaaggtggtttcaacaagtttcaaacagagtactctgagcactgcgagaccaacgtggacagctcttcctcgccgagcagctcgccacccacctcagtgctgggcctggggggcctgcgcatcagctctgactgctccgacggcgagtcggaccgagagctgcccagcagtgccaccgagtcagacggcagccctgtgccatccagccaaccagccttccctgtccagatcctgccctacctctacctcggctgcgccaaggactccaccaacctggacgtgctcggcaagtatggcatcaagtatatcctcaatgtcacacccaacctacccaacgccttcgagcacggcggcgagttcacctacaagcagatccccatctctgaccactggagccagaacctctcccagttcttccctgaggccatcagcttcattgacgaagcccgctccaagaagtgtggtgtcctggtgcactgcctggcaggcatcagccgctcagtgacggtcactgtggcctatctgatgcagaagatgaacctgtcactcaacgacgcctacgactttgtcaagaggaaaaagtccaacatctcgcccaacttcaacttcatggggcagctgctggactttgagcggacgctggggctaagcagcccgtgcgacaaccacgcgtcgagtgagcagctctacttttccacgcccaccaaccacaacctgttcccactcaatacgctggagtccacgtgaggcctggtgcacggggggcatggcaccaggcccctgctcggctctccacagggctaggtgggagagcccaagcccgccacctctggcctgaggaacccccagatgtcacctgtgcccagaggcccaggctgatcggtgtcggagcgcccctcaccatccttgggggcagggcccgcaggcaaggtctcccactgcagggcttgctggagaggcctcggctcttggacacgtggctttgggcgtccaccagggcctcatcctgtccaggacgctcctttctgctgacagcccagccagtttggctgttttttaaagacacatccacggacctgagtttactttttacttttggcaggtaaatccaagctccctggagcacaaagagtgtttgagctcttcttgatttttcttttttttttttttttttaacaaaaagtgttattttcaggctacatgcaacagtggattgtataacccagtatttcatccctttcctgatcctgcaagagagagaaatgttcagttttgtttttcgttcaatttcaaaaagcaagtatcgtgtttgtttttgtttttgttttttaatggaaaagacagacgccatgttgaccttgaccaaatgcgttttgcacatgtgtgaagcctctgtttcctcagcgggcccttcttgaaggggtggcttactgctcttcaggtattgggacccccagtcgtgccgcctcccacccttggcccagtctgacttagctctgcattcgcctgtgatgactgctgcaagttgtgattggtgggctggatggtggtctttgcattttctgccgtctcatccatccctctggtggtccctgcagacctccctgaggcagaaggtggggaccctggggccctgccgctgtcccccaggaggtgggccgcagggggctgccaggcagtagcattagccctctggggtcagcccctaagaaggcctgggctctgagcccttttatatacttagccactacttctgtctgtctgtctgtctctctctcttcctctccctctctctctttctctctctccctctctctctctttctttctctctccccccctccctctctcttcctttcctctctcttgttgtaactgggagtggaggcccagtggctggggagacattaggtggtggggcccagcccgacctccaggttcttccttctccctagctgttgctttggtctggccactcccagcccccttgtccccttggaagcttgccctgccctcatcttgcccatgccttctactgccaggagacttgcacccatttcaaccctagggcgggggcaagtggggcaaggatggaccagcagaaggggggtaaggctctgttcacttccccctgcctccacagaacgaagccacggattccgttatcttcctccagttttgttccttctccagcctcagttccaccaggtgtcaggactgcatgggggcctggggcaggcagaggagtcaggccagggtccctgacggagcagcactcagcatgtgagtgaggccacagaaaaactctgccccactgcttcttacctcacgggggtggctttcagggattctttagcgcagcagattaaaatcttgccacagtcgagaaattgacaacaagcttccatgctgtacatggttctctttttctctcttttatttttaaaaagaaaacccagaaagatgtaccagatttgtgtaaatgagggtatgccagaaggtggccagttttgctttatgatcttatgaaggaagatttgtgaccctacgtatatatatacacacacatacatatatatatatatcccgaaccaacaacgggactttgtttatattgcaaataaatattattttttcttt

SEQ ID NO: 122354 - DNA, 3340 bp, Artificial Sequence
  derived and/or modified sequence
cgcggtgcgcgcggagggccgggcgggcgggcgggacggaggccgggaggccgggaggccggggcggcgggcgcgcagctcggcgggaggcgggcgcccggagacgcggctggggcccgcgcggccggggcgccgtcccagggcagggctgcccggccccggccccgggccgcccgcgctccccatgaaaaaccagctccgcggccccccagcgcgggcgcacatgtcgacttcgggggcggcggcggctgggggcacccgggcggggtccgagcccggtgcggggtcggggtccggcgcaggcaccggggcgggcgcggcgacgggggcaggggccatgccctgcaagagcgccgagtggctgcaggaggagctggaggcgcgcggcggcgcgtccttgctgctgctcgactgccggccgcacgagctcttcgagtcgtcgcacatcgagacggccatcaacctggccatcccgggcctcatgttgcgccgcctgcgcaagggcaacctgcccatccgctccatcatccccaaccacgccgacaaggagcgcttcgccacgcgctgcaaggcggccaccgtgctgctctacgacgaggccacggccgagtggcagcccgagcccggcgctcccgcctccgtgctcggcctgctcctacagaagctgcgcgacgacggctgccaggcctactacctccaaggtggtttcaacaagtttcaaacagagtactctgagcactgcgagaccaacgtggacagctcttcctcgccgagcagctcgccacccacctcagtgctgggcctggggggcctgcgcatcagctctgactgctccgacggcgagtcggaccgagagctgcccagcagtgccaccgagtcagacggcagccctgtgccatccagccaaccagccttccctgtccagatcctgccctacctctacctcggctgcgccaaggactccaccaacctggacgtgctcggcaagtatggcatcaagtatatcctcaatgtcacacccaacctacccaacgccttcgagcacggcggcgagttcacctacaagcagatccccatctctgaccactggagccagaacctctcccagttcttccctgaggccatcagcttcattgacgaagcccgctccaagaagtgtggtgtcctggtgcactgcctggcaggcatcagccgctcagtgacggtcactgtggcctatctgatgcagaagatgaacctgtcactcaacgacgcctacgactttgtcaagaggaaaaagtccaacatctcgcccaacttcaacttcatggggcagctgctggactttgagcggacgctggggctaagcagcccgtgcgacaaccacgcgtcgagtgagcagctctacttttccacgcccaccaaccacaacctgttcccactcaatacgctggagtccacgtgaggcctggtgcacggggggcatggcaccaggcccctgctcggctctccacagggctaggtgggagagcccaagcccgccacctctggcctgaggaacccccagatgtcacctgtgcccagaggcccaggctgatcggtgtcggagcgcccctcaccatccttgggggcagggcccgcaggcaaggtctcccactgcagggcttgctggagaggcctcggctcttggacacgtggctttgggcgtccaccagggcctcatcctgtccaggacgctcctttctgctgacagcccagccagtttggctgttttttaaagacacatccacggacctgagtttactttttacttttggcaggtaaatccaagctccctggagcacaaagagtgtttgagctcttcttgatttttcttttttttttttttttttaacaaaaagtgttattttcaggctacatgcaacagtggattgtataacccagtatttcatccctttcctgatcctgcaagagagagaaatgttcagttttgtttttcgttcaatttcaaaaagcaagtatcgtgtttgtttttgtttttgttttttaatggaaaagacagacgccatgttgaccttgaccaaatgcgttttgcacatgtgtgaagcctctgtttcctcagcgggcccttcttgaaggggtggcttactgctcttcaggtattgggacccccagtcgtgccgcctcccacccttggcccagtctgacttagctctgcattcgcctgtgatgactgctgcaagttgtgattggtgggctggatggtggtctttgcattttctgccgtctcatccatccctctggtggtccctgcagacctccctgaggcagaaggtggggaccctggggccctgccgctgtcccccaggaggtgggccgcagggggctgccaggcagtagcattagccctctggggtcagcccctaagaaggcctgggctctgagcccttttatatacttagccactacttctgtctgtctgtctgtctctctctcttcctctccctctctctctttctctctctccctctctctctctttctttctctctccccccctccctctctcttcctttcctctctcttgttgtaactgggagtggaggcccagtggctggggagacattaggtggtggggcccagcccgacctccaggttcttccttctccctagctgttgctttggtctggccactcccagcccccttgtccccttggaagcttgccctgccctcatcttgcccatgccttctactgccaggagacttgcacccatttcaaccctagggcgggggcaagtggggcaaggatggaccagcagaaggggggtaaggctctgttcacttccccctgcctccacagaacgaagccacggattccgttatcttcctccagttttgttccttctccagcctcagttccaccaggtgtcaggactgcatgggggcctggggcaggcagaggagtcaggccagggtccctgacggagcagcactcagcatgtgagtgaggccacagaaaaactctgccccactgcttcttacctcacgggggtggctttcagggattctttagcgcagcagattaaaatcttgccacagtcgagaaattgacaacaagcttccatgctgtacatggttctctttttctctcttttatttttaaaaagaaaacccagaaagatgtaccagatttgtgtaaatgagggtatgccagaaggtggccagttttgctttatgatcttatgaaggaagatttgtgaccctacgtatatatatacacacacatacatatatatatatatcccgaaccaacaacgggactttgtttatattgcaaataaatattattttttctttaaaa

SEQ ID NO: 122355 - protein, 164 aa, Artificial Sequence
  derived and/or modified sequence
MPCSEETPAISPSKRARPAEVGGMQLRFARLSEHATAPTRGSARAAGYDLYSAYDYTIPPMEKAVVKTDIQIALPSGCYGRVAPRSGLAAKHFIDVGAGVIDEDYRGNVGVVLFNFGKEKFEVKKGDRIAQLICERIFYPEIEEVQALDDTERGSGGFGSTGKN

SEQ ID NO: 122356 - DNA, 495 bp, Artificial Sequence
  derived and/or modified sequence
atgccctgctccgaggaaacgcctgctattagcccctctaaaagagcgcggccggcagaagtcgggggaatgcagctcaggttcgcccgactgtcagaacacgcgacagctcccacccgtggcagtgctagggctgccggatatgacctgtactccgcttacgattatactattccccctatggagaaggccgtcgtgaaaactgatatccaaattgctcttcctagcggttgttatggtcgggtggcgccccgaagcggattagctgctaagcactttatagatgtaggggcaggcgtaattgacgaggattacaggggaaacgtcggcgtggtactattcaacttcgggaaagaaaagttcgaggttaaaaagggcgaccgaatcgcgcaactgatctgtgagaggatcttttaccccgaaatcgaggaagtgcaggctctggatgacaccgagcgcgggagcggcggctttggttcgaccggtaagaattag

SEQ ID NO: 122357 - DNA, 495 bp, Artificial Sequence
  derived and/or modified sequence
atgccctgcagcgaggagaccccagccatcagccccagcaagagggcccggcctgctgaggtgggcggcatgcagctgcgctttgcccggctgtctgagcacgccacagcccccacccggggcagcgcccgggccgccggctatgacctgtacagcgcctatgactacaccatcccccccatggagaaggctgtggtgaagacagacatccagatcgccctgcccagcggctgctacggccgggtggcccccaggagcggcctggccgccaagcacttcattgatgtgggcgctggggtgattgatgaggactacagaggaaatgtgggcgtggtgctcttcaactttgggaaggagaagtttgaggtgaagaagggggacagaattgcccagctgatctgtgagcgcatcttctacccagaaattgaggaggtgcaggccctggatgacacagagcggggcagcggcggcttcggcagcacaggcaagaactag

SEQ ID NO: 122358 - DNA, 495 bp, Artificial Sequence
  derived and/or modified sequence
atgccctgcagcgaggagacccccgccatcagccccagcaagcgggcaagaccggcagaagtgggcggaatgcagcttcgctttgctcggttgagcgagcatgccactgccccgacgaggggtagtgccagggcggcgggctacgatttatacagtgcttacgattacaccatcccaccaatggaaaaggccgttgtgaagactgacattcagatcgcgctgccttccggatgctacgggagagttgctcctagatccgggctggcagccaagcattttatcgacgttggagccggagtaatagacgaggattaccgcgggaacgttggtgtagtcctcttcaatttcggtaaagagaagtttgaggtcaagaaaggtgacaggatcgcacagttaatctgcgaaaggatcttctatccggaaatcgaggaagtgcaagcacttgacgacactgagaggggttccggtggcttcggatctaccggaaagaactag

SEQ ID NO: 122359 - DNA, 495 bp, Artificial Sequence
  derived and/or modified sequence
atgccctgcagcgaggaaacccccgctatctccccatccaagagagctcggccagccgaggtgggcggtatgcagctaaggtttgccagactaagtgaacatgctacggcccctacacggggatcagcacgtgccgctggctacgacctgtattctgcgtatgactacaccatcccccctatggagaaagcagtggtcaagaccgacattcagattgcgttgccatcaggctgttacgggagggttgcccctaggtcaggacttgctgcaaagcactttatcgatgttggggcaggtgtcattgacgaggattataggggcaatgttggcgtggtactgtttaattttggcaaggagaaattcgaggtcaagaagggagaccggatcgcccaactgatttgtgaacggatattctatccagagatcgaagaggtccaagccctggatgatacggagcgagggtctgggggattcggttccactggtaagaattag

SEQ ID NO: 122360 - DNA, 495 bp, Artificial Sequence
  derived and/or modified sequence
atgccctgcagcgaggagacccccgccatcagccccagcaagagagccagacccgccgaggtgggcggcatgcagctgagattcgccagactgagcgagcacgccaccgcccccaccagaggcagcgccagagccgccggctacgacctgtacagcgcctacgactacaccatcccccccatggagaaggccgtggtgaagaccgacatccagatcgccctgcccagcggctgctacggcagagtggcccccagaagcggcctggccgccaagcacttcatcgacgtgggcgccggcgtgatcgacgaggactacagaggcaacgtgggcgtggtgctgttcaacttcggcaaggagaagttcgaggtgaagaagggcgacagaatcgcccagctgatctgcgagagaatcttctaccccgagatcgaggaggtgcaggccctggacgacaccgagagaggcagcggcggcttcggcagcaccggcaagaactag

SEQ ID NO: 122361 - DNA, 1935 bp, Artificial Sequence
  derived and/or modified sequence
agccagaactgtggactcgtcccggggaggggcggtgggtggggcggggctggcgggaaatttcggttttggcgcgctccctgcggcgacgctcatcgtgcgctctcctcttcccccggtggtctcctcgctcgccttctggctctgccatgccctgctctgaagagacacccgccatttcacccagtaagcgggcccggcctgcggaggtgggcggcatgcagctccgctttgcccggctctccgagcacgccacggcccccacccggggctccgcgcgcgccgcgggctacgacctgtacagtgcctatgattacacaataccacctatggagaaagctgttgtgaaaacggacattcagatagcgctcccttctgggtgttatggaagagtggctccacggtcaggcttggctgcaaaacactttattgatgtaggagctggtgtcatagatgaagattatagaggaaatgttggtgttgtactgtttaattttggcaaagaaaagtttgaagtcaaaaaaggtgatcgaattgcacagctcatttgcgaacggattttttatccagaaatagaagaagttcaagccttggatgacaccgaaaggggttcaggaggttttggttccactggaaagaattaaaatttatgccaagaacagaaaacaagaagtcatacctttttcttaaaaaaaaaaaaaaagtttttgcttcaagtgttttggtgttttgcacttctgtaaacttactagctttaccttctaaaagtactgcattttttacttttttttatgatcaaggaaaagatcattaaaaaaaaacacaaagaagtttttctttgtgtttggatcaaaaagaaactttgtttttccgcaattgaaggttgtatgtaaatctgctttgtggtgacctgatgtaaacagtgtcttcttaaaatcaaatgtaaatcaattacagattaaaaaaaaaagcctgtatttaactcatatgatctcccttcagcaacttattttgctttaattgctttaaatcttaagcaatattttttattcagtaaacaaattctttcacaaggtacaaaatcttgcataagctgaactaaaataaaaatgaaaaggagagattaaaggtattccttgttcttcccttctcttcactagtctaaaaacttctttttaatcttaagattctttgtgatgagggtgagaaaaagaatcctcagtttatttttccactattaatctttcttttgataaatcctctattgactgggtagaggtatgtttgtgaaagacatgtaacttggggatttgttactttaggtttgttcccttgaatttcatctcatcaggcaaattgtactagttgtagttacgagttttccctcagtgaagtagcaataggctgtaatcaagaaaatatgccatttatagagataagataaatgaaataatacttcagccaccaggtttttctgtctcacatacataagcagcatttcattgcagatatgggactgattctgtggcttaccttgattaacatcttttggaagttttgctagtgtgctttcctttctttactatgtttctcagattcctttgtatcagggttttgggtgtcacttaggttttgtccatcagattctgtgagacaccaggcatcgttttgaggatgtgggttatacacatggagtgcttctggaactatcagcccacttgaccacccagtttgtggaagcacaggcaagagtgttcttttctggtgattctccaggccatttaataccctgcaatgtaattgtccctctgtggctcacatttcattagtgagccatgaaatcaactcagtgggacatagccagcatttttgcataccaggttgggctataaaatatttctgttgtcaataaattttaaatgttttcctgctaaa

SEQ ID NO: 122362 - DNA, 769 bp, Artificial Sequence
  derived and/or modified sequence
ggctgcgactgcttccgaggtcatgttcccaggacgggcgcgtcttcagggtggaagcctggcgcacgtccggagagacacccgccatttcacccagtaagcgggcccggcctgcggaggtgggcggcatgcagctccgctttgcccggctctccgagcacgccacggcccccacccggggctccgcgcgcgccgcgggctacgacctgtacagtgcctatgattacacaataccacctatggagaaagctgttgtgaaaacggacattcagatagcgctcccttctgggtgttatggaagagtggctccacggtcaggcttggctgcaaaacactttattgatgtaggagctggtgtcatagatgaagattatagaggaaatgttggtgttgtactgtttaattttggcaaagaaaagtttgaagtcaaaaaaggtgatcgaattgcacagctcatttgcgaacggattttttatccagaaatagaagaagttcaagccttggatgacaccgaaaggggttcaggaggttttggttccactggaaagaattaaaatttatgccaagaacagaaaacaagaagtcatacctttttcttaaaaaaaaaaaaaaagtttttgcttcaagtgttttggtgttttgcacttctgtaaacttactagctttaccttctaaaagtactgcattttttacttttttttatgatcaaggaaaagatcattaaaaaaaaacacaaagaagtttttctttgtgtttggatcaaaaagaa

SEQ ID NO: 122363 - protein, 465 aa, Artificial Sequence
  derived and/or modified sequence
MRKGIQPALEQYLVTAGGGEGAAVVAAAAAASMDKRALLASPGFAAAAAAAAAPGAYIQILTTNTSTTSCSSSLQSGAVAAGPLLPSAPGAEQTAGSLLYTTPHGPSSRAGLLQQPPALGRGGSGGGGGPPAKRRLELGESGHQYLSDGLKTPKGKGRAALRSPDSPKTPKSPSEKTRYDTSLGLLTKKFIQLLSQSPDGVLDLNKAAEVLKVQKRRIYDITNVLEGIHLIKKKSKNNVQWMGCSLSEDGGMLAQCQGLSKEVTELSQEEKKLDELIQSCTLDLKLLTEDSENQRLAYVTYQDIRKISGLKDQTVIVVKAPPETRLEVPDSIESLQIHLASTQGPIEVYLCPEETETHSPMKTNNQDHNGNIPKPASKDLASTNSGHSDCSVSMGNLSPLASPANLLQQTEDQIPSNLEGPFVNLLPPLLQEDYLLSLGEEEGISDLFDAYDLEKLPLVEDFMCS

SEQ ID NO: 122364 - DNA, 1398 bp, Artificial Sequence
  derived and/or modified sequence
atgagaaaaggcattcagccagcactggaacagtacctcgttactgctggtgggggtgaaggggctgctgtagtagcagctgccgccgcagcgtctatggataaacgagcacttctggcctcccccggattcgctgcagctgccgctgctgctgcagctccgggtgcatacattcagatcttaaccacgaacacctctactacgtcctgcagttccagtcttcagtcaggagctgttgccgcagggcccctgctcccatcagccccaggagccgagcaaaccgctggaagtctgctctacaccaccccccacggaccgtctagtagggctggtctactccagcagcctccagccctgggtcgcggcggttctggaggtggaggcggcccacctgccaagcgtcggctggaactgggagagtcagggcaccaatatctgagcgacggcctgaagactccaaagggtaaggggcgggccgctctgcgatccccagattccccaaagacacctaagagcccatctgaaaagactcggtatgacacttcacttggtctgctgaccaaaaagtttatccagttactgagccagagccccgacggggtcctggatctgaataaagcggctgaagtgctcaaggtccagaagagaagaatttatgatattaccaacgtgttggagggtattcatctgataaagaagaagtcaaaaaacaacgttcagtggatggggtgctctctctcggaagatggggggatgttggcccagtgccaggggttaagcaaagaagtgacagagcttagtcaggaggagaagaagctggatgagctgattcaaagttgtacactagacttgaagctgctcaccgaagactctgaaaaccagcgtctggcttacgtcacataccaggacataagaaaaattagcggcctgaaggatcaaacggtcatcgtcgtgaaggcgccaccagagactcggctggaggtccctgattctattgaatcgttgcagattcacctggcctcaactcaaggacccatcgaagtgtacctgtgcccagaggaaacagaaacacatagcccaatgaagacaaataaccaggatcacaatggtaatatcccaaagccagccagcaaagatctcgcttccactaattccgggcatagcgattgtagcgtgagcatgggcaacctgtctccccttgcatctccagctaatcttttgcagcagaccgaggatcaaatcccatccaaccttgagggccctttcgtgaatttgcttcctcccctgttgcaggaggattatttattgagcttgggagaggaggaagggatttctgacctatttgacgcatacgaccttgagaagctcccattagtggaagattttatgtgttcctag

SEQ ID NO: 122365 - DNA, 1398 bp, Artificial Sequence
  derived and/or modified sequence
atgaggaagggcatccagcctgccctggagcagtacctggtgacagctgggggcggggagggcgctgctgtggtggccgctgctgctgctgcctccatggacaagagggccctgctggccagccctggctttgctgctgctgctgctgctgctgctgcccctggggcctacatccagatcctgaccaccaacaccagcaccaccagctgcagcagcagcctgcagagcggggctgtggccgccggccccctgctgcccagcgcccctggagctgagcagacagctggcagcctgctgtacaccaccccccacggccccagcagccgggccggcctgctgcagcagcccccagccctgggccggggcggcagcggcggcggcggcggccccccagccaagaggcggctggagctgggggagagcggccaccagtacctgagtgatggcctgaagacccccaagggcaagggccgggccgccctgcggagcccagacagccccaagacccccaagagccccagcgagaagaccaggtatgacaccagcctgggcctgctgaccaagaagttcatccagctgctgagccagagcccagatggagtgctggacctgaacaaggctgctgaggtgctgaaggtgcagaagaggcgcatctatgacatcaccaacgtgctggagggcatccacctgatcaagaagaagagcaagaacaacgtgcagtggatgggctgcagcctgtctgaagatggcggcatgctggcccagtgccagggcctgagcaaggaggtgacagagctgagccaggaggagaagaagctggatgagctgatccagagctgcaccctggacctgaagctgctgacagaagattctgagaaccagaggctggcctacgtgacctaccaggacatcaggaagatcagcggcctgaaggaccagaccgtcatcgtggtgaaggcccctcctgagacccggctggaggtgcctgacagcattgagagcctgcagatccacctggccagcacccagggccccatcgaggtgtacctgtgcccagaggagacagagacccacagccccatgaagaccaacaaccaggaccacaatggaaacatccccaagccagccagcaaggacctggccagcaccaacagcggccacagcgactgcagcgtgtccatgggcaacctgagccccctggccagccctgccaacctgctgcagcagacagaggaccagatccccagcaacctggagggcccctttgtgaacctgctgccccccctgctgcaggaggactacctgctgagcctgggggaggaggagggcatcagtgacctgtttgatgcctatgacctggagaagctgcccctggtggaggacttcatgtgcagctag

SEQ ID NO: 122366 - DNA, 1398 bp, Artificial Sequence
  derived and/or modified sequence
atgcggaagggcatccagcccgccctggagcagtacctggtgaccgccggcggtggtgagggtgcagccgttgtcgctgctgccgcagctgcaagtatggataaaagggctctcctggcctccccgggcttcgctgccgcagctgccgccgccgccgcaccgggggcctacattcagatcctgactacgaacaccagtacgacttcctgctcatccagcctgcagtcgggcgctgtggcagccggacctctcctgccgtccgcccctggtgctgaacaaactgccgggtcgctattatacactacaccccatggcccgagcagtagggccggattgctgcagcaacccccggcgttgggacgcggcggtagtggcggtggaggaggcccacctgcaaaacgccgactggagctcggtgagtccggacatcagtacttatcagatggcctgaaaacccctaagggaaaagggcgtgccgcattgcggagccctgactcacccaaaacgccaaagtcacccagtgaaaaaaccaggtatgacacatcactgggattgctgaccaagaagtttatccaattactttcacagtctcccgacggtgtcctcgatctgaacaaagcagcagaagtcctgaaagtccagaagcgtcggatctacgatattactaatgtgctagaaggtatccacctgattaagaagaagtccaagaataacgtccaatggatgggctgttctctgagcgaggacggagggatgctggctcagtgccaaggattaagtaaggaagtaactgaattgtcgcaggaagagaaaaagttggacgaactgatccaatcttgcacccttgacctcaaactcctgaccgaagactcggagaaccaacggctcgcgtacgttacctaccaggatataaggaagatatcaggcttgaaggaccagaccgtgatcgtggtgaaggctcctcctgaaacgcggctggaggttcccgattccatcgaaagcctccagatccatctcgccagcacacagggacccattgaggtttatctgtgtcccgaagagacggagactcatagtcccatgaaaacaaataatcaggatcataacggaaacattccaaagcccgctagtaaggatttggcgtccacaaactccggccacagtgactgctctgtatccatggggaacttgtctccactggctagcccggcaaatctgctacaacaaaccgaagaccagatcccatcaaaccttgagggaccattcgtcaacttgttgcctcccttgctgcaggaggactatctgctgagcctgggcgaggaagagggtatcagcgatcttttcgatgcatatgatctggaaaaactccccctcgtcgaagattttatgtgttcctag

SEQ ID NO: 122367 - DNA, 1398 bp, Artificial Sequence
  derived and/or modified sequence
atgcgtaaaggcatacaaccggctttagaacagtacctggtgactgccggtgggggagagggtgccgcagttgtggctgctgccgctgccgcaagtatggataaacgcgctctactagctagtcctggtttcgcggctgcggctgccgcagccgctgcgccaggtgcttatatccaaatactgacaactaatacctccacgacctcttgttccagctcattgcagtcaggcgctgtggcagccggaccgttactgcccagtgccccaggagccgaacagaccgccggatctcttctgtacacaacaccacacggtcccagttcgagggcaggcctgctccagcagcccccagccttaggccgtgggggttccggcggagggggaggacctccggctaaacgcaggctggagctcggagagtccgggcatcagtatcttagcgatggactgaaaacacctaaagggaagggcagagccgcactgaggagcccagactctcctaagacacccaaaagcccttccgagaagactcgctatgacacaagcttgggcttgctgacgaagaagttcatccagctgctgtctcaatcacccgacggcgtgctggatttgaacaaggccgctgaggttttaaaagtacagaaacgcaggatctacgatatcaccaacgtgttagaaggaattcacctcataaagaagaaatctaagaataacgttcagtggatgggctgcagcctgtctgaggatggaggaatgcttgctcaatgccaaggactgtccaaagaggtgacagaattgtctcaggaggaaaagaagttggacgagctcattcaatcatgtactctcgatctgaaactcctcactgaggattcagagaatcagaggctggcatatgttacgtaccaggacatccgcaaaatatctgggctgaaggaccagacagtgatcgtcgtcaaagcaccccctgaaacgcgtctcgaggtgccggactccattgagtcattacaaatacaccttgcaagtacccagggccctatcgaggtttacctttgccctgaggaaaccgagactcactctcccatgaagactaacaaccaagatcacaatggcaatattcccaaacctgccagcaaggatctggcgtcaacaaatagcgggcattccgactgttccgtgagcatgggcaatctcagtcccctggcttctcccgcaaacctcctgcagcagacagaagaccaaatccctagcaacctggagggacccttcgtgaacctcctccctcccctgctccaggaggattatctccttagcctgggtgaggaggaaggaatatccgatctgtttgacgcgtacgacctggagaagttgccgttagtcgaagacttcatgtgttcctag

SEQ ID NO: 122368 - DNA, 1398 bp, Artificial Sequence
  derived and/or modified sequence
atgagaaagggcatccagcccgccctggagcagtacctggtgaccgccggcggcggcgagggcgccgccgtggtggccgccgccgccgccgccagcatggacaagagagccctgctggccagccccggcttcgccgccgccgccgccgccgccgccgcccccggcgcctacatccagatcctgaccaccaacaccagcaccaccagctgcagcagcagcctgcagagcggcgccgtggccgccggccccctgctgcccagcgcccccggcgccgagcagaccgccggcagcctgctgtacaccaccccccacggccccagcagcagagccggcctgctgcagcagccccccgccctgggcagaggcggcagcggcggcggcggcggcccccccgccaagagaagactggagctgggcgagagcggccaccagtacctgagcgacggcctgaagacccccaagggcaagggcagagccgccctgagaagccccgacagccccaagacccccaagagccccagcgagaagaccagatacgacaccagcctgggcctgctgaccaagaagttcatccagctgctgagccagagccccgacggcgtgctggacctgaacaaggccgccgaggtgctgaaggtgcagaagagaagaatctacgacatcaccaacgtgctggagggcatccacctgatcaagaagaagagcaagaacaacgtgcagtggatgggctgcagcctgagcgaggacggcggcatgctggcccagtgccagggcctgagcaaggaggtgaccgagctgagccaggaggagaagaagctggacgagctgatccagagctgcaccctggacctgaagctgctgaccgaggacagcgagaaccagagactggcctacgtgacctaccaggacatcagaaagatcagcggcctgaaggaccagaccgtgatcgtggtgaaggccccccccgagaccagactggaggtgcccgacagcatcgagagcctgcagatccacctggccagcacccagggccccatcgaggtgtacctgtgccccgaggagaccgagacccacagccccatgaagaccaacaaccaggaccacaacggcaacatccccaagcccgccagcaaggacctggccagcaccaacagcggccacagcgactgcagcgtgagcatgggcaacctgagccccctggccagccccgccaacctgctgcagcagaccgaggaccagatccccagcaacctggagggccccttcgtgaacctgctgccccccctgctgcaggaggactacctgctgagcctgggcgaggaggagggcatcagcgacctgttcgacgcctacgacctggagaagctgcccctggtggaggacttcatgtgcagctag

SEQ ID NO: 122369 - DNA, 4744 bp, Artificial Sequence
  derived and/or modified sequence
aaataataaagaaattgaaaacaatacattaatataccataacactaaaaagagcaggagcgagagatgagaaagggaatccagcccgctctggagcagtacctggtgaccgccgggggtggggagggggcggctgtcgtcgccgccgccgctgcagcctccatggacaaaagggcactgctagccagccccggcttcgccgccgccgccgccgctgccgccgccccgggcgcgtacatccagatcctcaccacgaacacttccaccacctcctgttcctcctccctccaaagcggcgccgtagccgccggccccctcctccccagtgcccccggcgcggagcagaccgccggcagcctcctctacaccacgccgcacggaccctccagcagagccgggctgctgcagcagccaccagcgctgggacgcggcggcagcggcggcggcggcggccctccggcaaagcgaaggctggagctaggagaaagcggtcatcagtacctctcagatggtttaaaaacccccaagggcaaaggaagagctgcactacgaagtccagatagtccaaaaactccaaaatctccctcagaaaaaacgcggtatgatacgtctcttggtctgctcaccaagaagttcattcagctcctgagccagtcacccgatggggtattggatttgaacaaggcagcagaagtgctaaaagtgcaaaagagaaggatttatgatatcaccaacgttctggaaggcatccacctcattaagaagaagtctaaaaacaacgtccaatggatgggctgcagtctgtctgaggatgggggcatgctggcccagtgtcaaggcctgtcaaaagaagtgaccgagctcagtcaggaagagaagaaattagatgaactgatccaaagctgcaccctggacctcaaactgttaaccgaggattcagagaatcaaaggttagcttatgttacatatcaagatattcgaaaaattagtggccttaaagaccaaactgttatagttgtgaaagcccctccagaaacaagacttgaagtgcctgactcaatagagagcctacaaatacatttggcaagtacccaagggcccattgaggtttacttatgtccagaagagactgaaacacacagtccaatgaaaacaaacaaccaagaccacaatgggaatatccctaaacccgcttccaaagacttggcttcaaccaactcaggacatagcgattgctcagtttctatgggaaacctttctcctctggcctccccagccaacctcttacagcagactgaggaccaaattccttccaacctagaaggaccgtttgtgaacttactgcctcccctgctgcaagaggactatctcctgagcctcggggaggaggaaggcatcagcgatctcttcgatgcttacgatttggaaaagctcccactggtggaagacttcatgtgtagttgattatgcttcgtgtgaactctccttaaaaaccgatatttttttatcatggaaccagaacatctgtcatgcagtgttgtcccttcctaccttcttcctccaagagagtatcatgaagtaaactacaaacttcagaagaaagctgacattttaatgaattttttaaaaaattaataaacaaattgtctaaacgcacagttgcaggctcccttgggaaagccctgctttgctccaggctccaagatctcctggctaagtcagcaagtgagaaaatgtgcaatcaggtgtctctcaccccgaattgtccttcctccttcctccccggattggcttgctgtgcctgacggatgggctgtagaatggggtctggccacctggcctgctgggaaacagcaatcttccttaatagcatttcaagccgtgccttctccgcagaatgcatgtctttgaggtctgctaatatggaatggaactgcagcaaatgcaaacttgaagtcatgcaaaagtatgaaatggatttcttcagctcttcttaggaatatttaaattactgtcataattcagtttaagctatgaactgtgtgtcccagtaggaggtcaagaaaacctccacagccttctggatgaagaacctgttttcaaatatacttgttgcagatacagaagactagtagagttctgccactctaagctgttgtggattttcctgtctccatgaaccactcccattcccccgtccccaatgtgtttgtgagtttccagttgatttgtagcaaatgcctacttagttctttgtggattgttctagacttttaatttttttagctgccatttaagcattcctgtggcacccatcaccatttcaatttaattgtttactttgaagcggtttttgcaaattcatattacttaagcagagggagagaacctctactgatcagagcatctaaacctgtgtgatctaaggtttatcagcctctgcaaggagctttgtcccatcgtgcttccattcccaggagggggagcttggagcgagtcagtcctggggcttgctgacatgggtggcccattggaaaggagaaccaggtcagatgatgtaacagccccaaggagcagcaggcatgggtccctccatccttgggcttcccgggcccctgtgacaggggaaagggctctcttacaccgcactcagggagaccacttctcaggatggggtcagatggagagacctctagggagaaagacatccccattgtgtgagtggcatttccttaagctggcaggaacagggagcagccctgtgtcgggggctggaatagttctggccagaccccgttccccttcctctatgaaggaataagttggaccaagggaagtcggggacgtaaaaaatgaagcaaaacaatgccagggtgtctcccgctttactcttcaggaatggtgtcccaagttggaggctttgtgtcagctgcaaatcctaccagttatgtccaagaatggctttccctcgggcaggtggcagcggccatctcccactgggaatatggcgtagtatctccggtccattccttggatgctaaggactgcgggaatgagggagtcagataaagaacaaacctcgaaacgaacagttaaattgaaatgctatgtgcctgacccaatggtaggcacatagtaggcactcaactcatatgtttaattgaattgaaaatatcccttaggaaaaaaaaaaaacacacaaaaaaccacaagagccccagccagtttactccaggtagatttccacaatatgcaaagtggtggtggggtcaagacagatgacaccagcactttaaactctttgtgtgggtatgcgtgggtgtatgtttgggaagaaaaacaaaggtgcagactatcttcctttttttcttcttcagcctccatccctggcctcctcccctcacacacactggacttggtacaaaatgtcggtgtggtcctagatgaagcattggggtgggggagggagagggagctttgtgttaagtgcctactggaaatgcactgtggggttttttcctgtatgggaaaccatttatgccaagcttttccccatttcccatatttatctcatctggttagctgcctctgcttccagctttgtgtaattctctttgccagctgcacaaagctgattttttccaaagtctaaagactgagctcacctggctagattgttgtgtgttttgttgaattttttcataatgtaatgccgtatttattgtttttaaaatgaaaggaatactaataagtcttaaaagttccttcatgcataagatttttttccagttactgggtttaactggtgtacattaattagatgtccatactgtattttgtttgcattaagtaattttctttttgacttagtatccggcacacaaagtgggttagtactacagtatttgcgttactttaagtactaagtatgcaggtttcctggtaccattgagttgctgctattaaagctcacacacgaaatggctaaaagttacaagtgtgcaaattatgactgcgtgagccttagaaaataaaatgtataaagggcaacacatgagctgtcaaacagtgttaggagtgtgtttatatgtacagagttgtgcatagcaatcgttttatttaagttgatatgtagtctactcacattttcattatttagcaattttgtacaaaaatagcaattaatttgtaaacactgccagaatactttctagctgctttgtaattttttaagagtgttattttgtttttgtttttctgttctttgttgtggctcttgttttcatttttgttgtacgtgtagatctgtaaataaaattgcagtatttaaagcttaagctttcaggaaaaagaaaataagaattcagtgtgtgcatgacaactcgtgtgtatgagaaggagggatatgaaggaagatggcttgcagagtaagtcgggtggcaattgtcagggtgtgggaatttcttttcctacggggtacgtgattttgtaaaaaggaagtatttctcccaaaattgggagtaggcaaactactaatcagtttagctttgtgttgtatgctagtttaaaaaagaaaatatgtaatataatgtaaaaaaaaacaaaaaaaagcttttatgatggattttgtaaatagatttgttacagggtgacctgttctctagctgtgatcttaccacttcaaatgggtgtaatttgaataaattttgtatggtaaaggatcaataaaatgattttttttaag

SEQ ID NO: 122370 - protein, 413 aa, Artificial Sequence
  derived and/or modified sequence
MAEAGPQAPPPPGTPSRHEKSLGLLTTKFVSLLQEAKDGVLDLKLAADTLAVRQKRRIYDITNVLEGIGLIEKKSKNSIQWKGVGPGCNTREIADKLIELKAEIEELQQREQELDQHKVWVQQSIRNVTEDVQNSCLAYVTHEDICRCFAGDTLLAIRAPSGTSLEVPIPEGLNGQKKYQIHLKSVSGPIEVLLVNKEAWSSPPVAVPVPPPEDLLQSPSAVSTPPPLPKPALAQSQEASRPNSPQLTPTAVPGSAEVQGMAGPAAEITVSGGPGTDSKDSGELSSLPLGPTTLDTRPLQSSALLDSSSSSSSSSSSSSNSNSSSSSGPNPSTSFEPIKADPTGVLELPKELSEIFDPTRECMSSELLEELMSSEVFAPLLRLSPPPGDHDYIYNLDESEGVCDLFDVPVLNL

SEQ ID NO: 122371 - DNA, 2100 bp, Artificial Sequence
  derived and/or modified sequence
gcggaagtggcggcggcgccggcctggcctggcctggctgaggggaggcggcgggcgggcgcgatggcggaggccgggccacaggcgccgccgcccccgggcactccaagccggcacgaaaagagcctgggactgctcaccaccaagttcgtgtcccttctgcaggaggccaaggacggcgtgcttgacctcaagctggcagctgacaccctagctgtacgccagaagcggcggatttacgacattaccaatgttttggaaggtatcgggctaatcgagaaaaagtccaagaacagcatccagtggaagggtgtggggcctggctgcaatacccgggagattgctgacaaactgattgagctcaaggcagagatcgaggagctgcagcagcgggagcaagaactagaccagcacaaggtgtgggtgcagcagagcatccggaacgtcacagaggacgtgcagaacagctgtttggcctacgtcactcatgaggacatctgcagatgctttgctggagataccctcttggccatccgggccccatcaggcaccagcctggaggtgcccatcccagagggtctcaatgggcagaagaagtaccagattcacctgaagagtgtgagtggtcccattgaggttctgctggtgaacaaggaggcatggagctcaccccctgtggctgtgcctgtgccaccacctgaagatttgctccagagcccatctgctgtttctacacctccacctctgcccaagcctgccctagcccagtcccaggaagcctcacgtccaaatagtcctcagctcactcccactgctgtccctggcagtgcagaagtccagggaatggctggcccagcagctgagatcacagtgagtggcggccctgggactgatagcaaggacagtggtgagctcagttcactcccactgggcccaacaacactggacacccggccactgcagtcttctgccctgctggacagcagcagcagcagcagcagcagcagcagcagcagcagcaacagtaacagcagcagttcgtccggacccaacccttctacctcctttgagcccatcaaggcagaccccacaggtgttttggaactccccaaagagctgtcagaaatctttgatcccacacgagagtgcatgagctcggagctgctggaggagttgatgtcctcagaagtgtttgcccctctgcttcgtctttctccacccccgggagaccacgattatatctacaacctggacgagagtgaaggtgtctgtgacctctttgatgtgcctgttctcaacctctgactgacagggacatgccctgtgtggctgggacccagactgtctgacctgggggttgcctggggacctctcccacccgacccctacagagcttgagagccacagacgcctggcttctccggcctcccctcaccgcacagttctggccacagctcccgctcctgtgctggcacttctgtgctcgcagagcaggggaacaggactcagcccccatcaccgtggagccaaagtgtttgcttctccctttctgcggccttcgccagcccaggctcggctgccacccagtggcacagaaccgaggagctgccattaccccccatagggggcagtgtcttgttcctgccagcctcagtgtcttgcttctgccagctccttcccctaggagggaagggtggggtggaactgggcacatgccagcaccacttctagcttccttcgctatcccccaccccctgaccctccagctcctcctggccctctcacgtgcccacttctgctgggcctttagccctagaacctgcaggtggtgggggcggctaccaagaaggaacagaggtctctggggaggagtctgggtggtccagccctgatgattggccccacctcctgctgccccataaccctctcttcatttcggctttttcatttaccctcatttagagccatttgcagagatttagaaagatttacagtaacgaatggattcctatataaagattatttttatactttttgcagcaaaaggaaattgtaatatttgtacagtgttcaagtgaataaaaaccatgcctaaggcta

SEQ ID NO: 122372 - DNA, 1242 bp, Artificial Sequence
  derived and/or modified sequence
atggccgaggccggcccccaggccccccccccccccggcacccccagcagacacgagaagagcctgggcctgctgaccaccaagttcgtgagcctgctgcaggaggccaaggacggcgtgctggacctgaagctggccgccgacaccctggccgtgagacagaagagaagaatctacgacatcaccaacgtgctggagggcatcggcctgatcgagaagaagagcaagaacagcatccagtggaagggcgtgggccccggctgcaacaccagagagatcgccgacaagctgatcgagctgaaggccgagatcgaggagctgcagcagagagagcaggagctggaccagcacaaggtgtgggtgcagcagagcatcagaaacgtgaccgaggacgtgcagaacagctgcctggcctacgtgacccacgaggacatctgcagatgcttcgccggcgacaccctgctggccatcagagcccccagcggcaccagcctggaggtgcccatccccgagggcctgaacggccagaagaagtaccagatccacctgaagagcgtgagcggccccatcgaggtgctgctggtgaacaaggaggcctggagcagcccccccgtggccgtgcccgtgcccccccccgaggacctgctgcagagccccagcgccgtgagcacccccccccccctgcccaagcccgccctggcccagagccaggaggccagcagacccaacagcccccagctgacccccaccgccgtgcccggcagcgccgaggtgcagggcatggccggccccgccgccgagatcaccgtgagcggcggccccggcaccgacagcaaggacagcggcgagctgagcagcctgcccctgggccccaccaccctggacaccagacccctgcagagcagcgccctgctggacagcagcagcagcagcagcagcagcagcagcagcagcagcaacagcaacagcagcagcagcagcggccccaaccccagcaccagcttcgagcccatcaaggccgaccccaccggcgtgctggagctgcccaaggagctgagcgagatcttcgaccccaccagagagtgcatgagcagcgagctgctggaggagctgatgagcagcgaggtgttcgcccccctgctgagactgagccccccccccggcgaccacgactacatctacaacctggacgagagcgagggcgtgtgcgacctgttcgacgtgcccgtgctgaacctgtag

SEQ ID NO: 122373 - DNA, 1242 bp, Artificial Sequence
  derived and/or modified sequence
atggcagaggcaggccctcaggcccctccacctccaggtaccccctctcggcatgaaaagtccctcggactgctgactacgaagtttgtatccttacttcaggaggccaaagacggagttttggacctgaagttagctgcagatactctcgctgtccggcaaaagaggcgcatttacgacataacaaatgtgctagaggggataggtttgatcgaaaaaaagtcaaagaactctatccagtggaagggtgtcggcccggggtgcaacactcgagagatagccgataagctgatcgaactgaaagctgagatcgaagagctgcagcagagggagcaggaacttgaccaacataaagtatgggtccagcagtctatccggaacgtgacggaggacgtgcagaacagctgtctcgcatacgttacacacgaggatatctgccggtgctttgctggggatacattactcgcaatacgcgctccgtcaggaacgtcacttgaggtccccatccccgaggggctgaatggacagaagaagtaccagattcacctcaaatcagtctctgggccgattgaggtactccttgtcaataaggaggcttggagcagtccgccagtagccgttcctgtaccaccacccgaggatctcttacagagtccgtcagccgtgtccacccccccccccctccccaagccggccctggcacagagtcaggaagcctcacgccccaattctcctcagttaacccccacggccgtcccgggctccgcagaagtgcagggcatggcgggaccggcagctgagattacggtgagcggcgggcccgggacagactccaaggactccggcgagctgtcgagtctgccactggggcctaccacactcgacacacgacccctgcagtccagcgcactgctggactcctcctccagctcatcctcttcgtcctcatcctctagcaactcgaattcgtcctccagcagcggccccaacccaagtacaagcttcgagcctatcaaggctgaccctactggggtgctggaactacccaaagaattgagcgaaatcttcgacccgactagagagtgcatgagtagtgaactgctcgaggaactgatgtcttccgaggtatttgcaccattgttgcgtctttcccccccaccgggggaccatgactacatctacaatctcgatgaaagcgagggggtgtgtgatcttttcgatgtcccggtcttaaatctgtag

SEQ ID NO: 122374 - DNA, 1242 bp, Artificial Sequence
  derived and/or modified sequence
atggccgaggccggcccccaggcccctcctcctcctggcacccccagcagacatgagaagagcctgggcctgctgaccaccaagtttgtgtccctgctgcaggaggccaaggatggagtgctggacctgaagctggccgctgacaccctggccgtgcggcagaagaggcgcatctatgacatcaccaacgtgctggagggcatcggcctgattgagaagaagagcaagaacagcatccagtggaagggcgtgggccctggctgcaacacccgggagattgctgacaagctgattgagctgaaggccgagattgaggagctgcagcagcgggagcaggagctggaccagcacaaggtgtgggtgcagcagagcatcagaaatgtgacagaagatgtgcagaacagctgcctggcctacgtgacccatgaggacatctgccgctgctttgctggggacaccctgctggccatccgggcccccagcggcaccagcctggaggtgcccatccctgagggcctgaatggccagaagaagtaccagatccacctgaagtctgtgtctggccccatcgaggtgctgctggtgaacaaggaggcctggagcagcccccctgtggccgtgcctgtgcccccacctgaggacctgctgcagagccccagcgctgtgtccaccccaccacccctgcccaagccagccctggcccagagccaggaggccagccggcccaacagcccccagctgacccccacagctgtgcccggcagcgctgaggtgcagggcatggccggccctgctgctgagatcaccgtgtctgggggccctggaacagacagcaaggacagcggggagctgagcagcctgcccctgggccccaccaccctggacacccggcccctgcagagcagcgccctgctggacagcagcagcagcagcagcagcagcagcagcagcagcagcaacagcaacagcagcagcagcagcggccccaaccccagcaccagctttgagcccatcaaggctgaccccactggagtgctggagctgcccaaggagctgtctgagatctttgaccccacccgggagtgcatgagcagcgagctgctggaggagctgatgagcagcgaggtgtttgcccccctgctgcggctgagccccccacctggggaccatgactacatctacaacctggatgaaagtgaaggagtgtgtgacctgtttgatgtgcctgtgctgaacctgtag

SEQ ID NO: 122375 - DNA, 1242 bp, Artificial Sequence
  derived and/or modified sequence
atggccgaggccggcccccaggccccccccccccccggcaccccctcacggcacgagaagagcttgggtctgttgaccaccaaatttgtgtctttgttgcaagaggccaaagatggcgtcctggatctgaagttggcagccgacactttggccgtacgtcagaagcgccgtatttacgacattaccaatgttctcgaaggcatcgggctcatagaaaagaagtctaaaaatagcatccagtggaagggggtgggccctggctgtaatacccgggagattgctgacaagctgatagaattgaaggccgagatcgaagagttgcagcagagagagcaggagctggatcagcataaggtctgggtgcagcagagtattcgtaacgtgactgaggacgtgcaaaacagttgccttgcctatgtcacacatgaggacatttgccgctgctttgccggtgatacactgctcgctattcgcgccccctcagggacctccctagaagtgccaatcccagagggactgaatggtcagaaaaaatatcagatccatctcaagtcagtctccggaccaattgaggtgctgctggtgaacaaagaggcatggtcaagtcctccagtcgccgtgcccgttccgccgcccgaggatttactgcagagcccctcggccgtgagtacccccccccctctccccaagcctgctctggcccagtcacaggaggccagccggcccaacagcccccagctgacacctaccgccgttcccgggtccgccgaggtgcaaggcatggcggggcctgctgcagagattaccgtctctggaggccccgggaccgacagcaaagactccggcgaactcagttccctgccgctgggccccactacgcttgacaccaggcccttgcaatccagcgccctcctcgacagctcaagctcctctagctctagttcttcctcttccagtaactccaactcctcgtcctcttctggccccaatcctagcacctccttcgagccgattaaagccgacccgaccggtgtccttgaactgccaaaggaactgtctgaaatattcgaccccacgagagagtgcatgagctcagagctgcttgaggaactgatgtcttctgaggtttttgcaccattacttcgcctgagcccaccacccggcgatcacgactatatctacaaccttgacgagtcagaaggcgtttgcgatctgtttgacgtccctgtattaaatctctag

SEQ ID NO: 122376 - DNA, 1242 bp, Artificial Sequence
  derived and/or modified sequence
atggcagaggcgggaccacaggcccctcccccacctggaacccccagcaggcacgagaagtccctaggactgcttactaccaagtttgtgagccttctccaagaggcaaaagacggagtgctcgacctgaagctggccgcagacacactcgccgtgcgccagaaacgccgtatttatgatattactaatgtgttagagggcatcggcctgatagagaagaaaagcaaaaatagcattcaatggaagggggttggaccagggtgtaacacccgtgagattgccgataagctcatcgagctgaaagccgaaattgaagagttacaacagcgggaacaggagctggaccagcataaggtttgggtgcaacaaagtattcgcaatgtgacggaagacgtgcagaactcttgcctagcttatgtaactcatgaagacatctgtcgctgtttcgcgggtgatacactgctcgccatcagagccccatctgggaccagccttgaggtgccaattccagaagggctgaatgggcagaaaaaatatcagatccacctgaaatctgtctcaggacctatcgaggtgctgcttgttaataaggaggcctggagttctccccctgtggccgtgcctgtgcccccaccagaagatctgctgcagtccccctcagccgtctctaccccaccgcctttgccaaagcccgctcttgcccagtcacaagaagcttcaaggcctaatagcccacagttaactccaactgccgtccctgggagtgcggaggtccaggggatggcaggcccagcagctgagattacggtttctggcggaccgggaactgactctaaagatagcggtgagttgtcaagcctgcctcttggccctaccacacttgacaccaggcctctccagtcctcagccctgcttgacagcagctctagctcttcctcctcaagtagttcgagtagtaatagcaactcttcatcgtcatctggaccaaacccgagtacaagtttcgaacccatcaaagctgacccgacaggtgtgctcgagttgcctaaggaattaagtgagatattcgatccaaccagggagtgtatgagttcggaactcctagaggagcttatgtcatccgaagtgttcgctccactcctgcgactttcacctccccctggggatcacgattatatctacaatctagatgaatccgagggggtgtgtgatttattcgatgtacctgtacttaatctgtag

SEQ ID NO: 122377 - protein, 347 aa, Artificial Sequence
  derived and/or modified sequence
MAAAEPASSGQQAPAGQGQGQRPPPQPPQAQAPQPPPPPQLGGAGGGSSRHEKSLGLLTTKFVSLLQEAKDGVLDLKAAADTLAVRQKRRIYDITNVLEGIDLIEKKSKNSIQWKGVGAGCNTKEVIDRLRYLKAEIEDLELKERELDQQKLWLQQSIKNVMDDSINNRTFSYVTHEDICNCFNGDTLLAIQAPSGTQLEVPIPEMGQNGQKKYQINLKSHSGPIHVLLINKESSSSKPVVFPVPPPDDLTQPSSQSLTPVTPQKSSMATQNLPEQHVSERSQALQQTSATDISSAGSISGDIIDELMSSDVFPLLRLSPTPADDYNFNLDDNEGVCDLFDVQILNY

SEQ ID NO: 122378 - protein, 346 aa, Artificial Sequence
  derived and/or modified sequence
MAAAEPASSGQQAPAGQGQGQRPPPQPPQAQAPQPPPPPQLGGAGGGSSRHEKSLGLLTTKFVSLLQEAKDGVLDLKAAADTLAVRQKRRIYDITNVLEGIDLIEKKSKNSIQWKGVGAGCNTKEVIDRLRYLKAEIEDLELKERELDQQKLWLQQSIKNVMDDSINNRFSYVTHEDICNCFNGDTLLAIQAPSGTQLEVPIPEMGQNGQKKYQINLKSHSGPIHVLLINKESSSSKPVVFPVPPPDDLTQPSSQSLTPVTPQKSSMATQNLPEQHVSERSQALQQTSATDISSAGSISGDIIDELMSSDVFPLLRLSPTPADDYNFNLDDNEGVCDLFDVQILNY

SEQ ID NO: 122379 - protein, 185 aa, Artificial Sequence
  derived and/or modified sequence
MDDSINNRFSYVTHEDICNCFNGDTLLAIQAPSGTQLEVPIPEMGQNGQKKYQINLKSHSGPIHVLLINKESSSSKPVVFPVPPPDDLTQPSSQSLTPVTPQKSSMATQNLPEQHVSERSQALQQTSATDISSAGSISGDIIDELMSSDVFPLLRLSPTPADDYNFNLDDNEGVCDLFDVQILNY

SEQ ID NO: 122380 - protein, 182 aa, Artificial Sequence
  derived and/or modified sequence
SYDSTFSYVTHEDICNCFNGDTLLAIQAPSGTQLEVPIPEMGQNGQKKYQINLKSHSGPIHVLLINKESSSSKPVVFPVPPPDDLTQPSSQSLTPVTPQKSSMATQNLPEQHVSERSQALQQTSATDISSAGSISGDIIDELMSSDVFPLLRLSPTPADDYNFNLDDNEGVCDLFDVQILNY

SEQ ID NO: 122381 - DNA, 1041 bp, Artificial Sequence
  derived and/or modified sequence
atggccgccgccgagcccgccagcagcggccagcaggcccccgccggccagggccagggccagagaccccccccccagcccccccaggcccaggccccccagccccccccccccccccagctgggcggcgccggcggcggcagcagcagacacgagaagagcctgggcctgctgaccaccaagttcgtgagcctgctgcaggaggccaaggacggcgtgctggacctgaaggccgccgccgacaccctggccgtgagacagaagagaagaatctacgacatcaccaacgtgctggagggcatcgacctgatcgagaagaagagcaagaacagcatccagtggaagggcgtgggcgccggctgcaacaccaaggaggtgatcgacagactgagatacctgaaggccgagatcgaggacctggagctgaaggagagagagctggaccagcagaagctgtggctgcagcagagcatcaagaacgtgatggacgacagcatcaacaacagattcagctacgtgacccacgaggacatctgcaactgcttcaacggcgacaccctgctggccatccaggcccccagcggcacccagctggaggtgcccatccccgagatgggccagaacggccagaagaagtaccagatcaacctgaagagccacagcggccccatccacgtgctgctgatcaacaaggagagcagcagcagcaagcccgtggtgttccccgtgcccccccccgacgacctgacccagcccagcagccagagcctgacccccgtgaccccccagaagagcagcatggccacccagaacctgcccgagcagcacgtgagcgagagaagccaggccctgcagcagaccagcgccaccgacatcagcagcgccggcagcatcagcggcgacatcatcgacgagctgatgagcagcgacgtgttccccctgctgagactgagccccacccccgccgacgactacaacttcaacctggacgacaacgagggcgtgtgcgacctgttcgacgtgcagatcctgaactactag

SEQ ID NO: 122382 - DNA, 1044 bp, Artificial Sequence
  derived and/or modified sequence
atggctgcagccgagcctgcaagctctggccagcaggccccagccggccaggggcagggacaacggccgccgccccagccacctcaggctcaagcgccgcaacccccgccccccccacaactaggcggtgccggtggagggtcaagccgtcacgagaaatcgctggggttgctcacaacaaagtttgtgagtctactgcaggaggcaaaagatggggtcctcgatctgaaagccgctgcagataccctggccgtgaggcagaagcggagaatatatgatatcaccaacgtgttggaaggaatcgatcttatcgaaaagaaaagcaagaatagtatccagtggaaaggggtaggggccggatgcaacactaaggaagttattgatcggctgaggtaccttaaagccgagattgaggacctggagctaaaggagcgggaactggaccagcagaagctgtggttgcaacagagcatcaagaatgtgatggatgattctatcaataaccgaaccttcagctacgtcacacatgaagatatttgcaactgtttcaacggcgacacactgctggcgattcaggcgccttccggtacacagctggaggttccaatccccgagatgggacagaacggacaaaaaaaataccagatcaatttgaagtcgcatagcggtcccattcacgtcttgctgatcaacaaagaaagcagctcatcgaagcccgtggtctttccagtgcctcctcccgacgacctgactcagcccagctcacagtccctgactcccgtcactccgcaaaaaagctccatggccacccaaaacctacctgaacagcacgtatcagagaggtctcaggcgcttcaacagacctctgctaccgacattagttcggccgggagtatttctggcgacattattgatgaactgatgagttctgatgtgttccccctcttgcggctgagccctacccccgctgatgactataacttcaacctggatgataacgagggcgtgtgcgacctttttgacgtgcaaatcctgaattattag

SEQ ID NO: 122383 - DNA, 1041 bp, Artificial Sequence
  derived and/or modified sequence
atggccgccgctgagcccgcttcctccggtcagcaagcccccgcggggcagggccaggggcaacggccaccaccccaacctccccaggcccaggcgccgcagccacccccacccccacagctggggggggctgggggtgggtctagcagacatgagaagagcctgggcctccttaccactaaattcgtgagtctgcttcaggaggccaaggatggagtgctagatttgaaagctgcggccgatactttagcagttcggcagaagcggcgtatctatgacattacaaatgtactcgagggaatcgacttaatcgaaaagaaatccaaaaattccattcaatggaaaggggtcggtgccggctgtaacaccaaggaggtcattgaccgtctgcgatacctcaaggccgagattgaagacctggagctgaaggagagggaactggaccagcagaaactatggctgcagcagtccataaaaaacgtgatggatgattcaatcaataacaggttctcctacgttacacacgaagatatttgcaattgctttaacggcgacacccttttggccattcaggcccccagcgggactcagctggaagttcctattcctgagatggggcaaaatggccagaagaagtaccagattaatctcaagtcgcattctggcccaatccatgtcttactgatcaacaaggaatctagctcaagtaagcctgttgtctttccagtgcccccgccggacgatctgactcagcctagctctcaaagcttaacacctgttactccccaaaagtcgtccatggcaacacagaacttaccagagcaacacgtctccgaaaggagccaggccctccagcagacatccgcaaccgacataagcagcgccggctcgatcagcggagatataatcgatgagcttatgtctagcgacgtgtttcccctgctgcgtctgagcccaactcccgccgatgactacaattttaatctggatgacaacgagggtgtgtgcgatctcttcgatgtgcagatccttaattattag

SEQ ID NO: 122384 - DNA, 1044 bp, Artificial Sequence
  derived and/or modified sequence
atggctgctgctgagcccgccagcagcggccagcaggccccagctggccagggccagggccagaggcccccaccccagcccccccaggcccaggccccccagcccccacctccaccccagctgggcggggccggcggcggcagcagcagacatgagaagagcctgggcctgctgaccaccaagtttgtgtccctgctgcaggaggccaaggatggagtgctggacctgaaggctgctgctgacaccctggccgtgcggcagaagaggcgcatctatgacatcaccaacgtgctggagggcatcgacctgattgagaagaagagcaagaacagcatccagtggaagggcgtgggcgccggctgcaacaccaaggaggtgattgaccggctgcgctacctgaaggccgagattgaggacctggagctgaaggagcgggagctggaccagcagaagctgtggctgcagcagagcatcaagaatgtgatggatgacagcatcaacaacagaaccttctcctatgtgacccatgaggacatctgcaactgcttcaacggggacaccctgctggccatccaggcccccagcggcacccagctggaggtgcccatccctgagatgggccagaatggccagaagaagtaccagatcaacctgaagagccacagcggccccatccacgtgctgctgatcaacaaggagagcagcagcagcaagcctgtggtgtttcctgtgcccccaccagatgacctgacccagcccagcagccagagcctgacccctgtgaccccccagaagagctccatggccacccagaacctgcctgagcagcacgtgtctgagaggagccaggccctgcagcagaccagcgccacagacatcagcagcgctggcagcatcagcggggacatcattgatgagctgatgagcagtgatgtgttccccctgctgcggctgagccccaccccagcagatgactacaacttcaacctggatgacaatgaaggagtgtgtgacctgtttgatgtgcagatcctgaactactag

SEQ ID NO: 122385 - DNA, 1041 bp, Artificial Sequence
  derived and/or modified sequence
atggctgctgctgagcccgccagcagcggccagcaggccccagctggccagggccagggccagaggcccccaccccagcccccccaggcccaggccccccagcccccacctccaccccagctgggcggggccggcggcggcagcagcagacatgagaagagcctgggcctgctgaccaccaagtttgtgtccctgctgcaggaggccaaggatggagtgctggacctgaaggctgctgctgacaccctggccgtgcggcagaagaggcgcatctatgacatcaccaacgtgctggagggcatcgacctgattgagaagaagagcaagaacagcatccagtggaagggcgtgggcgccggctgcaacaccaaggaggtgattgaccggctgcgctacctgaaggccgagattgaggacctggagctgaaggagcgggagctggaccagcagaagctgtggctgcagcagagcatcaagaatgtgatggatgacagcatcaacaaccgcttctcctatgtgacccatgaggacatctgcaactgcttcaatggagacaccctgctggccatccaggcccccagcggcacccagctggaggtgcccatccctgagatgggccagaatggccagaagaagtaccagatcaacctgaagagccacagcggccccatccacgtgctgctgatcaacaaggagagcagcagcagcaagcctgtggtgtttcctgtgcccccaccagatgacctgacccagcccagcagccagagcctgacccctgtgaccccccagaagagctccatggccacccagaacctgcctgagcagcacgtgtctgagaggagccaggccctgcagcagaccagcgccacagacatcagcagcgctggcagcatcagcggggacatcattgatgagctgatgagcagtgatgtgttccccctgctgcggctgagccccaccccagcagatgactacaacttcaacctggatgacaatgaaggagtgtgtgacctgtttgatgtgcagatcctgaactactag

SEQ ID NO: 122386 - DNA, 1044 bp, Artificial Sequence
  derived and/or modified sequence
atggccgccgccgagcccgccagcagcggccagcaggcccccgccggtcaaggccagggacagcggccccccccccaacccccgcaggcccaggcccctcagcctccaccccccccacagttgggcggggccggtgggggctcaagtcgccacgagaaaagcctcgggctgctcaccacgaagttcgtgtcactgctgcaggaggctaaagatggtgtcctggacctaaaagccgccgcggatacactggcagtccggcaaaagagacgcatttatgatattacaaatgttctggagggcattgatctgattgaaaaaaaatccaaaaactccattcagtggaagggggtgggagcagggtgcaacaccaaagaagtaattgacagacttaggtatttaaaagcagaaattgaagacttggaacttaaggagcgggaactagatcaacagaaactttggctgcagcagtcaataaagaacgtcatggatgactccataaacaatagaactttctcctacgttactcatgaggatatttgcaattgtttcaatggggatacgctgctcgccatccaggccccttctggcactcagttggaagtaccaattcctgaaatggggcagaatggtcagaagaaataccagattaatcttaagtctcattctggtcccatccatgtgcttctcatcaacaaagagtctagtagctccaagcccgtcgtgtttcccgttcccccaccagatgatcttacgcaaccctcctcccaaagcttgacaccagtgacaccgcagaagtctagtatggcaacacagaacctccccgaacagcatgtatccgagagaagccaggcgcttcagcagacatccgccaccgatatttcttctgctggatctatcagcggagacattattgatgaattaatgagcagtgatgtctttcccctgctgagactcagccccacccctgcagacgattacaattttaatctagatgacaacgaaggagtgtgtgatcttttcgatgttcagatattaaattactag

SEQ ID NO: 122387 - DNA, 1041 bp, Artificial Sequence
  derived and/or modified sequence
atggccgccgccgagcccgccagcagcggccagcaggcccccgccggacagggacagggacagaggccaccaccccaacccccacaggcccaggcgccccagccacccccaccccctcaactcggaggggcgggcgggggatcttcacggcatgagaagtcactaggacttttgacaactaaattcgtgtccctactacaagaagctaaggacggggtgctggacctgaaggccgctgccgatacactcgcagtccggcagaagagacgcatctacgacattaccaatgtgttggaggggatcgacctcatagagaaaaaaagcaaaaactcaatacaatggaagggagtaggggcaggctgcaacacaaaggaggtgattgaccgactgcggtacctcaaggccgagattgaggaccttgagctcaaagaacgtgagctcgatcagcagaagttatggctgcaacagtctatcaaaaacgtcatggatgatagtatcaacaataggttttcatacgtgactcatgaggacatttgcaactgtttcaacggcgacacccttctggcaatccaagctccctctggtactcagctggaagtgccaataccggagatgggccagaacgggcagaagaagtaccaaatcaatctcaagtcccacagcggacctatacatgtccttctgatcaataaggagagctcaagcagtaagcccgtcgtcttccctgttcccccacctgacgatttgacccagcccagctcacagtctctgacaccagtcactccccaaaaaagctccatggcgactcagaatctgcctgaacagcatgtgagtgaaaggtcgcaagcactgcagcagacctccgccacagatatctcatcagccgggtccattagcggagatatcatcgatgagctgatgtcatcggacgtcttccctcttctgagactatcaccgacacccgcagatgactataactttaatctggacgataacgagggggtatgtgatctgtttgatgtccagatcctgaactattag

SEQ ID NO: 122388 - DNA, 1044 bp, Artificial Sequence
  derived and/or modified sequence
atggccgcagctgagccagcttcctctggccagcaggctccggctggccagggccaggggcagcgccctcctcctcagcctccacaggcccaggccccacagcctccccctcctccccagctgggtggcgcagggggaggcagtagtaggcacgagaagtccctgggcctgctcactaccaagtttgtgagcctgctacaagaggcgaaggatggagtcctcgatctgaaagccgcagccgacacccttgctgtgcggcagaaaagacgaatatacgatatcactaacgttcttgaaggcattgatctgatcgagaagaaatcaaaaaacagtattcagtggaagggggtcggcgcaggctgtaacaccaaggaagtcattgatcggctgcgttatctgaaagctgagatagaggacctggagctgaaggagcgcgaattggaccagcaaaagttatggctgcagcagtcgatcaaaaatgtgatggacgactctatcaacaatcgtacattttcctacgtgacacatgaagacatctgcaactgcttcaatggcgacacactcttagccattcaagcaccaagcggaacccaactggaagtgcccatccctgagatgggtcagaatgggcagaaaaagtaccagattaatctcaaatctcatagtggacccattcacgttctgcttataaataaagagtccagtagctctaagcccgtggttttccccgtgccgcctcctgacgatctcacccagcccagtagtcagtctcttacaccagtcacaccgcagaaatcctcaatggccacacagaatctgcccgagcagcacgtgtccgagaggtctcaggccttacagcagacgtctgcaaccgatataagttcagctggcagtattagtggagatataatcgatgagctcatgagcagcgatgtgtttcctttactgagactgagccccactccagccgacgattataactttaatctggacgacaatgagggagtctgcgacctcttcgacgttcaaatcttaaactactag

SEQ ID NO: 122389 - DNA, 1728 bp, Artificial Sequence
  derived and/or modified sequence
cgcgggggcccgaccaccgcggggccgggacgcgatggcggcggcagagcccgcgagctcgggccagcaggcgccggcagggcaggggcagggccagcggccgccgccgcagcctccgcaggcgcaagccccgcagccgcccccgccgccgcagctcgggggcgccgggggcggcagcagcaggcacgagaagagcctggggctgctcactaccaagttcgtgtcgctgctgcaggaggccaaggacggcgttctggatctcaaagcggctgctgatactttggctgtgaggcaaaaaaggagaatttatgatatcaccaatgtcttagagggaattgacttgattgaaaaaaagtcaaaaaacagtatccagtggaaaggtgtaggtgctggctgtaatactaaagaagtcatagatagattaagatatcttaaagctgaaattgaagatctagaactgaaggaaagagaacttgatcagcagaagttgtggctacagcaaagcatcaaaaatgtgatggacgattccattaataatagattttcctatgtaactcatgaagacatctgtaattgctttaatggtgatacacttttggccattcaggcaccttctggtacacaactggaggtacccattccagaaatgggtcagaatggacaaaagaaataccagatcaatctaaagagtcattcaggacctatccatgtgctgcttataaataaagagtcgagttcatctaagcccgtggtttttcctgttcccccacctgatgacctcacacagccttcctcccagtccttgactccagtgactccacagaaatccagcatggcaactcaaaatctgcctgagcaacatgtctctgaaagaagccaggctctgcagcagacatcagctacagatatatcttcagcaggatctattagtggagatatcattgatgagttaatgtcttctgacgtgtttcctctcttaaggctttctcctaccccggcagatgactacaactttaatttagatgataacgaaggagtttgtgatctgtttgatgtccagatactaaattattagattccatggaaacttgggactgttatctacctctaactgtgtaacattttagacttcttaataacctaaatatttaaaataatgaatgtaacaccttttttagttcactgattctgaagtgttcttccctaatactttctttacttcacaaaacttcaaccataaaaacaaagggctctgattgctttaggggataagtgatttaatatccacaaacgtccccactcccaaaagtaactatattctggatttcaacttttcttctaattgtgaatccttctgttttttcttcttaaggaggaaagttaaaggacactacaggtcatcaaaaacaagttggccaaggactcattacttgtcttatatttttactgccactaaactgcctgtatttctgtatgtccttctatccaaacagacgttcactgccacttgtaaagtgaaggatgtaaacgaggatatataactgtttcagtgaacagattttgtgaagtgccttctgttttagcactttaagtttatcacattttgttgacttctgacattccactttcctaggttataggaaagatctgtttatgtagtttgtttttaaaatgtgccaatgcctgtacattaacaagatttttaaaaataaaattgtataaaacatt

SEQ ID NO: 122390 - DNA, 1041 bp, Artificial Sequence
  derived and/or modified sequence
atggccgctgccgagcctgcctcttcaggtcagcaggccccagccggacaaggacaaggccagagacctccacctcaacccccacaggcgcaggctccgcagccgcctccacctccacaactgggcggtgccggaggaggatcgtcccgccatgaaaagtcactgggtcttctgaccacgaaattcgtctcactactccaagaggcaaaggatggtgtgctggaccttaaagctgccgctgatacacttgcagtgcgtcagaaacgcaggatctacgacattaccaatgtcctcgagggaatcgatcttattgagaagaagtcaaagaatagcattcagtggaagggagtgggggcaggttgcaacaccaaagaagtgattgacagactgaggtacttgaaagctgagatagaggatctggaactaaaggaacgcgaactggatcagcagaaactgtggctacagcagagcatcaaaaacgtgatggacgactcgatcaacaaccgtttcagctatgtgactcatgaagatatttgtaattgttttaatggagacacgcttcttgcaatacaggccccaagtggaacacaactcgaggtccccatcccagaaatggggcagaatggtcagaaaaagtaccagattaatttgaagagtcacagtggcccaattcacgtgttgttgatcaacaaggagtcaagcagctccaagcctgtggtatttcccgtaccaccccctgatgacctgacacagccaagttctcagagtcttaccccagtgacaccacaaaaaagttcaatggctactcagaacctgcctgagcagcatgtctccgagcggagccaagctttacagcaaacgtcagccacggatatttcctccgctggctcaatatccggagacatcatcgatgaactcatgtcaagcgatgtgttccccctgctccggttgagcccaacaccagccgatgattacaatttcaacctggatgataatgagggagtgtgtgatttatttgatgtacaaatccttaactactag

SEQ ID NO: 122391 - DNA, 1735 bp, Artificial Sequence
  derived and/or modified sequence
gtgcgcgggggcccgaccaccgcggggccgggacgcgatggcggcggcagagcccgcgagctcgggccagcaggcgccggcagggcaggggcagggccagcggccgccgccgcagcctccgcaggcgcaagccccgcagccgcccccgccgccgcagctcgggggcgccgggggcggcagcagcaggcacgagaagagcctggggctgctcactaccaagttcgtgtcgctgctgcaggaggccaaggacggcgttctggatctcaaagcggctgctgatactttggctgtgaggcaaaaaaggagaatttatgatatcaccaatgtcttagagggaattgacttgattgaaaaaaagtcaaaaaacagtatccagtggaaaggtgtaggtgctggctgtaatactaaagaagtcatagatagattaagatatcttaaagctgaaattgaagatctagaactgaaggaaagagaacttgatcagcagaagttgtggctacagcaaagcatcaaaaatgtgatggacgattccattaataatagaacattttcctatgtaactcatgaagacatctgtaattgctttaatggtgatacacttttggccattcaggcaccttctggtacacaactggaggtacccattccagaaatgggtcagaatggacaaaagaaataccagatcaatctaaagagtcattcaggacctatccatgtgctgcttataaataaagagtcgagttcatctaagcccgtggtttttcctgttcccccacctgatgacctcacacagccttcctcccagtccttgactccagtgactccacagaaatccagcatggcaactcaaaatctgcctgagcaacatgtctctgaaagaagccaggctctgcagcagacatcagctacagatatatcttcagcaggatctattagtggagatatcattgatgagttaatgtcttctgacgtgtttcctctcttaaggctttctcctaccccggcagatgactacaactttaatttagatgataacgaaggagtttgtgatctgtttgatgtccagatactaaattattagattccatggaaacttgggactgttatctacctctaactgtgtaacattttagacttcttaataacctaaatatttaaaataatgaatgtaacaccttttttagttcactgattctgaagtgttcttccctaatactttctttacttcacaaaacttcaaccataaaaacaaagggctctgattgctttaggggataagtgatttaatatccacaaacgtccccactcccaaaagtaactatattctggatttcaacttttcttctaattgtgaatccttctgttttttcttcttaaggaggaaagttaaaggacactacaggtcatcaaaaacaagttggccaaggactcattacttgtcttatatttttactgccactaaactgcctgtatttctgtatgtccttctatccaaacagacgttcactgccacttgtaaagtgaaggatgtaaacgaggatatataactgtttcagtgaacagattttgtgaagtgccttctgttttagcactttaagtttatcacattttgttgacttctgacattccactttcctaggttataggaaagatctgtttatgtagtttgtttttaaaatgtgccaatgcctgtacattaacaagatttttaaaaataaaattgtataaaacattc

SEQ ID NO: 122392 - DNA, 1094 bp, Artificial Sequence
  derived and/or modified sequence
aagcaagcctcttataggcagcataagttgagtgtttttaaaaatccatttaactactttgcctttttattggagaacttaatccacttacgttcagggttatcattcataggctgctgatactttggctgtgaggcaaaaaaggagaatttatgatatcaccaatgtcttagagggaattgacttgattgaaaaaaagtcaaaaaacagtatccagtggaaaggtgtaggtgctggctgtaatactaaagaagtcatagatagattaagatatcttaaagctgaaattgaagatctagaactgaaggaaagagaacttgatcagcagaagttgtggctacagcaaagcatcaaaaatgtgatggacgattccattaataatagattttcctatgtaactcatgaagacatctgtaattgctttaatggtgatacacttttggccattcaggcaccttctggtacacaactggaggtacccattccagaaatgggtcagaatggacaaaagaaataccagatcaatctaaagagtcattcaggacctatccatgtgctgcttataaataaagagtcgagttcatctaagcccgtggtttttcctgttcccccacctgatgacctcacacagccttcctcccagtccttgactccagtgactccacagaaatccagcatggcaactcaaaatctgcctgagcaacatgtctctgaaagaagccaggctctgcagcagacatcagctacagatatatcttcagcaggatctattagtggagatatcattgatgagttaatgtcttctgacgtgtttcctctcttaaggctttctcctaccccggcagatgactacaactttaatttagatgataacgaaggagtttgtgatctgtttgatgtccagatactaaattattagattccatggaaacttgggactgttatctacctctaactgtgtaacattttagacttcttaataacctaaatatttaaaataatgaatgtaacaccttttttagttcactgattctgaagtgttcttccctaatactttctttacttcacaaaacttcaaccataaaaacaaaggg

SEQ ID NO: 122393 - DNA, 1044 bp, Artificial Sequence
  derived and/or modified sequence
atggccgccgccgagcccgccagcagcggccagcaggcccccgccggccagggccagggccagagaccccccccccagcccccccaggcccaggccccccagccccccccccccccccagctgggcggcgccggcggcggcagcagcagacacgagaagagcctgggcctgctgaccaccaagttcgtgagcctgctgcaggaggccaaggacggcgtgctggacctgaaggccgccgccgacaccctggccgtgagacagaagagaagaatctacgacatcaccaacgtgctggagggcatcgacctgatcgagaagaagagcaagaacagcatccagtggaagggcgtgggcgccggctgcaacaccaaggaggtgatcgacagactgagatacctgaaggccgagatcgaggacctggagctgaaggagagagagctggaccagcagaagctgtggctgcagcagagcatcaagaacgtgatggacgacagcatcaacaacagaaccttcagctacgtgacccacgaggacatctgcaactgcttcaacggcgacaccctgctggccatccaggcccccagcggcacccagctggaggtgcccatccccgagatgggccagaacggccagaagaagtaccagatcaacctgaagagccacagcggccccatccacgtgctgctgatcaacaaggagagcagcagcagcaagcccgtggtgttccccgtgcccccccccgacgacctgacccagcccagcagccagagcctgacccccgtgaccccccagaagagcagcatggccacccagaacctgcccgagcagcacgtgagcgagagaagccaggccctgcagcagaccagcgccaccgacatcagcagcgccggcagcatcagcggcgacatcatcgacgagctgatgagcagcgacgtgttccccctgctgagactgagccccacccccgccgacgactacaacttcaacctggacgacaacgagggcgtgtgcgacctgttcgacgtgcagatcctgaactactag

SEQ ID NO: 122394 - protein, 876 aa, Artificial Sequence
  derived and/or modified sequence
MGPEALSSLLLLLLVASGDADMKGHFDPAKCRYALGMQDRTIPDSDISASSSWSDSTAARHSRLESSDGDGAWCPAGSVFPKEEEYLQVDLQRLHLVALVGTQGRHAGGLGKEFSRSYRLRYSRDGRRWMGWKDRWGQEVISGNEDPEGVVLKDLGPPMVARLVRFYPRADRVMSVCLRVELYGCLWRDGLLSYTAPVGQTMYLSEAVYLNDSTYDGHTVGGLQYGGLGQLADGVVGLDDFRKSQELRVWPGYDYVGWSNHSFSSGYVEMEFEFDRLRAFQAMQVHCNNMHTLGARLPGGVECRFRRGPAMAWEGEPMRHNLGGNLGDPRARAVSVPLGGRVARFLQCRFLFAGPWLLFSEISFISDVVNNSSPALGGTFPPAPWWPPGPPPTNFSSLELEPRGQQPVAKAEGSPTAILIGCLVAIILLLLLIIALMLWRLHWRRLLSKAERRVLEEELTVHLSVPGDTILINNRPGPREPPPYQEPRPRGNPPHSAPCVPNGSAYSGDYMEPEKPGAPLLPPPPQNSVPHYAEADIVTLQGVTGGNTYAVPALPPGAVGDGPPRVDFPRSRLRFKEKLGEGQFGEVHLCEVDSPQDLVSLDFPLNVRKGHPLLVAVKILRPDATKNARNDFLKEVKIMSRLKDPNIIRLLGVCVQDDPLCMITDYMENGDLNQFLSAHQLEDKAAEGAPGDGQAAQGPTISYPMLLHVAAQIASGMRYLATLNFVHRDLATRNCLVGENFTIKIADFGMSRNLYAGDYYRVQGRAVLPIRWMAWECILMGKFTTASDVWAFGVTLWEVLMLCRAQPFGQLTDEQVIENAGEFFRDQGRQVYLSRPPACPQGLYELMLRCWSRESEQRPPFSQLHRFLAEDALNTV

SEQ ID NO: 122395 - protein, 441 aa, Artificial Sequence
  derived and/or modified sequence
MEFEFDRLRAFQAMQVHCNNMHTLGARLPGGVECRFRRGPAMAWEGEPMRHNLGGNLGDPRARAVSVPLGGRVARFLQCRFLFAGPWLLFSEISFISDVVNNSSPALGGTFPPAPWWPPGPPPTNFSSLELEPRGQQPVAKAEGSPTAILIGCLVAIILLLLLIIALMLWRLHWRRLLSKVLESHPRTRSPGLVGIRPTPLPVSPMALRCCSPIQPTASFWPLTPVPLEARAPPHPPGPNPPTPRGVTGGNTYAVPALPPGAVGDGPPRVDFPRSRLRFKEKLGEGQFGEVHLCEVDSPQDLVSLDFPLNVRKGHPLLVAVKILRPDATKNARNDFLKEVKIMSRLKDPNIIRLLGVCVQDDPLCMITDYMENGDLNQFLSAHQLEDKAAEGAPGDGQAAQGPTISYPMLLHVAAQIASGMRYLATLNFVHFWGERHRFLH

SEQ ID NO: 122396 - protein, 493 aa, Artificial Sequence
  derived and/or modified sequence
SEAVYLNDSTYDGHTVGGLQYGGLGQLADGVVGLDDFRKSQELRVWPGYDYVGWSNHSFSSGYVEMEFEFDRLRAFQAMQVHCNNMHTLGARLPGGVECRFRRGPAMAWEGEPMRHNLGGNLGDPRARAVSVPLGGRVARFLQCRFLFAGPWLLFSEISFISDVVNNSSPALGGTFPPAPWWPPGPPPTNFSSLELEPRGQQPVAKAEGSPTAILIGCLVAIILLLLLIIALMLWRLHWRRLLSKVLESHPRTRSPGLVGIRPTPLPVSPMALRCCSPIQPTASFWPLTPVPLEARAPPHPPGPNPPTPRGVTGGNTYAVPALPPGAVGDGPPRVDFPRSRLRFKEKLGEGQFGEVHLCEVDSPQDLVSLDFPLNVRKGHPLLVAVKILRPDATKNARNDFLKEVKIMSRLKDPNIIRLLGVCVQDDPLCMITDYMENGDLNQFLSAHQLEDKAAEGAPGDGQAAQGPTISYPMLLHVAAQIASGMRYLATLN

SEQ ID NO: 122397 - protein, 493 aa, Artificial Sequence
  derived and/or modified sequence
SEAVYLNDSTYDGHTVGGLQYGGLGQLADGVVGLDDFRKSQELRVWPGYDYVGWSNHSFSSGYVEMEFEFDRLRAFQAMQVHCNNMHTLGARLPGGVECRFRRGPAMAWEGEPMRHNLGGNLGDPRARAVSVPLGGRVARFLQCRFLFAGPWLLFSEISFISDVVNNSSPALGGTFPPAPWWPPGPPPTNFSSLELEPRGQQPVAKAEGSPTAILIGCLVAIILLLLLIIALMLWRLHWRRLLSKVLESHPRTRSPGLVGIRPTLLPVSPMALRCCSPIQPTASFWPLTPVPLEARAPPHPPGPNPPTPRGVTGGNTYAVPALPPGAVGDGPPRVDFPRSRLRFKEKLGEGQFGEVHLCEVDSPQDLVSLDFPLNVRKGHPLLVAVKILRPDATKNARNDFLKEVKIMSRLKDPNIIRLLGVCVQDDPLCMITDYMENGDLNQFLSAHQLEDKAAEGAPGDGQAAQGPTISYPMLLHVAAQIASGMRYLATLN

SEQ ID NO: 122398 - protein, 441 aa, Artificial Sequence
  derived and/or modified sequence
MEFEFDRLRAFQAMQVHCNNMHTLGARLPGGVECRFRRGPAMAWEGEPMRHNLGGNLGDPRARAVSVPLGGRVARFLQCRFLFAGPWLLFSEISFISDVVNNSSPALGGTFPPAPWWPPGPPPTNFSSLELEPRGQQPVAKAEGSPTAILIGCLVAIILLLLLIIALMLWRLHWRRLLSKVLESHPRTRSPGLVGIRPTLLPVSPMALRCCSPIQPTASFWPLTPVPLEARAPPHPPGPNPPTPRGVTGGNTYAVPALPPGAVGDGPPRVDFPRSRLRFKEKLGEGQFGEVHLCEVDSPQDLVSLDFPLNVRKGHPLLVAVKILRPDATKNARNDFLKEVKIMSRLKDPNIIRLLGVCVQDDPLCMITDYMENGDLNQFLSAHQLEDKAAEGAPGDGQAAQGPTISYPMLLHVAAQIASGMRYLATLNFVHFWGERHRFLH

SEQ ID NO: 122399 - DNA, 1326 bp, Artificial Sequence
  derived and/or modified sequence
atggagttcgagttcgaccggctgcgggccttccaggccatgcaggtccattgtaacaacatgcacacactgggggcaagactgcctggtggcgtggagtgtcggttcagacgcggcccggccatggcttgggaaggagagcccatgcgccataacctgggaggaaatctcggggacccaagagcacgggctgtcagcgtacctctggggggccgagtagcgaggttcctacagtgcaggttcctgtttgccgggccctggttgttattttccgaaatctcctttatcagcgatgtggtcaataactcttctcctgccctgggcggaacatttccccccgcaccttggtggccccccggacccccccctacgaacttttcgtctctggagctcgaacctcgcggccagcagcccgtggccaaggcagaggggagccccaccgcaatactgatcgggtgtctcgttgctataatcctccttttgctgctgatcatagctcttatgctgtggcgactgcactggcggaggctactgtcgaaggtactggaatctcatcccagaacacggagccctggtcttgttggtatacgccctactccccttccagtgagccccatggcactgcgatgctgctcccccattcagcctaccgcctcattctggccactcacccctgtgccactggaggcgcgcgcgcccccacatcccccaggaccaaaccctcccaccccacgaggcgtcaccggtggtaatacatatgctgtgccggccctgcctcccggcgctgtaggcgacggaccacccagagtagactttccccggagtaggctgagattcaaggagaagctcggcgagggtcaattcggtgaagtgcacctgtgtgaggtggattccccacaggacttagtgtcccttgacttcccccttaatgtgagaaaaggccatcccctgctcgtggcagtgaagatcctgcggcctgatgctactaaaaatgcccgaaacgacttcctgaaggaggtgaagattatgagccgacttaaagacccgaacatcattcgactgctcggggtgtgcgtacaggacgacccgttatgcatgatcactgattatatggaaaacggtgaccttaaccaatttctatctgcgcaccagctggaagataaggcagctgaaggtgcccccggcgacggccaagcagcccagggacctaccatctcatacccaatgctgttgcacgttgctgcccagatagcatcaggcatgcggtatttggctaccctgaactttgtacatttttggggcgagcggcacagattcctacattag

SEQ ID NO: 122400 - DNA, 1326 bp, Artificial Sequence
  derived and/or modified sequence
atggagttcgagttcgaccggctgcgggccttccaggccatgcaggtacactgtaataacatgcacacgctcggcgccagactacctggtggagtagagtgccggttcagacggggtcccgcaatggcatgggagggcgagcctatgcgccacaacctcggcggaaacttgggcgatccccgcgcccgggctgtatccgtccctttaggaggccgcgtggccagattcttacagtgtcgcttcctctttgcaggcccatggctcctgttcagcgagatctccttcatctctgacgtggtgaacaacagtagccccgcgttaggtggtactttcccccccgcaccttggtggccccccggcccaccccctaccaacttttcgagcctggagttggaaccccgggggcagcagccagtggctaaagctgagggctcacctaccgccatcctgataggctgtctggtggcaatcattctcctgctcctactgataatagccctgatgctgtggagactccactggaggcgcctactatctaaagtgcttgagagtcatccgcggacaaggtcccctggattggtgggaattcgccccacaccgttaccggtatcaccaatggccctgagatgttgcagtcctattcagccaactgcatccttctggccactgacgcctgtcccgctagaagcccgtgcgcccccgcatcctcccggcccgaatccacccactccacgcggggtcacaggggggaacacctacgccgtacccgcactcccaccaggggccgtcggagatgggccacctagagttgactttccaaggtccaggctcagattcaaagagaagctcggtgaaggacagttcggagaagtgcatctatgcgaggtcgattccccccaggatttagtgagccttgattttccactgaacgtacggaaaggccatcccctattggtggccgttaagatacttcgcccagatgcaacaaaaaacgctaggaacgattttctaaaagaagtcaaaattatgtcaagactaaaagacccaaacattatccggttgttgggtgtgtgtgttcaggacgaccccttgtgtatgatcacagactacatggagaatggcgatcttaaccagtttctgagcgcccatcagctagaggataaagcagcagagggtgcacctggggatggccaggctgctcagggacccacgataagttatccgatgctccttcatgtggcggcccaaattgcgtccggcatgcgctatctcgcaactctgaatttcgtgcatttctggggtgagcgtcaccgttttctccattag

SEQ ID NO: 122401 - DNA, 1326 bp, Artificial Sequence
  derived and/or modified sequence
atggagttcgagttcgaccggctgcgggccttccaggccatgcaggttcattgcaataatatgcatacgttgggagcccggttgccaggaggtgttgagtgtagattcaggagggggcccgccatggcgtgggagggggagcccatgcggcataatctgggaggaaacttgggcgacccaagagctagagccgtgagcgtgcctcttggtggacgggtcgccagatttctgcaatgcagatttctgttcgccgggccttggttactctttagcgagataagcttcatcagtgatgttgttaacaatagttcacctgcattgggcggaacgttccctcctgctccatggtggcctcctgggccgccccccacgaatttttccagcctggagctggaaccccgaggccaacagccggttgccaaagccgaaggatctccaacagccatcctgatcgggtgcttggtggccattattcttctgctcctgctaataatcgctctcatgttgtggagactccattggcgacgcttactgagcaaagtgttagagagccaccctagaacacgcagccccggtttggtaggaatccgaccaacaccattacctgtgtcaccaatggcgttacggtgctgctccccaatacagcctacagcttccttctggcctctgacaccagtgccactggaagcacgcgctccccctcaccctcccgggccaaatccccctactccccgaggagtgaccggtggcaatacttatgccgtcccagccctgccaccaggggccgtaggtgacgggcctcctcgggttgattttccgcgaagtcgactgcgctttaaggagaagctgggagagggccagtttggagaagtgcatttgtgtgaagtggactcacctcaggatctggtgagcttggactttccattaaacgttagaaaaggtcatccactccttgttgcagtcaagattttgcggcctgacgccaccaagaacgcacgaaatgactttctcaaggaggttaagatcatgagccgcctgaaggacccaaacattatcaggctcctgggtgtgtgcgtacaggatgaccccctttgtatgattaccgactatatggagaatggcgacctaaatcaattcctgtccgcccaccagttagaggataaagcggccgaaggggccccgggcgacggacaagcagcgcagggaccaacgatcagttatcccatgctcctccacgtggcggcacagatagcttcaggcatgcggtatctggccaccttgaactttgtgcatttctggggggaaagacacaggttcctgcattag

SEQ ID NO: 122402 - DNA, 1326 bp, Artificial Sequence
  derived and/or modified sequence
atggagttcgagttcgaccggctgcgggccttccaggccatgcaggtacactgcaacaatatgcacaccctgggagcgcgcctgcccggcggagtggagtgccgattcagaagaggacccgcaatggcctgggaaggtgagcctatgcggcataacctgggaggaaatttgggggaccccagagctagagctgtgagcgtgccactcgggggccgggtagcacggttcctgcagtgccgattcttattcgcgggcccatggctcctgttctccgaaatctcattcattagcgacgtagtgaacaattcgtcacctgccctcggcggaaccttcccacctgctccatggtggcctccaggaccaccgcctacaaactttagcagcctagaactcgagccccgcggccaacagcccgtagcaaaagctgaaggatccccaacagccatattgattgggtgcctggtcgccatcatcttgctcctattactgatcatagccctcatgctgtggcggttacactggcgtcgtcttctcagtaaggtgctggaatcccacccgcgcacccggtcccccggattagtgggtattagaccaaccctgcttcctgtctctccaatggctctgagatgctgcagccctattcagccgacagccagcttctggccactgactcccgtgccactcgaagccagagctccgccccatcccccaggtcccaatcctccgacacccagaggggttaccggcgggaatacatacgccgtgcccgcccttcctccaggggccgttggcgacgggcccccacgggtagactttccacgctccagactgcggtttaaggaaaaactcggtgagggacagtttggggaagtgcacttgtgtgaggtagactcacctcaagatcttgtgtctttagactttcccctgaacgtccggaagggccatccccttcttgtcgcagtgaagatactcagaccagacgccaccaagaacgctagaaacgacttcctaaaggaggtgaaaattatgagcaggctgaaagatccaaatatcatccgccttcttggagtgtgtgtgcaggacgaccccctgtgtatgatcacagactacatggagaacggagacctgaaccaatttttatccgcacaccagctagaagataaggcggccgagggagcaccgggggatggacaggctgcccagggccctaccattagctatccaatgctgctgcatgtggccgcccagatcgcttccggaatgagatacctcgccaccctgaacttcgtgcatttttggggagaaaggcataggtttctgcattag

SEQ ID NO: 122403 - DNA, 1326 bp, Artificial Sequence
  derived and/or modified sequence
atggaatttgagttcgatcggctgcgcgcattccaggcaatgcaggttcactgtaataacatgcacactctgggtgctcggcttcctggtggtgtggaatgtcgattccgccgaggacccgctatggcctgggaaggcgaaccaatgcgccataacctgggaggaaatctcggcgatccgcgtgcaagggctgtatcggtccccctcgggggtcgggtggctagattcttacagtgccgattccttttcgctgggccttggctcctcttcagcgaaattagctttatcagcgacgttgtcaacaactcctctcctgccctggggggaaccttcccccctgctccctggtggcctcccggtccaccaccaacaaacttttcaagcctcgagctggaacccaggggacagcagccggtagccaaagctgaggggagccctaccgcaatcctaatcggctgccttgtggctatcatcttgctgctgctcctgataattgccctgatgctgtggaggttacactggaggcgattgttgtctaaggtgcttgaaagtcacccccgaacccggagccccggactcgtggggatccggcctacacctttgcccgtttctcctatggcactcaggtgctgcagccctattcagccaactgcgtctttctggccacttacccctgtccccttggaggcgcgtgctccgcctcaccccccaggcccaaaccctcccaccccccgtggtgtgactggtgggaacacatatgccgtccctgccttaccacccggagcggtcggcgatggccctccccgtgtagattttccaagaagtcgcttgcgcttcaaggagaaacttggtgaggggcagtttggcgaagtccacctttgtgaggtggacagcccacaggacctggtgagcctggactttcccctgaatgtaagaaagggtcaccctctgctagttgcagtgaagatcctgcggcctgacgctaccaaaaacgcacgaaatgattttctcaaagaggtgaagatcatgtcacgtcttaaagatcccaatatcatccgcctacttggtgtctgtgtgcaggacgaccctttatgtatgatcaccgactacatggagaatggtgatcttaatcagtttctttcagctcaccagctggaggacaaggctgctgagggcgcaccaggagacggtcaggctgcccagggtccgaccatctcctaccctatgctgctgcacgtggctgcccagattgcttctgggatgcgctacttagctactctaaactttgtgcacttctggggggagaggcatcgctttctgcattag

SEQ ID NO: 122404 - DNA, 1326 bp, Artificial Sequence
  derived and/or modified sequence
atggagttcgagtttgataggctgcgcgcttttcaggccatgcaggtccattgtaacaatatgcacaccctgggcgctcggctccctgggggtgtggagtgccgattcagacgcggaccagctatggcgtgggaaggagagccaatgcggcataacctgggcggaaaccttggggaccccagggccagagctgtctctgtccctttggggggtagagtggcacggttccttcagtgtaggttcctgttcgccggtccatggctgctgttcagcgagatctcatttatttctgacgtggttaataattcgtctcccgcactggggggaacttttcctcccgcaccatggtggcctcccggacccccacctactaatttcagtagcctggaactggaacccagaggtcaacagcccgtggcaaaggctgagggctctcctacagccatcctcataggctgtctggtggcaattatattgctcttgctgctaatcatcgcacttatgctgtggcggctgcactggagacgcctcctgtctaaagtgttggaatcccaccccagaacccggtcccccggactggtcgggatcaggcccacacccctgcccgtttctccaatggccttgaggtgttgctctcccattcagcccactgcttcattttggccactcacaccagttccattagaggccagggcccctccccatcctcccggaccaaacccccctacacctcgcggagtgactgggggaaacacctacgccgtgccggcactcccccctggagccgtgggcgatgggcctcccagggtggacttcccgagatcccggctgcggtttaaagagaaactgggggagggccagttcggcgaggtccatctgtgcgaagtggactcccctcaggacttggtcagcctggatttcccgctcaatgtgcgcaaaggacacccactcctggtcgccgtgaaaatcctgaggcctgatgccacgaagaacgccagaaacgactttttgaaggaggtaaagataatgtcacgcctgaaagacccgaatattattcgcctactgggcgtctgcgttcaggatgaccctctctgcatgatcacggattacatggaaaacggggatctgaatcagtttctctccgctcaccagctggaagataaagccgctgaaggcgctcccggtgacgggcaggccgcacagggaccaactatcagttacccgatgctgctccatgtggctgctcaaattgcttcaggcatgcgctatctagccacactcaatttcgttcacttttggggcgagagacaccggttccttcattag

SEQ ID NO: 122405 - DNA, 1326 bp, Artificial Sequence
  derived and/or modified sequence
atggaatttgaattcgacagactgcgcgcattccaagcaatgcaagtgcattgcaacaacatgcacacactgggagctaggttgcccggtggggtggaatgcagattccgaaggggccctgccatggcatgggaaggagagcctatgcggcataatttaggcggaaatttgggcgacccgagagcgagggctgtctctgtgccactaggcggacgggtggcaaggttcctgcagtgccggttcctgttcgccggtccgtggctgcttttttctgaaatctcctttatctccgacgtcgtgaacaattcatccccggcactgggcggtaccttccctcctgccccatggtggcctcccggtcccccacccactaacttcagctctctcgagctggagccgagagggcagcaacccgtggctaaagccgaaggaagccccaccgctatcctgatcgggtgtctggtggccataatactcctccttttgctcatcatcgccctgatgctgtggcgactgcactggagacgcctcctttctaaggtgttggaatcacatcctaggacccgcagcccgggattagttggaatccgtccgacgccgctgccagtttcacctatggctttgcggtgctgcagcccgatccaaccgaccgccagtttttggccccttacgccagtgccattggaagccagagcaccccctcacccccctggtcccaacccgccaacacccagaggagtgaccggaggtaatacatacgcagtgcctgccctgcccccaggagccgtgggagacggaccgccacgtgttgacttcccccgttctcgcctgagattcaaagagaagctgggggagggacagtttggcgaggtgcatttgtgtgaggtcgattccccgcaggacttagtttcattggattttcctctaaacgtgcgaaaggggcacccgctgttggtggctgtcaagatcttgcggccagacgctacaaagaacgctcggaatgacttcctgaaggaggtcaaaatcatgtcaagactgaaagatcccaatatcattagactgctaggcgtctgcgtacaagacgacccactgtgcatgataacggattatatggaaaacggagacctgaaccaattcctaagcgcccatcagttggaggataaagctgcagagggggctcctggtgacggccaagccgctcagggtccaaccatcagttacccaatgcttcttcatgtcgccgcacagattgcctccggaatgaggtacctcgcgaccttaaacttcgtgcacttctggggagagaggcacaggtttctgcactag

SEQ ID NO: 122406 - DNA, 1326 bp, Artificial Sequence
  derived and/or modified sequence
atggaatttgagttcgaccgcctgcgggctttccaggccatgcaagtgcactgcaataatatgcacaccctaggcgcacggcttcctgggggagtggagtgtaggttccgcagaggccctgccatggcttgggagggtgagcctatgaggcataacctcggaggtaatctgggcgaccccagggcgagagcagtgtccgtccctttagggggaagggttgcccgatttctgcagtgccggttcctttttgcgggtccgtggctcctcttctctgaaatctcgtttattagcgacgtggtaaataattcctcacccgctctcggcggaacatttccccctgccccttggtggccaccaggtccacctcctaccaatttcagtagcctggaactcgaacctcgtggacagcagccagttgccaaggccgaggggtccccaactgccattctgatcggctgcctggtcgccattatcctgctgctactccttatcatcgcgctcatgctctggcggcttcattggaggagactgctgtccaaggtcctggagagccaccccagaaccagatcccctgggcttgtagggattagacctacaccattgcccgtcagccctatggcactgaggtgttgtagccctattcaaccgaccgcctccttttggccattgacacctgtacccctcgaggctcgagcacctccacacccgccaggccctaatccgcctacacctaggggagtgactggcggaaatacgtatgctgtaccagctctgccacctggggctgtgggtgacggccctccacgggttgacttcccacgttcacgactcaggtttaaagaaaagttaggagagggccagttcggggaggtccatctctgcgaagtggatagcccgcaggacctcgtctccttggactttcccctgaacgtcagaaagggccaccccctgctggtggccgtgaagattttgcgcccagatgccacgaaaaatgcacgcaacgattttttaaaggaggtcaaaataatgtcacggctgaaggatcccaacatcatccgcctccttggcgtgtgcgtccaggatgaccctttatgcatgataactgactatatggaaaatggcgacctcaaccaattcttgtcggcccaccagcttgaagacaaggccgctgagggagcccctggtgacggacaggccgcacagggtcctacaataagctatccgatgctgctgcacgtcgccgctcagattgccagcgggatgagatatctggctaccctcaattttgttcacttttggggagaacgtcaccgatttctacactag

SEQ ID NO: 122407 - DNA, 1326 bp, Artificial Sequence
  derived and/or modified sequence
atggagttcgaattcgataggttgcgtgcatttcaggccatgcaggtccattgcaacaacatgcacactctcggcgcaaggttacctggaggagtcgaatgtcgatttcggagggggcctgcaatggcctgggagggagagcctatgcgccacaacctagggggaaatctgggcgacccgagagcccgtgccgtgtctgtccccctaggtggcagggtggcaaggttcttgcagtgccgatttctattcgctgggccttggctccttttttcggagatttcatttatctccgatgtagtgaacaactcatctccagccctgggcggaacatttccaccagccccttggtggcctccgggaccaccccctacaaattttagcagcctggaacttgagccacggggacagcagcccgtagccaaggctgagggatcgccgaccgcaatccttataggctgtctggtggctatcatcctactgttacttctaatcatcgctctcatgctgtggcgattacattggcgaaggctgctttcaaaggtgctggaaagtcaccctcggacaaggagccccggtctggtcggcatcagaccaacactgctgcccgtgtcaccaatggccctacgatgctgttccccaatccagcccaccgcaagcttctggcctctcacacccgtgccgctggaagccagagcgcctccccacccacccggacctaaccctccgaccccacgcggtgttacaggcggaaatacgtatgccgtgccagccctgccgccaggcgctgtaggagacggtcccccacgggtggatttccctaggtcaagattacgctttaaggagaaactcggggagggtcaatttggggaagttcacctgtgcgaggtagactccccccaggacctggtgtccctggatttccctctgaatgtgcggaaaggccaccctctgctggtagctgttaagattctgcggcctgacgcaaccaagaatgcacgaaacgatttcttaaaagaggtgaagatcatgtcacgcctgaaggaccctaacatcatacgactcctgggagtgtgcgtgcaggacgatcccctgtgcatgatcaccgattacatggagaacggggacctgaaccagttcctgtcagcacaccagctcgaagataaagctgcagaaggggctcctggggacggccaagctgcccaaggtcccacaatctcctatcccatgctgctccatgttgcggctcagatcgctagtggtatgaggtacctcgccacccttaatttcgtccatttttggggcgaacgccaccgctttttgcactag

SEQ ID NO: 122408 - DNA, 1326 bp, Artificial Sequence
  derived and/or modified sequence
atggagttcgagttcgacagactgagggcgttccaggccatgcaggtccattgcaataatatgcatacattgggcgcccggttacctggaggagtggagtgtcgattcagacgcgggcctgcaatggcatgggaaggagagccaatgagacataacttaggtggtaaccttggcgacccgagagctagggccgtttcagttcctctgggcgggagagttgccagattccttcagtgtcgctttctcttcgccggcccttggttgctttttagcgagattagctttatcagtgatgtcgtgaataactctagcccagctcttggagggacattccccccggccccctggtggcctcctggtcctcccccgacaaatttctcttcgttggagctcgagcctagaggacagcaaccagtcgcaaaggccgaaggatctccaaccgcaatcctcattggctgtcttgtcgccattatcctgctgttacttctaattatagcgttgatgctatggcgtctgcattggcgcagactcttgtctaaagtactcgagagccacccacgaaccagatcacccggcctcgtaggcataagaccaactccattgcccgtgagccccatggcacttcgatgttgtagtcccatccagcctacggctagtttctggccactgactcctgttcctctagaagcccgggcacccccacatcctcccggacctaacccacctactccacgaggagtgaccggcggtaatacctacgcagtgcctgcccttccccctggagccgtgggggacggaccacctagggtggacttcccacgttctagactgaggtttaaggagaaattgggagagggccagtttggtgaggtacacctatgcgaggtcgattctcctcaggacctggtgagcctggattttcctttgaacgtgagaaaaggtcatccactgttggttgccgtgaaaattctacgcccagacgctactaaaaacgcccggaacgatttcctgaaggaggtgaaaattatgtcccggctcaaagaccccaacatcatcagattactgggagtatgcgttcaggacgacccactgtgcatgattaccgattatatggagaacggagaccttaaccagtttctaagtgcacaccaactcgaggataaggctgctgagggcgctccaggtgatggacaggcggcacagggccctactatttcttaccctatgctgctacatgtggcggctcagatcgcgagcgggatgcgctatctggccacgctaaactttgtgcatttctggggcgagcgccaccgcttcctacactag

SEQ ID NO: 122409 - DNA, 1326 bp, Artificial Sequence
  derived and/or modified sequence
atggagtttgaattcgacagacttagagcgttccaggcgatgcaggtccattgtaataatatgcatacactgggcgcacggctgcctgggggcgtggagtgcagattcagaaggggacccgcgatggcctgggaaggggaaccaatgaggcacaacctgggcggaaacctgggtgatccaagggccagggcagtttcggtgcctctaggaggacgagtggcacgtttcctgcagtgtcggttcctgttcgcagggccttggttgctgttctccgaaatctcctttatctcagatgtggttaacaactccagccccgccctcggagggactttccccccagccccatggtggccaccgggtcctcctcccacaaacttctcctcactggaactggaaccacgcggtcaacagcccgttgcaaaagctgaaggttcccccaccgccatcctgataggctgtctggtagccatcatcctgcttttgctgctaattatagcgctgatgctttggcgactgcactggcgccgtctgcttagcaaggtactagagtcacatccgcgaacaagatctcccggcttagtaggcatacgccccacccccttgcccgtgagtccgatggcactccgatgctgtagccccattcaacccaccgcctccttctggccattaaccccagtcccgcttgaggcgcgcgcgccgccgcacccccccggacccaacccccccacaccgaggggtgtcactgggggaaatacatacgctgtgcctgctctgccccccggcgctgttggagacggacccccaagagtggattttccaagatcaagactgcgattcaaggagaagctcggtgaaggccagtttggcgaagtacatttgtgtgaagtggatagccctcaagatctggtgtctttggattttccccttaatgtaaggaaagggcaccctctacttgtggccgtgaagatactacgccccgacgcaactaagaacgctcgtaatgattttctgaaggaagtcaaaattatgtctcgattgaaggaccccaacattatcaggctcttgggggtgtgtgtgcaagacgaccccctgtgcatgatcacagattacatggagaacggagacctgaatcagtttttgtctgcgcaccagctggaggacaaggccgccgagggcgctcccggagatggacaggccgcccagggtccaaccatctcctaccccatgctcctgcacgttgcggcgcagatcgcatcaggcatgcgctatctcgcaactctcaatttcgtccacttctggggagaaagacatcgcttcctgcactag

SEQ ID NO: 122410 - DNA, 1326 bp, Artificial Sequence
  derived and/or modified sequence
atggaattcgagttcgaccgcttacgggcgttccaagccatgcaggtgcactgcaataacatgcacactcttggggcaagattgcctggcggcgttgagtgcagatttcgccgggggccagcaatggcctgggaaggcgagcccatgagacacaacctgggcggcaatcttggagatccaagggccagggcggtatctgtgccattaggtgggagagtggctagatttttacagtgtaggtttttgttcgccggaccgtggctgctattctctgagatctcctttatctccgacgtagtgaacaattcctctccagctttaggagggacatttccacccgccccctggtggccaccggggccccccccaactaatttcagcagtttggaactggaaccccgaggccaacagccagtagccaaggcagaaggatctcccacagccatacttatcggctgtctggtggcaattatactgctgctcctcctgataatcgctctcatgctttggcgacttcactggcggaggctgctttctaaagtgctggaatcacatccgcggacgcgatcacctggtttagtgggcattcgccccacccctttgcccgtaagccctatggcgctacgatgttgtagcccaatacagcccactgctagtttctggcccttaactccggtgcccctcgaggccagagcaccgccccatcctcctggcccgaatcctcctacaccccgcggcgttacaggcggaaatacttatgcagttccagccctgcctcctggagcagtcggggatgggccccctagggtggatttcccccgatctaggctgcggtttaaggaaaagttaggagaagggcagttcggcgaagttcacctgtgtgaggtcgattcaccccaggacttagttagtctggactttccactgaacgtgcgaaaagggcatccgttgctcgtcgctgtgaagatactgcgtcccgatgccacaaagaacgctagaaatgatttcctcaaggaggtgaagattatgagcagactcaaggatcccaacattatcaggcttttaggcgtctgcgtccaggacgaccccttgtgcatgattactgactacatggagaacggagatttgaaccagtttctaagcgcccaccagctcgaagataaagccgctgaaggcgccccgggtgatggacaggctgcgcaggggccaacaatcagctatcctatgcttttgcacgtcgcagcccagatcgcatctggcatgagatacctggcgaccctgaatttcgttcacttctggggagaaagacaccgcttccttcactag

SEQ ID NO: 122411 - DNA, 1326 bp, Artificial Sequence
  derived and/or modified sequence
atggagtttgaatttgacagactgcgggctttccaggcgatgcaggtgcattgcaataatatgcacacgttaggggcccgactgcctggcggggttgagtgccggttcagacgcggaccagcaatggcatgggagggcgagcctatgagacataatcttgggggaaacctgggagacccaagggcccgtgccgtcagtgtgccgctgggaggccgggtggcgagattcctgcaatgcagattcctctttgccggcccatggcttctctttagtgaaatctccttcatcagtgatgtggtaaacaacagtagtcccgcgctcggaggcacgttcccacctgctccatggtggcccccaggtccacccccaacaaactttagtagtctagaactcgagccgaggggccaacaacccgttgcgaaggccgagggcagcccaactgccatactcattggatgcctagtagccatcattctgctgctactgctgatcattgcattaatgctatggcggcttcattggaggcggctgcttagcaaggtcctggaatcgcaccccagaacgagatcccctggtttggtcggcattagaccaacacctctgcccgtgtcccccatggcactcagatgctgtagccctatccaacctaccgcttcgttttggccactcacaccggtgcctcttgaggcgcgtgctccccctcatccacccggcccaaatccccccacaccccggggcgtaacagggggtaacacctatgctgttccagcactccctccgggcgcagtgggcgatggcccaccaagggtcgatttcccccgcagtaggctcagatttaaagagaaactgggagaagggcagtttggcgaagtacacctgtgtgaagtggactctccacaggacctggtttcacttgactttcctttaaacgtgcgtaagggccatccactactcgtggcagtaaaaatcctgcggcctgacgcaactaaaaacgctaggaacgatttcctgaaggaggtgaagatcatgtcaaggcttaaggatccgaacattattcgtttgctgggcgtgtgcgtgcaggacgaccctctctgcatgattacagactatatggagaacggagacctgaaccaatttctttcggctcaccaacttgaagacaaagctgcagaaggagcaccaggcgatggacaagctgcacaggggcctactatttcctaccccatgctcctgcatgtggctgcccagattgcctcgggaatgaggtacctcgcaacccttaattttgtacacttttggggagagagacatcgtttcttgcattag

SEQ ID NO: 122412 - DNA, 1326 bp, Artificial Sequence
  derived and/or modified sequence
atggagtttgaattcgatagactgcgagcttttcaggccatgcaggtgcattgcaacaatatgcacaccctaggagctcgtcttcccggtggagtcgagtgtcgatttagaagggggcccgctatggcctgggagggcgaacccatgcgccataatctcggcggtaacttgggagaccctagggcacgcgccgtctcagttcccttggggggcagagtggcccggtttctgcaatgtcgatttctgttcgcagggccttggctcttatttagcgaaatttcctttattagcgacgttgtgaacaactccagcccagctctcggagggacgtttcccccagctccttggtggccccccggaccacctccaacgaacttttcttctctggaattagagccaagaggccagcagccagtggcgaaggcagaaggttcgccaacggccatactgattggatgtctggtggcaataatcctgctcctgttgctcattattgccctcatgttatggcgcctgcactggaggcgcctgctcagtaaagtactggagagtcacccaagaactcgcagcccagggttagtcggcatccgacccacgctgctacccgtgtcccccatggctcttaggtgctgctccccgatacagcccaccgcctctttttggccgttaacacctgttcccctcgaggcacgagccccaccccacccacccggccctaacccccccaccccgcgaggagtgaccggcggaaacacatacgcagtgcccgccctcccaccaggcgccgtgggtgatggtcctcctcgcgtcgacttcccaagaagcagactgcggtttaaagaaaaacttggcgagggccagtttggagaggttcatctgtgtgaagtagattcaccacaggacctagtctctctggatttccccctgaacgttagaaaaggtcatcccctgctggtcgccgtgaagatcctgaggcccgacgccacaaaaaacgcccggaacgatttcctgaaggaggttaagataatgagtcgcctgaaggatccaaacatcatccgtttgcttggcgtctgcgttcaggatgaccctctgtgcatgattaccgactatatggagaacggagacttaaatcagttcctcagcgctcaccagttagaggacaaggctgctgaaggcgcccctggtgatgggcaagcagcccaaggacctactatctcatatcccatgctgctgcatgtggctgcacaaatcgcatctggaatgcggtacttagcaacgctaaatttcgtccatttctggggcgaaaggcacaggttcttgcactag

SEQ ID NO: 122413 - DNA, 1326 bp, Artificial Sequence
  derived and/or modified sequence
atggagttcgaatttgatcgactgcgggcctttcaggccatgcaggttcattgcaataacatgcacacgctgggcgcccggcttcctgggggagtcgaatgtaggttccgaagaggaccagctatggcatgggaaggcgagccaatgaggcacaatctggggggaaatctcggagaccctcgggcccgagcagttagtgtaccgttgggaggcagagttgctaggtttctccaatgtaggttcctctttgcaggcccttggttacttttttcagaaatcagttttattagtgacgtagttaataactctagcccagctcttggagggacattccccccggccccctggtggcctcctggtcctcccccgacaaatttctcttcgttggagctcgagcctagaggacagcaaccagtcgcaaaggccgaaggatctccaaccgcaatcctcattggctgtcttgtcgccattatcctgctgttacttctaattatagcgttgatgctatggcgtctgcattggcgcagactcttgtctaaagtactcgagagccacccacgaaccagatcacccggcctcgtaggcataagaccaactccactgcctgtgtcccccatggccctgcgctgttgcagcccaatccaaccaaccgcaagcttttggcctcttacacctgttccattggaagcacgcgcccccccccaccctcctggcccaaacccccctactcctcgcggtgtcaccggaggaaatacttatgctgtgccagctctgccccctggcgccgtgggcgacggccctcctagggttgacttcccccgctcacgattgcgatttaaggagaagcttggagaagggcaatttggagaggttcatctgtgcgaagttgacagccctcaggacctggtatccctggacttcccactgaacgttaggaaaggacatcctctgctggtggctgtgaagattctcaggccagatgctactaagaatgctaggaacgattttctgaaggaggtgaaaataatgagccgactaaaagacccaaatattataaggctgctcggagtttgcgtacaagatgaccccttgtgcatgattacagactatatggaaaacggcgacctaaaccagtttctgtccgctcatcagctggaggacaaagccgcagaaggagctcctggtgatggacaagccgcccaaggccccacaatctcttacccaatgttattgcacgtcgccgcccagattgcctccggtatgcgttatcttgcgactctgaactttgtacacttttggggagagagacaccgatttctgcactag

SEQ ID NO: 122414 - DNA, 1326 bp, Artificial Sequence
  derived and/or modified sequence
atggaattcgaattcgatcgactgagagcttttcaggcaatgcaagtccattgcaacaacatgcatacacttggagcacgactgccaggaggcgtcgaatgtcgttttaggagaggccccgcaatggcctgggaaggcgagcccatgcggcataatttgggcggcaatctgggggacccaagggcacgagcagtgtcagtccctctgggcggtcgagtggctcggttcctgcaatgtcgcttcctgttcgcaggcccgtggctgctgttcagcgaaatctccttcatttctgatgtggtaaataattcctctccagcccttggaggcactttccccccagccccgtggtggcccccaggtcccccccctaccaatttctcatcactggaactcgaaccacgcggccaacaacctgtggccaaagccgaggggagtcccaccgctatactcataggctgtttggtggcaatcattctgttgctcctgctgatcattgccctcatgttgtggaggttgcattggagacgcctgctgagcaaagtgctcgagtcccatccacgcaccaggtcacctggcctagtaggcatcagacccacacccttgcccgtgagtccgatggcactccgatgctgtagccccattcaacccaccgcctccttctggccattaaccccagtcccgcttgaggcgcgcgcgccgccgcacccccccggacccaacccccccacaccgaggggtgtcactgggggaaatacatacgctgtgcctgctctgccccccggcgctgttggagacggacccccaagagtggattttccaagatcaagactgcgattcaaggagaagctcggtgaaggccagtttggcgaagtacatttgtgtgaagtggatagccctcaagacctggtatccttagactttccacttaatgtgagaaaaggacaccccctcctcgtcgctgtgaaaatattgaggccagacgcaactaagaacgcacggaatgatttcctgaaggaagtgaaaattatgagtcgactgaaagatccgaatattattagactcctcggcgtgtgcgtacaggatgaccctctttgcatgattactgactatatggaaaatggagacttaaatcaattcctcagcgcccaccagctcgaagacaaggcggcggagggtgccccaggggacgggcaggctgcgcagggaccaaccatatcttatccaatgctactccatgtcgccgcccaaatagcctccggaatgcggtacctcgcaactctgaatttcgtgcacttttggggcgaaaggcaccgctttctgcattag

SEQ ID NO: 122415 - DNA, 1326 bp, Artificial Sequence
  derived and/or modified sequence
atggagttcgagttcgacagactgagggcattccaggcaatgcaagtgcactgcaacaacatgcataccttgggcgcccgcttaccaggaggggtcgaatgccgctttcgtagaggtccagcaatggcctgggagggagagccaatgcgccacaatttgggcggcaaccttggggatccacgggcccgcgcagtctcagttcctctgggggggagggtggctcggtttctacagtgtagatttttgttcgcgggaccttggctgctgttttctgaaatctctttcatatcagatgtggtcaacaacagctcccccgctctgggaggtaccttcccccccgctccctggtggccccccggaccccctcctaccaactttagttccctggaattagaacctcgaggtcagcaacccgtggccaaggccgaggggtcgcccactgccattctcatcggatgcctggtggctatcatcctgttgttgcttctcataatcgcacttatgttgtggagactgcattggcgaaggcttctaagcaaagtgttagaatctcaccccagaacaaggagcccaggcctcgtcggtataagacctacccctctacccgtgtcacccatggccctgcggtgttgttctcccattcagccaaccgcttcattctggcccctaactcccgtacccttagaagcaagagctccaccccatccccccggcccgaatccacctacaccacggggcgtgactggcggcaatacctacgcagtgccagctctgccgcccggagctgttggtgacggaccgcccagagtggacttccctcgcagtaggttgaggtttaaagaaaaactgggagaaggccagtttggagaggtccacttgtgtgaagtcgacagtccacaggatctcgtgtccctggacttccccctcaacgtaagaaaagggcatcccctcctagttgcggttaaaatcctccgcccagatgcaacaaagaacgctcggaacgattttctgaaggaagtgaagattatgagtagacttaaggatcccaatattatccggcttctaggagtgtgcgtacaagatgaccccctgtgtatgatcaccgactatatggaaaatggcgacctcaaccagtttctcagtgcccaccagctcgaggacaaggccgctgaaggagcgcccggagacggtcaggccgcccagggaccgactatctcttaccccatgctcctccacgttgctgcccagattgccagcggaatgaggtacctcgctactcttaacttcgtacatttctggggcgaacgccaccgtttcctgcattag

SEQ ID NO: 122416 - DNA, 1326 bp, Artificial Sequence
  derived and/or modified sequence
atggaattcgaatttgaccgactgagggcatttcaggcaatgcaagttcactgtaacaatatgcacaccttaggcgccaggctccccggaggcgtcgagtgccggtttcggcgaggacccgccatggcatgggagggtgagcctatgcggcacaatctaggcggtaacctcggagaccccagagcccgagctgtctctgtgcctcttggcggaagagtggcccggtttcttcagtgcaggttcttattcgccggcccatggttgctattctcagaaatatcattcataagtgatgtggtgaacaattccagccccgccttaggtggcaccttccctcctgctccttggtggccaccaggaccgccaccaactaatttttcctcccttgaactggaaccccgcgggcaacagccagtcgccaaagccgaaggttctcctaccgcaattttgataggatgcttggttgcgataatcctgcttctgttactaattatcgccttgatgctgtggcgcctacactggcggagactcctgtctaaggtgttggaatctcaccccaggactagaagcccaggtctagtcggtataagacctacacctcttccagtgtcaccaatggcactccgctgttgttcccccatacaaccaacggcatcattttggccactcacccctgtcccattggaagcacgggctccaccacaccctccaggccctaaccccccaacgccccgcggagtaactggggggaatacgtatgccgttcctgccctaccaccaggcgccgttggcgatggtccacctagagtagatttcccccggtctcggttacggttcaaagaaaaactaggagaggggcagttcggtgaagtgcacctttgcgaagtggacagtccccaagacctggtctccctggacttccctctcaatgtgagaaaaggccatcccctgttggttgcagtcaagatcctccgccctgacgccacaaagaatgcccgcaatgacttcctaaaagaggtgaaaataatgtcacggctgaaagaccctaatataatccgcctcttaggagtttgtgtccaagatgaccccctgtgtatgatcaccgactatatggaaaatggagacctcaaccagttcctatccgcccatcagcttgaggacaaggcggccgagggcgcgcctggcgacggacaagcagcccagggcccaactatttcataccccatgctgttgcacgtagccgctcagatcgcaagtggcatgagataccttgctacacttaatttcgtacacttttggggcgaaagacacagatttctccattag

SEQ ID NO: 122417 - DNA, 1326 bp, Artificial Sequence
  derived and/or modified sequence
atggaattcgagtttgaccggttgagagccttccaagcaatgcaagtccactgcaataacatgcacacgctaggagccaggttacctgggggggtagagtgccggtttagacgaggccccgcgatggcctgggagggtgaaccaatgaggcacaatctgggtggaaacctcggcgatccccgtgcccgcgccgtgtctgtcccgctgggcggtagagtggctagattcctccagtgcaggttcttgtttgcaggaccgtggcttctgttctctgagattagctttatttctgatgttgtgaacaacagtagccccgccttgggagggacttttcccccagcaccatggtggccccctggccctcccccaactaacttttcatcccttgagctagaaccacgtggacaacaacctgtagcaaaagccgaagggtctcctacagctatcctgataggttgcttagtggctatcattctgttacttttactgatcattgccctgatgctgtggagactgcactggagaaggcttctctcaaaggtgcttgagtcccacccccgcacacggtcacccggactagtcgggattaggcctacactgctgcccgtctcacccatggctctgcgctgttgcagcccaatccaacctacagcttccttctggcctttaaccccagtcccacttgaagcgcgcgcaccccctcacccacctggacccaacccgccaactcccagaggagtgaccggaggaaacacatatgccgtgcctgcattacctccaggcgccgttggagacggacctccacgtgttgatttcccaagaagcagacttaggttcaaggagaagttgggcgagggacagttcggcgaggtccacttatgtgaggtcgatagccctcaggatctggtttcgcttgatttcccactcaatgtacgaaagggccacccattattagtggctgtgaaaatactgcgaccagacgctacaaaaaatgctcgtaacgatttcttgaaagaagtgaaaatcatgtctcgacttaaagatcctaacatcattcggctgctcggagtttgcgtccaagacgacccactctgtatgatcaccgactatatggagaatggtgacttaaatcagtttctgagcgcgcaccagcttgaggacaaggccgctgagggtgccccgggcgatggacaagccgcccaagggccgaccatttcgtatccaatgttgctccatgttgccgcacaaattgcctctggtatgcgctacctggccactctaaacttcgttcatttctggggcgagagacatcgcttcctccattag

SEQ ID NO: 122418 - DNA, 1326 bp, Artificial Sequence
  derived and/or modified sequence
atggagttcgagttcgacagactgagagccttccaggccatgcaggtgcactgcaacaacatgcacaccctgggcgccagactgcccggcggcgtggagtgcagattcagaagaggccccgccatggcctgggagggcgagcccatgagacacaacctgggcggcaacctgggcgaccccagagccagagccgtgagcgtgcccctgggcggcagagtggccagattcctgcagtgcagattcctgttcgccggcccctggctgctgttcagcgagatcagcttcatcagcgacgtggtgaacaacagcagccccgccctgggcggcaccttcccccccgccccctggtggccccccggccccccccccaccaacttcagcagcctggagctggagcccagaggccagcagcccgtggccaaggccgagggcagccccaccgccatcctgatcggctgcctggtggccatcatcctgctgctgctgctgatcatcgccctgatgctgtggagactgcactggagaagactgctgagcaaggtgctggagagccaccccagaaccagaagccccggcctggtgggcatcagacccacccccctgcccgtgagccccatggccctgagatgctgcagccccatccagcccaccgccagcttctggcccctgacccccgtgcccctggaggccagagcccccccccacccccccggccccaacccccccacccccagaggcgtgaccggcggcaacacctacgccgtgcccgccctgccccccggcgccgtgggcgacggcccccccagagtggacttccccagaagcagactgagattcaaggagaagctgggcgagggccagttcggcgaggtgcacctgtgcgaggtggacagcccccaggacctggtgagcctggacttccccctgaacgtgagaaagggccaccccctgctggtggccgtgaagatcctgagacccgacgccaccaagaacgccagaaacgacttcctgaaggaggtgaagatcatgagcagactgaaggaccccaacatcatcagactgctgggcgtgtgcgtgcaggacgaccccctgtgcatgatcaccgactacatggagaacggcgacctgaaccagttcctgagcgcccaccagctggaggacaaggccgccgagggcgcccccggcgacggccaggccgcccagggccccaccatcagctaccccatgctgctgcacgtggccgcccagatcgccagcggcatgagatacctggccaccctgaacttcgtgcacttctggggcgagagacacagattcctgcactag

SEQ ID NO: 122419 - DNA, 1326 bp, Artificial Sequence
  derived and/or modified sequence
atggagttcgagttcgacagactgagagccttccaggccatgcaggtgcactgcaacaacatgcacaccctgggcgccagactgcccggcggcgtggagtgcagattcagaagaggccccgccatggcctgggagggcgagcccatgagacacaacctgggcggcaacctgggcgaccccagagccagagccgtgagcgtgcccctgggcggcagagtggccagattcctgcagtgcagattcctgttcgccggcccctggctgctgttcagcgagatcagcttcatcagcgacgtggtgaacaacagcagccccgccctgggcggcaccttcccccccgccccctggtggccccccggccccccccccaccaacttcagcagcctggagctggagcccagaggccagcagcccgtggccaaggccgagggcagccccaccgccatcctgatcggctgcctggtggccatcatcctgctgctgctgctgatcatcgccctgatgctgtggagactgcactggagaagactgctgagcaaggtgctggagagccaccccagaaccagaagccccggcctggtgggcatcagacccaccctgctgcccgtgagccccatggccctgagatgctgcagccccatccagcccaccgccagcttctggcccctgacccccgtgcccctggaggccagagcccccccccacccccccggccccaacccccccacccccagaggcgtgaccggcggcaacacctacgccgtgcccgccctgccccccggcgccgtgggcgacggcccccccagagtggacttccccagaagcagactgagattcaaggagaagctgggcgagggccagttcggcgaggtgcacctgtgcgaggtggacagcccccaggacctggtgagcctggacttccccctgaacgtgagaaagggccaccccctgctggtggccgtgaagatcctgagacccgacgccaccaagaacgccagaaacgacttcctgaaggaggtgaagatcatgagcagactgaaggaccccaacatcatcagactgctgggcgtgtgcgtgcaggacgaccccctgtgcatgatcaccgactacatggagaacggcgacctgaaccagttcctgagcgcccaccagctggaggacaaggccgccgagggcgcccccggcgacggccaggccgcccagggccccaccatcagctaccccatgctgctgcacgtggccgcccagatcgccagcggcatgagatacctggccaccctgaacttcgtgcacttctggggcgagagacacagattcctgcactag

SEQ ID NO: 122420 - DNA, 1326 bp, Artificial Sequence
  derived and/or modified sequence
atggagtttgaattcgaccgactaagggcatttcaggcgatgcaggtgcactgtaataacatgcacaccctgggggcaaggctgcccggaggggtggaatgccgtttccgcaggggccctgccatggcgtgggagggggaaccaatgcgccataacctcggtgggaacttaggcgatccacgggcccgagccgtgtcagtgcccctgggtggccgggtggcgcgttttctgcagtgccggtttttgttcgccggcccatggctgctgtttagtgagataagttttatctctgatgtggtaaataatagttctccagccctgggcggcacctttccacccgcgccctggtggcctcccggtccccctcctactaacttctcttctctggaactggaaccgagggggcagcagccagtcgctaaggctgaaggatccccaaccgccattttaattggatgcttggtagctattatcctcctgctgctgttgatcatcgctctcatgctgtggcgtctccattggcgtcggttgctgagcaaagtccttgagagtcacccccgcacaagatcgccaggcctggtagggattcgacctacaccgcttccggtgtcccctatggctctgagatgttgttcaccaattcaaccaacggctagcttctggccactgacccctgtcccactcgaggcacgagctccacctcacccgccggggcccaaccctcctactcccagaggcgtgacaggaggcaacacctatgcagtgcctgctctaccccctggcgcagtaggtgatggtcccccccgggtggacttcccaagatctcggcttcggtttaaggagaaactgggcgagggccagttcggggaggtccacctatgtgaggttgattcaccccaggatctggtctcccttgacttcccactgaatgtaaggaagggccatccgctactggtcgctgttaagatcctgcggccggacgccactaagaacgctcgcaacgacttcctgaaggaggtgaaaatcatgtctagactcaaggatcctaacataattcggttgttgggggtgtgtgtgcaggatgaccctctgtgcatgattacagactatatggaaaatggggaccttaaccagttcctatctgcccaccaactggaagataaggccgcagagggcgccccaggcgatgggcaggctgctcagggccccacaatctcttacccaatgcttctccatgtggctgcccagatcgcttccgggatgcgatatcttgccaccctcaacttcgtgcatttctggggtgagcggcaccggtttcttcactag

SEQ ID NO: 122421 - DNA, 1326 bp, Artificial Sequence
  derived and/or modified sequence
atggagtttgagttcgatcgactgagagcattccaggccatgcaggttcactgtaacaatatgcataccttaggagctagactaccaggaggggtggaatgtagatttcgccggggccctgcaatggcctgggagggggagcccatgaggcacaacttggggggtaatctaggggatccacgcgctcgggcggtgtcggtgcctctgggggggagagtggctcggtttttacagtgtcgcttcctcttcgccggaccctggcttctgttctctgaaattagcttcatctcagacgtggtcaataactcgagtcctgcactcgggggcaccttcccacccgctccctggtggccgccgggcccgccacccaccaactttagcagcctcgagctggagcccaggggccagcagcccgtcgccaaggctgaggggtcccccactgctatcctgataggatgcctagtcgcaatcattttactccttctgctcatcatcgccctaatgctatggcgcctgcactggagaagactgctgagtaaagttctggagagccatccccgcacaaggagccccgggcttgtaggcattaggcccacccctttgcccgtcagccctatggctctgcggtgttgctcgcctatccagccaactgcgtcgttttggccccttacacctgttcccttagaagccagggcccccccgcacccacctggccctaacccacctacaccccgcggcgtcacaggcggaaatacatacgccgtgcctgcgttaccgcccggcgctgttggagatgggcctccacgtgtggatttccctcggagtagactgcgatttaaggaaaagttgggagagggacagttcggcgaagtccacttatgcgaagtggattcaccgcaagaccttgtgtcactcgatttcccactcaacgtacggaagggacaccccctgctggtcgccgtgaaaatccttcgcccggacgctactaaaaatgcacgcaacgacttccttaaagaagtcaaaattatgagcagacttaaggaccctaacataattcgactattaggagtgtgcgtgcaagatgaccccctgtgcatgatcacagattatatggagaacggtgacctgaaccagttcctaagcgcccaccagttggaggataaggcagcagaaggagcaccaggagacggccaagctgcccagggcccgactatttcatacccaatgctcctccacgtggccgctcaaatcgccagtggaatgcggtacctcgcgactcttaactttgtccacttctggggcgagaggcacaggttccttcactag

SEQ ID NO: 122422 - DNA, 1326 bp, Artificial Sequence
  derived and/or modified sequence
atggagttcgagttcgatcgtcttcgagcttttcaagcaatgcaagtgcactgtaacaacatgcacaccttgggggcacgccttcctgggggcgtcgaatgccgatttcggcgaggccctgcaatggcctgggaaggggagccaatgcgacacaatctgggcggcaacctcggtgacccgagggctagagccgtgtccgttccactaggcggacgagttgcacggttcctgcagtgccgcttcctgtttgccggtccatggcttctattttccgagatttcatttatctctgatgttgtcaacaactccagtcctgctctgggaggaaccttcccacctgccccgtggtggccccccgggcctcctcccaccaacttctccagcctcgaactggagccaagaggtcagcagcccgtcgctaaagcggagggcagccccacagccatcctgataggatgcctcgtggcaatcattctgctgctactgcttattattgctttgatgctctggagactgcactggcgccgcctgctgagcaaggtgctagaaagccaccctcgcaccaggtctcctgggctggttggcataaggcccacccccttgcccgtgtcgcctatggccctgagatgttgttcgcccattcagcccactgccagcttctggccactcacgcccgttcctttggaggccagggcaccaccgcatcccccgggaccgaacccccccaccccccgcggcgtgactggcggtaacacctacgctgtgccagctctgcctccgggcgccgtaggcgatggccccccacgggtcgattttccgcggagcaggctgcgcttcaaagaaaaactgggagaggggcagttcggggaggtgcacctctgtgaagtggactctcctcaagatctggtgagcttggactttccactcaatgttcgcaaaggacaccccttactggtagctgtgaagatcttgagaccagatgccactaagaacgcccggaatgacttcttgaaagaggtcaaaatcatgtcacgtctaaaggatcccaacatcatacgcctgttgggagtctgcgtccaggacgacccactatgcatgattacagattacatggaaaatggggacctgaaccagttcctaagcgcccaccagttggaagacaaagcggccgaaggcgcacccggtgacggccaagcagcccagggccctactattagctatccaatgctcctccatgtcgcggcacagattgcgtccggcatgaggtatcttgctactctgaactttgtccacttctggggtgagagacatcggttcctccactag

SEQ ID NO: 122423 - DNA, 1326 bp, Artificial Sequence
  derived and/or modified sequence
atggaatttgaattcgatagactgagagcatttcaggccatgcaggttcactgcaacaatatgcacaccctgggggccagattgccaggaggagtcgaatgtcggttccgcagaggtcctgcgatggcgtgggagggagaacccatgagacacaatttgggggggaatctcggagacccccgggcccgggccgtttccgtgccactgggtggacgggtcgcacgcttcctgcagtgtcgttttttgttcgccgggccatggctgctgttcagtgaaatctcctttatatcagacgtggtcaacaacagttcccctgcccttgggggcacttttcctccagccccatggtggcctcccggccccccccctactaacttctcgagcctggaactggagccgcggggccagcaacctgtggccaaagccgagggatcaccaactgcaattctcataggctgtctcgtggcaatcatcctgttactactgctcattatcgcactgatgctgtggcggctacactggagaagactactgagcaaggtcctcgagtctcacccacgaactagatctcccggattagtaggcatcagacccactcccctccccgtatctcctatggcactccgctgctgttcacccatccagccaactgcctccttttggccgcttaccccggtccccctggaggctcgggccccaccacacccacccgggcccaatccacccactcccagaggtgttaccggcggaaacacttacgccgtgcccgcactgcctccaggggccgttggcgacggtccacctcgcgtcgattttcctagatctagactgaggttcaaagaaaagttaggcgagggccagttcggtgaggtccatctttgcgaggtagactcaccccaggacctcgtctctctcgactttccgctgaatgtgcgcaaggggcatccgctcctggtggccgtgaagatcctccggcccgatgccacgaaaaatgcccggaatgacttcctgaaggaggtcaagatcatgagtaggctgaaagatccgaacataatcagattactgggtgtttgtgtccaggatgacccgctgtgtatgattaccgattatatggagaacggtgacttgaatcagtttctgtcagctcaccagctcgaggataaagccgcagagggcgcacctggagatggtcaggcggcgcagggaccaactatttcataccccatgctgttacatgttgctgcccagattgcttctggaatgcggtacctggcgaccctgaatttcgtgcatttctggggcgaacgccaccgattccttcattag

SEQ ID NO: 122424 - DNA, 1326 bp, Artificial Sequence
  derived and/or modified sequence
atggagtttgaattcgaccggcttcgtgccttccaagctatgcaggtccactgcaacaatatgcatacactcggagcaaggctccctggtggggtggaatgtaggtttcgccgcggccccgctatggcgtgggagggagagccgatgagacataaccttggcggcaacctcggggaccctcgcgccagggctgtctcggtgcccctgggcggccgggtggctagattcctgcagtgcagattcctgttcgctggtccttggctgctgttcagcgaaatcagcttcatttctgacgtcgttaataacagttcacccgcccttggaggcacctttcctcccgccccttggtggcctcccggtccgcctccgacaaatttttcctctttggagctagagcctagggggcaacagcctgtggcaaaagctgagggcagccccaccgctatcctgattgggtgtctcgttgcgattatcctactgctactcctcatcatcgccttgatgctgtggcgtctccattggagaagactgctctccaaggtgctcgaatctcaccctaggaccagaagccccggattggtaggaattagacccaccctcttgccagtgagcccaatggctttgagatgctgcagccccatccaacccaccgcatcattttggccactaacacccgtccccctcgaggcgagggctcctccacaccctccaggacccaatccgcccactcctcgtggtgtgacaggtggcaacacatatgctgttccagctctgccaccaggggccgtaggggatggtccaccacgggttgactttcctcgtagtcggctgcgtttcaaagagaaacttggcgaaggccagtttggagaagtgcatctgtgcgaagtggacagtcctcaggatctcgtgtctctggacttccccctcaatgtacgcaaaggccatcccctcttggttgcggtgaagatcctccgaccggatgccacgaaaaatgccagaaatgacttcctcaaggaggtcaaaatcatgagcaggctgaaagaccctaacatcataaggctgctcggggtgtgcgtacaggatgaccccctgtgcatgattaccgattatatggagaacggcgaccttaatcagtttttgtccgcccatcagctggaggacaaagccgccgagggggcacctggcgatggccaggcagcgcagggaccaaccattagttaccctatgcttctgcacgtggcggcccagatagcaagcggtatgaggtatctggcaaccttaaactttgtgcacttctggggtgagaggcatcgcttcctgcactag

SEQ ID NO: 122425 - DNA, 1326 bp, Artificial Sequence
  derived and/or modified sequence
atggagtttgaatttgaccggctgcgggccttccaggccatgcaggtgcactgcaacaacatgcacaccctgggcgcccggctgcctggaggagtggagtgccgcttcagaagaggccctgccatggcctgggagggggagcccatgaggcacaacctgggcggcaacctgggggacccccgggcccgggctgtgtctgtgcccctgggcggccgggtggcccgcttcctgcagtgccgcttcctgtttgctggcccctggctgctcttcagcgagatctccttcatcagtgatgtggtgaacaacagcagccctgccctgggcggcaccttccccccagccccctggtggcccccaggccccccacccaccaacttcagcagcctggagctggagccccggggccagcagcctgtggccaaggccgagggcagccccacagccatcctgattggctgcctggtggccatcatcctgctgctgctgctgatcatcgccctgatgctgtggaggctgcactggaggcggctgctgagcaaggtgctggagagccaccccaggaccaggagccctggcctggtgggcatccggcccacccccctgcctgtgagccccatggccctgcgctgctgcagccccatccagcccacagccagcttctggcccctgacccctgtgcccctggaggcccgggccccaccccaccccccaggccccaacccccccaccccccggggcgtgactggaggcaacacctatgctgtgcctgccctgcccccaggagctgtgggagatggccccccccgggtggacttccccaggagccggctgcgcttcaaggagaagctgggggagggccagtttggagaggtgcacctgtgtgaggtggacagcccccaggacctggtgtccctggacttccccctgaatgtgaggaagggccaccccctgctggtggccgtgaagatcctgcggccagatgccaccaagaatgccagaaatgacttcctgaaggaggtgaagatcatgagccggctgaaggaccccaacatcatccggctgctgggcgtgtgtgtgcaggatgaccccctgtgcatgatcacagactacatggagaatggagacctgaaccagttcctgagcgcccaccagctggaggacaaggctgctgagggcgcccctggagatggccaggccgcccagggccccaccatctcctaccccatgctgctgcacgtggccgcccagatcgccagcggcatgagatacctggccaccctgaactttgtgcacttctggggcgagcggcaccgcttcctgcactag

SEQ ID NO: 122426 - DNA, 1326 bp, Artificial Sequence
  derived and/or modified sequence
atggagtttgaatttgaccggctgcgggccttccaggccatgcaggtgcactgcaacaacatgcacaccctgggcgcccggctgcctggaggagtggagtgccgcttcagaagaggccctgccatggcctgggagggggagcccatgaggcacaacctgggcggcaacctgggggacccccgggcccgggctgtgtctgtgcccctgggcggccgggtggcccgcttcctgcagtgccgcttcctgtttgctggcccctggctgctcttcagcgagatctccttcatcagtgatgtggtgaacaacagcagccctgccctgggcggcaccttccccccagccccctggtggcccccaggccccccacccaccaacttcagcagcctggagctggagccccggggccagcagcctgtggccaaggccgagggcagccccacagccatcctgattggctgcctggtggccatcatcctgctgctgctgctgatcatcgccctgatgctgtggaggctgcactggaggcggctgctgagcaaggtgctggagagccaccccaggaccaggagccctggcctggtgggcatccggcccaccctgctgcctgtgagccccatggccctgcgctgctgcagccccatccagcccacagccagcttctggcccctgacccctgtgcccctggaggcccgggccccaccccaccccccaggccccaacccccccaccccccggggcgtgactggaggcaacacctatgctgtgcctgccctgcccccaggagctgtgggagatggccccccccgggtggacttccccaggagccggctgcgcttcaaggagaagctgggggagggccagtttggagaggtgcacctgtgtgaggtggacagcccccaggacctggtgtccctggacttccccctgaatgtgaggaagggccaccccctgctggtggccgtgaagatcctgcggccagatgccaccaagaatgccagaaatgacttcctgaaggaggtgaagatcatgagccggctgaaggaccccaacatcatccggctgctgggcgtgtgtgtgcaggatgaccccctgtgcatgatcacagactacatggagaatggagacctgaaccagttcctgagcgcccaccagctggaggacaaggctgctgagggcgcccctggagatggccaggccgcccagggccccaccatctcctaccccatgctgctgcacgtggccgcccagatcgccagcggcatgagatacctggccaccctgaactttgtgcacttctggggcgagcggcaccgcttcctgcactag

SEQ ID NO: 122427 - DNA, 1326 bp, Artificial Sequence
  derived and/or modified sequence
atggagttcgagttcgaccggctgcgggccttccaggccatgcaggtgcactgcaacaacatgcacacgctcggcgctcgcctgccaggcggggttgaatgcagattccgacggggacctgccatggcctgggaaggcgagcctatgcgccataaccttggaggtaatctgggcgatcctagagcacgtgccgtgtccgtgccattgggaggtcgggtggccagattcttacagtgccggttcctgttcgctggaccctggttgctgttttccgaaatatccttcatctccgacgtggttaataactctagcccagcacttggtgggacctttccgcccgcgccgtggtggccccccggcccgccccccaccaactttagcagtctggagctggagccaagaggtcaacagccagtagcaaaggccgagggctctccaacggccattctgataggctgtctcgttgccatcatacttctcctgctgctaattatcgcactgatgctttggcggttgcactggaggcgcctcttgagcaaagtcttagagtcccacccccgtacccgtagcccaggactcgttggtatcagacccacacctctgcctgtgagtccgatggccttgcggtgctgttctccaatacagcccacggcatctttttggcccctgactcccgtgccactggaggcccgggctcccccacacccccccggacccaaccctcctacacctcgcggggtcacaggcgggaacacttacgctgtacccgcgctcccacctggagccgttggcgatggtccgccccgtgtggacttccctcggagtcggcttcggtttaaagagaagttgggggaaggacagttcggagaggtccacctctgcgaggtagactctccacaggacctagtgtccctcgatttccccctgaatgtcaggaagggccacccactcctggtggccgtcaaaattctcaggcccgatgctactaagaacgctagaaatgattttcttaaagaggtcaagatcatgtccagactgaaggatcctaatatcatacgcttgctgggcgtgtgtgtgcaggacgacccattgtgcatgatcaccgactacatggagaacggcgacctcaatcagttcctgtccgctcatcagctggaggacaaggccgctgagggagccccgggcgacgggcaggcagcccaaggccccaccataagctaccctatgttactgcacgtggcggcacagatcgcttctggtatgcgctaccttgccaccctcaattttgtccatttttggggtgagaggcatagatttctgcactag

SEQ ID NO: 122428 - RNA, 1326 nt, Artificial Sequence
  derived and/or modified sequence
auggaguucgaguucgacagacugagggcguuccaggccaugcagguccauugcaauaauaugcauacauugggcgcccgguuaccuggaggaguggagugucgauucagacgcgggccugcaauggcaugggaaggagagccaaugagacauaacuuaggugguaaccuuggcgacccgagagcuagggccguuucaguuccucugggcgggagaguugccagauuccuucagugucgcuuucucuucgccggcccuugguugcuuuuuagcgagauuagcuuuaucagugaugucgugaauaacucuagcccagcucuuggagggacauuccccccggcccccugguggccuccugguccucccccgacaaauuucucuucguuggagcucgagccuagaggacagcaaccagucgcaaaggccgaaggaucuccaaccgcaauccucauuggcugucuugucgccauuauccugcuguuacuucuaauuauagcguugaugcuauggcgucugcauuggcgcagacucuugucuaaaguacucgagagccacccacgaaccagaucacccggccucguaggcauaagaccaacuccauugcccgugagccccauggcacuucgauguuguagucccauccagccuacggcuaguuucuggccacugacuccuguuccucuagaagcccgggcacccccacauccucccggaccuaacccaccuacuccacgaggagugaccggcgguaauaccuacgcagugccugcccuucccccuggagccgugggggacggaccaccuaggguggacuucccacguucuagacugagguuuaaggagaaauugggagagggccaguuuggugagguacaccuaugcgaggucgauucuccucaggaccuggugagccuggauuuuccuuugaacgugagaaaaggucauccacuguugguugccgugaaaauucuacgcccagacgcuacuaaaaacgcccggaacgauuuccugaaggaggugaaaauuaugucccggcucaaagaccccaacaucaucagauuacugggaguaugcguucaggacgacccacugugcaugauuaccgauuauauggagaacggagaccuuaaccaguuucuaagugcacaccaacucgaggauaaggcugcugagggcgcuccaggugauggacaggcggcacagggcccuacuauuucuuacccuaugcugcuacauguggcggcucagaucgcgagcgggaugcgcuaucuggccacgcuaaacuuugugcauuucuggggcgagcgccaccgcuuccuacacuag

SEQ ID NO: 122429 - RNA, 1326 nt, Artificial Sequence
  derived and/or modified sequence
auggaguuugaauucgacagacuuagagcguuccaggcgaugcagguccauuguaauaauaugcauacacugggcgcacggcugccugggggcguggagugcagauucagaaggggacccgcgauggccugggaaggggaaccaaugaggcacaaccugggcggaaaccugggugauccaagggccagggcaguuucggugccucuaggaggacgaguggcacguuuccugcagugucgguuccuguucgcagggccuugguugcuguucuccgaaaucuccuuuaucucagaugugguuaacaacuccagccccgcccucggagggacuuuccccccagccccaugguggccaccggguccuccucccacaaacuucuccucacuggaacuggaaccacgcggucaacagcccguugcaaaagcugaagguucccccaccgccauccugauaggcugucugguagccaucauccugcuuuugcugcuaauuauagcgcugaugcuuuggcgacugcacuggcgccgucugcuuagcaagguacuagagucacauccgcgaacaagaucucccggcuuaguaggcauacgccccacccccuugcccgugaguccgauggcacuccgaugcuguagccccauucaacccaccgccuccuucuggccauuaaccccagucccgcuugaggcgcgcgcgccgccgcacccccccggacccaacccccccacaccgaggggugucacugggggaaauacauacgcugugccugcucugccccccggcgcuguuggagacggacccccaagaguggauuuuccaagaucaagacugcgauucaaggagaagcucggugaaggccaguuuggcgaaguacauuugugugaaguggauagcccucaagaucuggugucuuuggauuuuccccuuaauguaaggaaagggcacccucuacuuguggccgugaagauacuacgccccgacgcaacuaagaacgcucguaaugauuuucugaaggaagucaaaauuaugucucgauugaaggaccccaacauuaucaggcucuugggggugugugugcaagacgacccccugugcaugaucacagauuacauggagaacggagaccugaaucaguuuuugucugcgcaccagcuggaggacaaggccgccgagggcgcucccggagauggacaggccgcccaggguccaaccaucuccuaccccaugcuccugcacguugcggcgcagaucgcaucaggcaugcgcuaucucgcaacucucaauuucguccacuucuggggagaaagacaucgcuuccugcacuag

SEQ ID NO: 122430 - RNA, 1326 nt, Artificial Sequence
  derived and/or modified sequence
auggaauucgaguucgaccgcuuacgggcguuccaagccaugcaggugcacugcaauaacaugcacacucuuggggcaagauugccuggcggcguugagugcagauuucgccgggggccagcaauggccugggaaggcgagcccaugagacacaaccugggcggcaaucuuggagauccaagggccagggcgguaucugugccauuaggugggagaguggcuagauuuuuacaguguagguuuuuguucgccggaccguggcugcuauucucugagaucuccuuuaucuccgacguagugaacaauuccucuccagcuuuaggagggacauuuccacccgcccccugguggccaccggggccccccccaacuaauuucagcaguuuggaacuggaaccccgaggccaacagccaguagccaaggcagaaggaucucccacagccauacuuaucggcugucugguggcaauuauacugcugcuccuccugauaaucgcucucaugcuuuggcgacuucacuggcggaggcugcuuucuaaagugcuggaaucacauccgcggacgcgaucaccugguuuagugggcauucgccccaccccuuugcccguaagcccuauggcgcuacgauguuguagcccaauacagcccacugcuaguuucuggcccuuaacuccggugccccucgaggccagagcaccgccccauccuccuggcccgaauccuccuacaccccgcggcguuacaggcggaaauacuuaugcaguuccagcccugccuccuggagcagucggggaugggcccccuaggguggauuucccccgaucuaggcugcgguuuaaggaaaaguuaggagaagggcaguucggcgaaguucaccugugugaggucgauucaccccaggacuuaguuagucuggacuuuccacugaacgugcgaaaagggcauccguugcucgucgcugugaagauacugcgucccgaugccacaaagaacgcuagaaaugauuuccucaaggaggugaagauuaugagcagacucaaggaucccaacauuaucaggcuuuuaggcgucugcguccaggacgaccccuugugcaugauuacugacuacauggagaacggagauuugaaccaguuucuaagcgcccaccagcucgaagauaaagccgcugaaggcgccccgggugauggacaggcugcgcaggggccaacaaucagcuauccuaugcuuuugcacgucgcagcccagaucgcaucuggcaugagauaccuggcgacccugaauuucguucacuucuggggagaaagacaccgcuuccuucacuag

SEQ ID NO: 122431 - RNA, 1326 nt, Artificial Sequence
  derived and/or modified sequence
auggaguuugaauuugacagacugcgggcuuuccaggcgaugcaggugcauugcaauaauaugcacacguuaggggcccgacugccuggcgggguugagugccgguucagacgcggaccagcaauggcaugggagggcgagccuaugagacauaaucuugggggaaaccugggagacccaagggcccgugccgucagugugccgcugggaggccggguggcgagauuccugcaaugcagauuccucuuugccggcccauggcuucucuuuagugaaaucuccuucaucagugaugugguaaacaacaguagucccgcgcucggaggcacguucccaccugcuccaugguggcccccagguccacccccaacaaacuuuaguagucuagaacucgagccgaggggccaacaacccguugcgaaggccgagggcagcccaacugccauacucauuggaugccuaguagccaucauucugcugcuacugcugaucauugcauuaaugcuauggcggcuucauuggaggcggcugcuuagcaagguccuggaaucgcaccccagaacgagauccccugguuuggucggcauuagaccaacaccucugcccgugucccccauggcacucagaugcuguagcccuauccaaccuaccgcuucguuuuggccacucacaccggugccucuugaggcgcgugcucccccucauccacccggcccaaauccccccacaccccggggcguaacaggggguaacaccuaugcuguuccagcacucccuccgggcgcagugggcgauggcccaccaagggucgauuucccccgcaguaggcucagauuuaaagagaaacugggagaagggcaguuuggcgaaguacaccugugugaaguggacucuccacaggaccugguuucacuugacuuuccuuuaaacgugcguaagggccauccacuacucguggcaguaaaaauccugcggccugacgcaacuaaaaacgcuaggaacgauuuccugaaggaggugaagaucaugucaaggcuuaaggauccgaacauuauucguuugcugggcgugugcgugcaggacgacccucucugcaugauuacagacuauauggagaacggagaccugaaccaauuucuuucggcucaccaacuugaagacaaagcugcagaaggagcaccaggcgauggacaagcugcacaggggccuacuauuuccuaccccaugcuccugcauguggcugcccagauugccucgggaaugagguaccucgcaacccuuaauuuuguacacuuuuggggagagagacaucguuucuugcauuag

SEQ ID NO: 122432 - RNA, 1326 nt, Artificial Sequence
  derived and/or modified sequence
auggaguuugaauucgauagacugcgagcuuuucaggccaugcaggugcauugcaacaauaugcacacccuaggagcucgucuucccgguggagucgagugucgauuuagaagggggcccgcuauggccugggagggcgaacccaugcgccauaaucucggcgguaacuugggagacccuagggcacgcgccgucucaguucccuuggggggcagaguggcccgguuucugcaaugucgauuucuguucgcagggccuuggcucuuauuuagcgaaauuuccuuuauuagcgacguugugaacaacuccagcccagcucucggagggacguuucccccagcuccuugguggccccccggaccaccuccaacgaacuuuucuucucuggaauuagagccaagaggccagcagccaguggcgaaggcagaagguucgccaacggccauacugauuggaugucugguggcaauaauccugcuccuguugcucauuauugcccucauguuauggcgccugcacuggaggcgccugcucaguaaaguacuggagagucacccaagaacucgcagcccaggguuagucggcauccgacccacgcugcuacccgugucccccauggcucuuaggugcugcuccccgauacagcccaccgccucuuuuuggccguuaacaccuguuccccucgaggcacgagccccaccccacccacccggcccuaacccccccaccccgcgaggagugaccggcggaaacacauacgcagugcccgcccucccaccaggcgccgugggugaugguccuccucgcgucgacuucccaagaagcagacugcgguuuaaagaaaaacuuggcgagggccaguuuggagagguucaucugugugaaguagauucaccacaggaccuagucucucuggauuucccccugaacguuagaaaaggucauccccugcuggucgccgugaagauccugaggcccgacgccacaaaaaacgcccggaacgauuuccugaaggagguuaagauaaugagucgccugaaggauccaaacaucauccguuugcuuggcgucugcguucaggaugacccucugugcaugauuaccgacuauauggagaacggagacuuaaaucaguuccucagcgcucaccaguuagaggacaaggcugcugaaggcgccccuggugaugggcaagcagcccaaggaccuacuaucucauaucccaugcugcugcauguggcugcacaaaucgcaucuggaaugcgguacuuagcaacgcuaaauuucguccauuucuggggcgaaaggcacagguucuugcacuag

SEQ ID NO: 122433 - RNA, 1326 nt, Artificial Sequence
  derived and/or modified sequence
auggaguucgaauuugaucgacugcgggccuuucaggccaugcagguucauugcaauaacaugcacacgcugggcgcccggcuuccugggggagucgaauguagguuccgaagaggaccagcuauggcaugggaaggcgagccaaugaggcacaaucuggggggaaaucucggagacccucgggcccgagcaguuaguguaccguugggaggcagaguugcuagguuucuccaauguagguuccucuuugcaggcccuugguuacuuuuuucagaaaucaguuuuauuagugacguaguuaauaacucuagcccagcucuuggagggacauuccccccggcccccugguggccuccugguccucccccgacaaauuucucuucguuggagcucgagccuagaggacagcaaccagucgcaaaggccgaaggaucuccaaccgcaauccucauuggcugucuugucgccauuauccugcuguuacuucuaauuauagcguugaugcuauggcgucugcauuggcgcagacucuugucuaaaguacucgagagccacccacgaaccagaucacccggccucguaggcauaagaccaacuccacugccugugucccccauggcccugcgcuguugcagcccaauccaaccaaccgcaagcuuuuggccucuuacaccuguuccauuggaagcacgcgcccccccccacccuccuggcccaaaccccccuacuccucgcggugucaccggaggaaauacuuaugcugugccagcucugcccccuggcgccgugggcgacggcccuccuaggguugacuucccccgcucacgauugcgauuuaaggagaagcuuggagaagggcaauuuggagagguucaucugugcgaaguugacagcccucaggaccugguaucccuggacuucccacugaacguuaggaaaggacauccucugcugguggcugugaagauucucaggccagaugcuacuaagaaugcuaggaacgauuuucugaaggaggugaaaauaaugagccgacuaaaagacccaaauauuauaaggcugcucggaguuugcguacaagaugaccccuugugcaugauuacagacuauauggaaaacggcgaccuaaaccaguuucuguccgcucaucagcuggaggacaaagccgcagaaggagcuccuggugauggacaagccgcccaaggccccacaaucucuuacccaauguuauugcacgucgccgcccagauugccuccgguaugcguuaucuugcgacucugaacuuuguacacuuuuggggagagagacaccgauuucugcacuag

SEQ ID NO: 122434 - RNA, 1326 nt, Artificial Sequence
  derived and/or modified sequence
auggaauucgaauucgaucgacugagagcuuuucaggcaaugcaaguccauugcaacaacaugcauacacuuggagcacgacugccaggaggcgucgaaugucguuuuaggagaggccccgcaauggccugggaaggcgagcccaugcggcauaauuugggcggcaaucugggggacccaagggcacgagcagugucagucccucugggcggucgaguggcucgguuccugcaaugucgcuuccuguucgcaggcccguggcugcuguucagcgaaaucuccuucauuucugaugugguaaauaauuccucuccagcccuuggaggcacuuuccccccagccccgugguggcccccagguccccccccuaccaauuucucaucacuggaacucgaaccacgcggccaacaaccuguggccaaagccgaggggagucccaccgcuauacucauaggcuguuugguggcaaucauucuguugcuccugcugaucauugcccucauguuguggagguugcauuggagacgccugcugagcaaagugcucgagucccauccacgcaccaggucaccuggccuaguaggcaucagacccacacccuugcccgugaguccgauggcacuccgaugcuguagccccauucaacccaccgccuccuucuggccauuaaccccagucccgcuugaggcgcgcgcgccgccgcacccccccggacccaacccccccacaccgaggggugucacugggggaaauacauacgcugugccugcucugccccccggcgcuguuggagacggacccccaagaguggauuuuccaagaucaagacugcgauucaaggagaagcucggugaaggccaguuuggcgaaguacauuugugugaaguggauagcccucaagaccugguauccuuagacuuuccacuuaaugugagaaaaggacacccccuccucgucgcugugaaaauauugaggccagacgcaacuaagaacgcacggaaugauuuccugaaggaagugaaaauuaugagucgacugaaagauccgaauauuauuagacuccucggcgugugcguacaggaugacccucuuugcaugauuacugacuauauggaaaauggagacuuaaaucaauuccucagcgcccaccagcucgaagacaaggcggcggagggugccccaggggacgggcaggcugcgcagggaccaaccauaucuuauccaaugcuacuccaugucgccgcccaaauagccuccggaaugcgguaccucgcaacucugaauuucgugcacuuuuggggcgaaaggcaccgcuuucugcauuag

SEQ ID NO: 122435 - RNA, 1326 nt, Artificial Sequence
  derived and/or modified sequence
auggaguucgaguucgacagacugagggcauuccaggcaaugcaagugcacugcaacaacaugcauaccuugggcgcccgcuuaccaggaggggucgaaugccgcuuucguagagguccagcaauggccugggagggagagccaaugcgccacaauuugggcggcaaccuuggggauccacgggcccgcgcagucucaguuccucugggggggaggguggcucgguuucuacaguguagauuuuuguucgcgggaccuuggcugcuguuuucugaaaucucuuucauaucagauguggucaacaacagcucccccgcucugggagguaccuucccccccgcucccugguggccccccggacccccuccuaccaacuuuaguucccuggaauuagaaccucgaggucagcaacccguggccaaggccgaggggucgcccacugccauucucaucggaugccugguggcuaucauccuguuguugcuucucauaaucgcacuuauguuguggagacugcauuggcgaaggcuucuaagcaaaguguuagaaucucaccccagaacaaggagcccaggccucgucgguauaagaccuaccccucuacccgugucacccauggcccugcgguguuguucucccauucagccaaccgcuucauucuggccccuaacucccguacccuuagaagcaagagcuccaccccauccccccggcccgaauccaccuacaccacggggcgugacuggcggcaauaccuacgcagugccagcucugccgcccggagcuguuggugacggaccgcccagaguggacuucccucgcaguagguugagguuuaaagaaaaacugggagaaggccaguuuggagagguccacuugugugaagucgacaguccacaggaucucgugucccuggacuucccccucaacguaagaaaagggcauccccuccuaguugcgguuaaaauccuccgcccagaugcaacaaagaacgcucggaacgauuuucugaaggaagugaagauuaugaguagacuuaaggaucccaauauuauccggcuucuaggagugugcguacaagaugacccccuguguaugaucaccgacuauauggaaaauggcgaccucaaccaguuucucagugcccaccagcucgaggacaaggccgcugaaggagcgcccggagacggucaggccgcccagggaccgacuaucucuuaccccaugcuccuccacguugcugcccagauugccagcggaaugagguaccucgcuacucuuaacuucguacauuucuggggcgaacgccaccguuuccugcauuag

SEQ ID NO: 122436 - RNA, 1326 nt, Artificial Sequence
  derived and/or modified sequence
auggaauucgaauuugaccgacugagggcauuucaggcaaugcaaguucacuguaacaauaugcacaccuuaggcgccaggcuccccggaggcgucgagugccgguuucggcgaggacccgccauggcaugggagggugagccuaugcggcacaaucuaggcgguaaccucggagaccccagagcccgagcugucucugugccucuuggcggaagaguggcccgguuucuucagugcagguucuuauucgccggcccaugguugcuauucucagaaauaucauucauaagugauguggugaacaauuccagccccgccuuagguggcaccuucccuccugcuccuugguggccaccaggaccgccaccaacuaauuuuuccucccuugaacuggaaccccgcgggcaacagccagucgccaaagccgaagguucuccuaccgcaauuuugauaggaugcuugguugcgauaauccugcuucuguuacuaauuaucgccuugaugcuguggcgccuacacuggcggagacuccugucuaagguguuggaaucucaccccaggacuagaagcccaggucuagucgguauaagaccuacaccucuuccagugucaccaauggcacuccgcuguuguucccccauacaaccaacggcaucauuuuggccacucaccccugucccauuggaagcacgggcuccaccacacccuccaggcccuaaccccccaacgccccgcggaguaacuggggggaauacguaugccguuccugcccuaccaccaggcgccguuggcgaugguccaccuagaguagauuucccccggucucgguuacgguucaaagaaaaacuaggagaggggcaguucggugaagugcaccuuugcgaaguggacaguccccaagaccuggucucccuggacuucccucucaaugugagaaaaggccauccccuguugguugcagucaagauccuccgcccugacgccacaaagaaugcccgcaaugacuuccuaaaagaggugaaaauaaugucacggcugaaagacccuaauauaauccgccucuuaggaguuuguguccaagaugacccccuguguaugaucaccgacuauauggaaaauggagaccucaaccaguuccuauccgcccaucagcuugaggacaaggcggccgagggcgcgccuggcgacggacaagcagcccagggcccaacuauuucauaccccaugcuguugcacguagccgcucagaucgcaaguggcaugagauaccuugcuacacuuaauuucguacacuuuuggggcgaaagacacagauuucuccauuag

SEQ ID NO: 122437 - RNA, 1326 nt, Artificial Sequence
  derived and/or modified sequence
auggaauucgaguuugaccgguugagagccuuccaagcaaugcaaguccacugcaauaacaugcacacgcuaggagccagguuaccuggggggguagagugccgguuuagacgaggccccgcgauggccugggagggugaaccaaugaggcacaaucuggguggaaaccucggcgauccccgugcccgcgccgugucugucccgcugggcgguagaguggcuagauuccuccagugcagguucuuguuugcaggaccguggcuucuguucucugagauuagcuuuauuucugauguugugaacaacaguagccccgccuugggagggacuuuucccccagcaccaugguggcccccuggcccucccccaacuaacuuuucaucccuugagcuagaaccacguggacaacaaccuguagcaaaagccgaagggucuccuacagcuauccugauagguugcuuaguggcuaucauucuguuacuuuuacugaucauugcccugaugcuguggagacugcacuggagaaggcuucucucaaaggugcuugagucccacccccgcacacggucacccggacuagucgggauuaggccuacacugcugcccgucucacccauggcucugcgcuguugcagcccaauccaaccuacagcuuccuucuggccuuuaaccccagucccacuugaagcgcgcgcacccccucacccaccuggacccaacccgccaacucccagaggagugaccggaggaaacacauaugccgugccugcauuaccuccaggcgccguuggagacggaccuccacguguugauuucccaagaagcagacuuagguucaaggagaaguugggcgagggacaguucggcgagguccacuuaugugaggucgauagcccucaggaucugguuucgcuugauuucccacucaauguacgaaagggccacccauuauuaguggcugugaaaauacugcgaccagacgcuacaaaaaaugcucguaacgauuucuugaaagaagugaaaaucaugucucgacuuaaagauccuaacaucauucggcugcucggaguuugcguccaagacgacccacucuguaugaucaccgacuauauggagaauggugacuuaaaucaguuucugagcgcgcaccagcuugaggacaaggccgcugagggugccccgggcgauggacaagccgcccaagggccgaccauuucguauccaauguugcuccauguugccgcacaaauugccucugguaugcgcuaccuggccacucuaaacuucguucauuucuggggcgagagacaucgcuuccuccauuag

SEQ ID NO: 122438 - protein, 212 aa, Artificial Sequence
  derived and/or modified sequence
MDYLLMIFSLLFVACQGAPETAVLGAELSAVGENGGEKPTPSPPWRLRRSKRCSCSSLMDKECVYFCHLDIIWVNTPEHVVPYGLGSPRSKRALENLLPTKATDRENRCQCASQKDKKCWNFCQAGKELRAEDIMEKDWNNHKKGKDCSKLGKKCIYQQLVRGRKIRRSSEEHLRQTRSETMRNSVKSSFHDPKLKGKPSRERYVTHNRAHW

SEQ ID NO: 122439 - DNA, 639 bp, Artificial Sequence
  derived and/or modified sequence
atggactacctgctgatgatcttcagcctgctgttcgtggcctgccagggcgcccccgagaccgccgtgctgggcgccgagctgagcgccgtgggcgagaacggcggcgagaagcccacccccagccccccctggagactgagaagaagcaagagatgcagctgcagcagcctgatggacaaggagtgcgtgtacttctgccacctggacatcatctgggtgaacacccccgagcacgtggtgccctacggcctgggcagccccagaagcaagagagccctggagaacctgctgcccaccaaggccaccgacagagagaacagatgccagtgcgccagccagaaggacaagaagtgctggaacttctgccaggccggcaaggagctgagagccgaggacatcatggagaaggactggaacaaccacaagaagggcaaggactgcagcaagctgggcaagaagtgcatctaccagcagctggtgagaggcagaaagatcagaagaagcagcgaggagcacctgagacagaccagaagcgagaccatgagaaacagcgtgaagagcagcttccacgaccccaagctgaagggcaagcccagcagagagagatacgtgacccacaacagagcccactggtag

SEQ ID NO: 122440 - DNA, 2033 bp, Artificial Sequence
  derived and/or modified sequence
acgcgcctctgcatctgcgccaggcgaacgggtcctgcgcctcctgcagtcccagctctccaccgccgcgtgcgcctgcagacgctccgctcgctgccttctctcctggcaggcgctgccttttctccccgttaaaagggcacttgggctgaaggatcgctttgagatctgaggaacccgcagcgctttgagggacctgaagctgtttttcttcgttttcctttgggttcagtttgaacgggaggtttttgatccctttttttcagaatggattatttgctcatgattttctctctgctgtttgtggcttgccaaggagctccagaaacagcagtcttaggcgctgagctcagcgcggtgggtgagaacggcggggagaaacccactcccagtccaccctggcggctccgccggtccaagcgctgctcctgctcgtccctgatggataaagagtgtgtctacttctgccacctggacatcatttgggtcaacactcccgagcacgttgttccgtatggacttggaagccctaggtccaagagagccttggagaatttacttcccacaaaggcaacagaccgtgaaaatagatgccaatgtgctagccaaaaagacaagaagtgctggaatttttgccaagcaggaaaagaactcagggctgaagacattatggagaaagactggaataatcataagaaaggaaaagactgttccaagcttgggaaaaagtgtatttatcagcagttagtgagaggaagaaaaatcagaagaagttcagaggaacacctaagacaaaccaggtcggagaccatgagaaacagcgtcaaatcatcttttcatgatcccaagctgaaaggcaagccctccagagagcgttatgtgacccacaaccgagcacattggtgacagaccttcggggcctgtctgaagccatagcctccacggagagccctgtggccgactctgcactctccaccctggctgggatcagagcaggagcatcctctgctggttcctgactggcaaaggaccagcgtcctcgttcaaaacattccaagaaaggttaaggagttcccccaaccatcttcactggcttccatcagtggtaactgctttggtctcttctttcatctggggatgacaatggacctctcagcagaaacacacagtcacattcgaattcgggtggcatcctccggagagagagagaggaaggagattccacacaggggtggagtttctgacgaaggtcctaagggagtgtttgtgtctgactcaggcgcctggcacatttcagggagaaactccaaagtccacacaaagattttctaaggaatgcacaaattgaaaacacactcaaaagacaaacatgcaagtaaagaaaaaaaaaagaaagacttttgtttaaatttgtaaaatgcaaaactgaatgaaactgttactaccataaatcaggatatgtttcatgaatatgagtctacctcacctatattgcactctggcagaagtatttcccacatttaattattgcctccccaaactcttcccacccctgctgccccttcctccatcccccatactaaatcctagcctcgtagaagtctggtctaatgtgtcagcagtagatataatattttcatggtaatctactagctctgatccataagaaaaaaaagatcattaaatcaggagattccctgtccttgatttttggagacacaatggtatagggttgtttatgaaatatattgaaaagtaagtgtttgttacgctttaaagcagtaaaattattttcctttatataaccggctaatgaaagaggttggattgaattttgatgtacttatttttttatagatatttatattcaaacaatttattccttatatttaccatgttaaatatctgtttgggcaggccatattggtctatgtatttttaaaatatgtatttctaaatgaaattgagaacatgctttgttttgcctgtcaaggtaatgactttagaaaataaatatttttttccttactgta

SEQ ID NO: 122441 - DNA, 639 bp, Artificial Sequence
  derived and/or modified sequence
atggactatctgctcatgatcttctctctgctcttcgtcgcttgccaaggcgcacccgagacagctgttctcggcgccgaactgtcagccgtgggcgagaatggcggcgagaagcctacccccagccccccttggaggctgcggcgttccaagaggtgctcttgtagctcactcatggataaggagtgcgtgtacttctgccacttagacattatctgggtgaacactcccgaacacgtcgtcccttatggactggggtcaccaaggagcaaacgcgccttagagaacctgctgcctaccaaagccactgaccgcgaaaacaggtgccaatgtgccagtcagaaggataagaaatgttggaatttctgccaggcaggtaaagaacttagggctgaagacattatggaaaaagactggaacaaccacaagaaaggaaaggactgctctaagttaggcaaaaaatgtatttatcagcagttagttaggggccgcaagataaggcggtcttctgaggaacaccttaggcagactaggagcgagacaatgaggaactctgtgaagtccagttttcacgatcccaagctgaaaggaaagccctcccgcgaacgttatgtgactcataatcgcgcacactggtag

SEQ ID NO: 122442 - DNA, 639 bp, Artificial Sequence
  derived and/or modified sequence
atggactacctgctgatgatcttcagcctgctgtttgtggcctgccagggcgcccctgagacagctgtgctgggcgctgagctgtctgctgtgggagaaaatggaggagagaagcccacccccagccccccctggaggctgcggcgcagcaagcgctgcagctgcagcagcctgatggacaaggaatgtgtgtacttctgccacctggacatcatctgggtgaacaccccagagcacgtggtgccctacggcctgggcagccccaggagcaagagggccctggagaacctgctgcccaccaaggccacagaccgggagaaccgctgccagtgtgccagccagaaggacaagaagtgctggaacttctgccaggccggcaaggagctgcgggcagaggacatcatggagaaggactggaacaaccacaagaagggcaaggactgcagcaagctgggcaagaagtgcatctaccagcagctggtgcggggcaggaagatcagaagaagcagcgaggagcacctgcggcagaccaggtctgagaccatgagaaattctgtgaagagcagcttccatgaccccaagctgaagggcaagcccagccgggagcgctacgtgacccacaacagagcccactggtag

SEQ ID NO: 122443 - DNA, 639 bp, Artificial Sequence
  derived and/or modified sequence
atggactacctgctgatgatcttcagcctgctgttcgtggcctgccagggtgctcccgagacagcagtgttgggagctgaactgtcagccgtgggcgagaatggaggtgagaagccgacaccaagccccccatggcggctacggcgcagcaagcgttgttcttgctcttccttgatggacaaggaatgtgtgtatttttgtcacctggacattatctgggtcaatactccggaacatgtggtcccttatgggttgggctccccgaggtctaaacgggcattggagaatttgttgcctacaaaggccacagaccgcgagaacaggtgccagtgtgcgagtcagaaggacaagaagtgctggaacttctgtcaggcggggaaggaactccgagctgaagatattatggagaaagattggaataaccataagaagggtaaagactgcagcaagctgggtaagaagtgcatataccagcagcttgtcaggggacggaagattaggcgcagctcagaggagcatttgcgtcagacacggagtgagaccatgagaaattctgtaaagagtagctttcacgatcccaagctgaaggggaagccatcacgcgagcgttatgtgacccataatagggcacattggtag

SEQ ID NO: 122444 - DNA, 639 bp, Artificial Sequence
  derived and/or modified sequence
atggattatctgctgatgatattctcgctcctcttcgtggcatgccagggcgcacccgagactgcagtgctgggagcagaactatcagccgtcggcgaaaacggcggagagaaacctaccccttcgccgccttggcggctgcgcaggtcaaaaagatgctcctgctcatcgctgatggataaggagtgcgtttatttctgccatctagatattatctgggtgaatacccccgaacatgttgtgccctacggtcttgggtccccacgatcaaaaagggcgctcgagaaccttcttccaaccaaggcaaccgacagggaaaatcgatgtcaatgtgccagtcaaaaggacaagaagtgctggaacttctgccaagctggtaaagagctcagggccgaggatatcatggagaaggactggaacaaccataaaaagggaaaggactgcagcaagctgggtaagaagtgcatctaccagcaacttgtgcgaggcaggaaaatcaggcgaagcagcgaagaacatctacgacagacacggagcgaaacaatgcgtaactcggttaagagcagtttccacgaccccaagctgaaaggcaagccttcacgcgagcgctatgtcactcataacagagctcactggtag

SEQ ID NO: 122445 - protein, 427 aa, Artificial Sequence
  derived and/or modified sequence
METLCLRASFWLALVGCVISDNPERYSTNLSNHVDDFTTFRGTELSFLVTTHQPTNLVLPSNGSMHNYCPQQTKITSAFKYINTVISCTIFIVGMVGNATLLRIIYQNKCMRNGPNALIASLALGDLIYVVIDLPINVFKLLAGRWPFDHNDFGVFLCKLFPFLQKSSVGITVLNLCALSVDRYRAVASWSRVQGIGIPLVTAIEIVSIWILSFILAIPEAIGFVMVPFEYRGEQHKTCMLNATSKFMEFYQDVKDWWLFGFYFCMPLVCTAIFYTLMTCEMLNRRNGSLRIALSEHLKQRREVAKTVFCLVVIFALCWFPLHLSRILKKTVYNEMDKNRCELLSFLLLMDYIGINLATMNSCINPIALYFVSKKFKNCFQSCLCCCCYQSKSLMTSVPMNGTSIQWKNHDQNNHNTDRSSHKDSMN

SEQ ID NO: 122446 - protein, 161 aa, Artificial Sequence
  derived and/or modified sequence
METLCLRASFWLALVGCVISDNPERYSTNLSNHVDDFTTFRGTELSFLVTTHQPTNLVLPSNGSMHNYCPQQTKITSAFKYINTVISCTIFIVGMVGNATLLRIIYQNKCMRNGPNALIASLALGDLIYVVIDLPINVFKVQSSCLLESCSGNWDSFGNCH

SEQ ID NO: 122447 - protein, 187 aa, Artificial Sequence
  derived and/or modified sequence
METLCLRASFWLALVGCVISDNPERYSTNLSNHVDDFTTFRGTELSFLVTTHQPTNLVLPSNGSMHNYCPQQTKITSAFKYINTVISCTIFIVGMVGNATLLRIIYQNKCMRNGPNALIASLALGDLIYVVIDLPINVFKLLAGRWPFDHNDFGVFLCKLFPFLQKSSVGITVLNLCALSVDRKTEM

SEQ ID NO: 122448 - DNA, 1284 bp, Artificial Sequence
  derived and/or modified sequence
atggagaccctctgtttgcgagcatctttttggcttgccttggtagggtgtgttatctccgacaaccccgagaggtattccacaaacctttcgaaccatgtcgatgattttacgacgttccggggcacggaactaagctttctggttacaactcatcagcctactaatcttgtcttaccatccaatggatcaatgcataactattgccctcagcaaaccaaaattacttccgcttttaagtacatcaataccgtgatatcatgtacaatctttattgtcggtatggtgggaaatgcaaccctgctgagaatcatatatcagaataaatgcatgcggaatggccctaacgccctgattgcctccctggcccttggcgacctgatctacgtcgttattgaccttccaattaatgtcttcaaactcctagctggccgctggcctttcgaccacaatgacttcggcgtgttcctctgcaagctttttcccttcctgcaaaaatcaagcgtgggcattactgtcctgaacttatgtgccctcagtgtggaccgataccgggcggtggcgtcctggagtagggtacagggtattgggattcccttagtcactgcaattgagattgtcagcatttggatactgtcctttatcctggctatccctgaggccattggcttcgtgatggtgccctttgaatatcgcggcgagcagcacaagacatgcatgctcaatgccacctcaaaatttatggagttctaccaggatgtcaaagattggtggctttttggcttctacttttgcatgcccctcgtctgtacggcaatcttctacactctgatgacatgtgagatgctgaacaggagaaacggatctttgaggatcgctttgtctgaacacctgaaacagcgtagggaagtagccaagacagttttctgcctggttgtaattttcgccttgtgctggtttcccctccacctcagcagaattctgaagaaaactgtgtacaatgagatggacaagaacaggtgtgagctgctgtcctttcttttactgatggattatatcggtataaatctagcaaccatgaactcctgcatcaatcccatcgctctgtacttcgtgagcaagaaattcaagaattgcttccaaagctgcctgtgctgctgctgttatcagagcaagtctctgatgaccagcgtgcctatgaatggcacttcaatccagtggaagaatcacgaccagaataatcataacacagacagatcctcacacaaagattctatgaactag

SEQ ID NO: 122449 - DNA, 564 bp, Artificial Sequence
  derived and/or modified sequence
atggaaaccttgtgtttgcgagcctccttctggttggccctggtggggtgcgtgatctccgacaaccccgagagatactccaccaatttaagcaaccatgtggatgactttaccactttccgcggtacagagctcagcttcctcgtcaccactcaccagccaactaacctggtgctgccttccaatggctctatgcataattattgcccacagcaaacaaaaataacaagcgctttcaagtacatcaatactgtcatctcttgcactatttttattgttggcatggtgggcaacgcaacattgctccggattatctatcagaacaagtgcatgagaaatgggcccaacgccctcatcgccagcctcgccctgggcgatttgatctacgttgtgatagacctcccaattaacgtattcaagttattggccggaagatggcctttcgatcataacgacttcggtgtgttcctgtgcaaactattcccttttttacagaagtcaagcgtgggtattaccgttttgaacctttgtgctctgtcagtggaccgtaagactgagatgtag

SEQ ID NO: 122450 - DNA, 1284 bp, Artificial Sequence
  derived and/or modified sequence
atggagaccctgtgcctgcgggccagcttctggctggccctggtgggctgtgtgatcagtgacaaccctgagcgctacagcaccaacctgagcaaccacgtggatgacttcaccaccttccggggcacagagctgtccttcctggtgaccacccaccagcccaccaacctggtgctgcccagcaatggctccatgcacaactactgcccccagcagaccaagatcaccagcgccttcaagtacatcaacacagtcatcagctgcaccatcttcatcgtgggcatggtgggcaatgccaccctgctgcgcatcatctaccagaacaagtgcatgagaaatggccccaatgccctgattgccagcctggccctgggggacctgatctacgtggtgattgacctgcccatcaacgtgttcaagctgctggccggccgctggccctttgaccacaatgactttggagtcttcctgtgcaagctgttccccttcctgcagaagagctctgtgggcatcaccgtgctgaacctgtgtgccctgtctgtggaccgctacagagctgtggcctcctggagccgggtgcagggcatcggcatccccctggtgacagccatcgagatcgtgtccatctggatcctgtccttcatcctggccatccctgaggccatcggctttgtgatggtgccctttgagtacagaggagagcagcacaagacctgcatgctgaatgccaccagcaagttcatggagttctaccaggatgtgaaggactggtggctgtttggcttctacttctgcatgcccctggtgtgcacagccatcttctacaccctgatgacctgtgagatgctgaacagaagaaatggcagcctgcgcatcgccctgtctgagcacctgaagcagaggcgggaggtggccaagacagtgttctgcctggtggtgatctttgccctgtgctggttccccctgcacctgagccgcatcctgaagaagacagtgtacaatgagatggacaagaacagatgtgagctgctgtccttcctgctgctgatggactacatcggcatcaacctggccaccatgaacagctgcatcaaccccatcgccctgtactttgtgtccaagaagttcaagaactgcttccagagctgcctgtgctgctgctgctaccagagcaagagcctgatgacctctgtgcccatgaatggcaccagcatccagtggaagaaccacgaccagaacaaccacaacacagacaggagcagccacaaggacagcatgaactag

SEQ ID NO: 122451 - DNA, 564 bp, Artificial Sequence
  derived and/or modified sequence
atggagaccctgtgcctgcgggccagcttctggctggccctggtgggctgtgtgatcagtgacaaccctgagcgctacagcaccaacctgagcaaccacgtggatgacttcaccaccttccggggcacagagctgtccttcctggtgaccacccaccagcccaccaacctggtgctgcccagcaatggctccatgcacaactactgcccccagcagaccaagatcaccagcgccttcaagtacatcaacacagtcatcagctgcaccatcttcatcgtgggcatggtgggcaatgccaccctgctgcgcatcatctaccagaacaagtgcatgagaaatggccccaatgccctgattgccagcctggccctgggggacctgatctacgtggtgattgacctgcccatcaacgtgttcaagctgctggccggccgctggccctttgaccacaatgactttggagtcttcctgtgcaagctgttccccttcctgcagaagagctctgtgggcatcaccgtgctgaacctgtgtgccctgtctgtggacaggaagacagagatgtag

SEQ ID NO: 122452 - DNA, 1284 bp, Artificial Sequence
  derived and/or modified sequence
atggagaccctgtgcctgcgggccagcttctggctggccctggtgggatgcgtcatttccgacaaccctgagcgttattctaccaacctaagtaaccacgtcgatgactttaccacgttccggggcacagagctaagtttcctcgtgaccacccatcaaccaacaaatctggtactgccttcaaatggaagcatgcataattattgcccccaacaaacaaagatcacttctgcttttaagtatatcaatacagtcatctcatgtactatctttattgtgggaatggtcggtaacgccaccctgctcaggattatttaccaaaataagtgcatgaggaacggccctaatgccctgatcgcctctttggccctgggcgatctgatatacgtggtgattgatttaccgattaatgtgttcaaattactcgctggacgttggccttttgaccacaacgatttcggcgtgtttctttgcaaactgttcccattcctgcagaagagttcagtgggtatcacagtcctgaatctttgcgccctctctgtagaccgataccgggcggtagcaagttggtcccgagtccagggcataggaatcccgctggtgacagcaatagagatcgttagcatctggattttgagcttcatcttggcaatacctgaggccatcggattcgtgatggtgccattcgaataccgcggagaacagcacaaaacctgcatgctaaatgcaacttcaaaattcatggaattttatcaggatgttaaggattggtggctctttgggttctacttctgcatgccgctggtttgtactgcgatattctataccctgatgacctgtgagatgctaaatcgccgcaacgggtctctgaggattgcactgagcgagcacctgaaacagaggcgggaggtagccaaaaccgtgttctgtctcgtggtgatcttcgcactttgctggtttcctctgcacctgtcccggatactcaagaagacagtgtataatgaaatggacaagaatagatgcgagctgctttcgtttctgcttctgatggactacatcggcattaatctggctaccatgaactcttgcatcaatcccatcgctctctatttcgttagtaaaaagtttaagaactgcttccagtcctgcctgtgttgttgttgctaccaatccaagagcctgatgacttccgttcctatgaacgggacaagtattcaatggaaaaaccatgaccaaaacaaccataatacagatagaagcagccacaaggactctatgaactag

SEQ ID NO: 122453 - DNA, 564 bp, Artificial Sequence
  derived and/or modified sequence
atggagaccctgtgcctgcgggccagcttctggctggccctggtgggatgcgtcatttcggataaccccgaacgttacagcaccaacctctccaaccacgttgacgatttcaccactttcagagggacagagctgagctttctggtgaccacgcatcagcctaccaatttggtcctcccttctaacggctcaatgcataactactgccctcaacagactaaaattacctccgccttcaagtatataaataccgtgattagttgcacaatattcattgtgggaatggtgggaaacgcaaccctcctgcggattatctaccagaacaagtgcatgaggaatggccctaatgccttgatcgcatccctcgcactgggggatctgatttatgtggtaatagatctacccataaacgttttcaaactgctggccggcaggtggccttttgatcacaacgattttggggtgttcttgtgcaaattgtttcctttcctgcagaaatcatctgtcgggattaccgtcttgaatctgtgcgctctgagcgtggatcgcaaaaccgagatgtag

SEQ ID NO: 122454 - DNA, 1284 bp, Artificial Sequence
  derived and/or modified sequence
atggagaccctgtgcttgagagcatctttctggctggctcttgtcgggtgtgtcatttcggacaatcccgaacgttattctactaacctgagcaaccacgtcgatgatttcactacattcagaggcaccgagctctctttcctagtgactacacaccagcccacaaatctagtgctgccttctaatggaagcatgcataactattgtcctcaacagacaaagatcacatcagcattcaagtacattaataccgtgataagctgcactatctttattgtgggaatggtgggcaatgctacactgctccgtatcatataccaaaataaatgcatgcggaatgggcctaatgcactgatcgcttctctggctctcggagatctgatttacgtagtgatcgatctgcccattaacgtatttaagctactggccggaaggtggcccttcgaccataatgatttcggcgtgttcctctgcaaattatttccgttcctacagaagtcatctgtgggcatcaccgtcttaaacctatgtgcattatccgtggaccggtatagggctgtggcaagttggtctagggtccaagggatcggcattcccctggtaacagcaatcgagatcgtgtctatttggattttgagctttatccttgccattcccgaagctatcgggttcgtaatggtcccatttgagtatagaggtgaacagcacaaaacatgtatgctgaacgctaccagcaagtttatggaattttaccaagatgtgaaagattggtggctgtttggtttctacttttgtatgcctctcgtgtgcacggcgattttttatacgttaatgacttgcgaaatgctcaaccgaagaaacggttctctccgaatcgccctaagtgagcaccttaaacagcgtagagaggtggctaagactgtattctgcttggtcgtgatattcgccttgtgttggtttccattacacctgtcccggatcctgaaaaaaaccgtttacaacgagatggacaagaaccgttgtgaactgctctcattcctgctgctgatggactatatcggtatcaatttggccaccatgaattcttgcataaacccgattgccctgtattttgtgagcaagaaatttaagaactgctttcagagttgtctttgttgttgctgctaccagtctaagagcctgatgacatccgtgcctatgaatggcaccagcatccagtggaaaaaccacgaccaaaacaaccacaatacggacagatcttctcacaaagacagcatgaactag

SEQ ID NO: 122455 - DNA, 564 bp, Artificial Sequence
  derived and/or modified sequence
atggaaaccctttgcctgcgcgctagcttttggctcgcattggtgggttgtgtcatttctgataatccagaacggtatagcacgaatttgtctaaccacgtggacgattttactacatttaggggaaccgagttgtctttcctcgtcacgacccatcagccaaccaatctcgtgcttcctagcaatggtagcatgcataattattgtccccagcagaccaaaatcacgagtgcttttaagtacattaatacagtaatcagctgcactatcttcatcgtgggtatggttggtaacgcgacactcctgcgaattatttatcaaaacaaatgtatgcgcaatgggccaaatgccctgattgccagccttgcactgggtgacctaatctatgtcgtgatcgacttgcccatcaacgtttttaagctcctggctggacgatggcctttcgaccacaatgactttggagtatttctgtgtaagctgttcccctttctgcagaaatcatccgttggcatcaccgtgcttaacttgtgtgctctctccgtggataggaaaaccgagatgtag

SEQ ID NO: 122456 - DNA, 1284 bp, Artificial Sequence
  derived and/or modified sequence
atggagaccctgtgcctgagagccagcttctggctggccctggtgggctgcgtgatcagcgacaaccccgagagatacagcaccaacctgagcaaccacgtggacgacttcaccaccttcagaggcaccgagctgagcttcctggtgaccacccaccagcccaccaacctggtgctgcccagcaacggcagcatgcacaactactgcccccagcagaccaagatcaccagcgccttcaagtacatcaacaccgtgatcagctgcaccatcttcatcgtgggcatggtgggcaacgccaccctgctgagaatcatctaccagaacaagtgcatgagaaacggccccaacgccctgatcgccagcctggccctgggcgacctgatctacgtggtgatcgacctgcccatcaacgtgttcaagctgctggccggcagatggcccttcgaccacaacgacttcggcgtgttcctgtgcaagctgttccccttcctgcagaagagcagcgtgggcatcaccgtgctgaacctgtgcgccctgagcgtggacagatacagagccgtggccagctggagcagagtgcagggcatcggcatccccctggtgaccgccatcgagatcgtgagcatctggatcctgagcttcatcctggccatccccgaggccatcggcttcgtgatggtgcccttcgagtacagaggcgagcagcacaagacctgcatgctgaacgccaccagcaagttcatggagttctaccaggacgtgaaggactggtggctgttcggcttctacttctgcatgcccctggtgtgcaccgccatcttctacaccctgatgacctgcgagatgctgaacagaagaaacggcagcctgagaatcgccctgagcgagcacctgaagcagagaagagaggtggccaagaccgtgttctgcctggtggtgatcttcgccctgtgctggttccccctgcacctgagcagaatcctgaagaagaccgtgtacaacgagatggacaagaacagatgcgagctgctgagcttcctgctgctgatggactacatcggcatcaacctggccaccatgaacagctgcatcaaccccatcgccctgtacttcgtgagcaagaagttcaagaactgcttccagagctgcctgtgctgctgctgctaccagagcaagagcctgatgaccagcgtgcccatgaacggcaccagcatccagtggaagaaccacgaccagaacaaccacaacaccgacagaagcagccacaaggacagcatgaactag

SEQ ID NO: 122457 - DNA, 564 bp, Artificial Sequence
  derived and/or modified sequence
atggagaccctgtgcctgagagccagcttctggctggccctggtgggctgcgtgatcagcgacaaccccgagagatacagcaccaacctgagcaaccacgtggacgacttcaccaccttcagaggcaccgagctgagcttcctggtgaccacccaccagcccaccaacctggtgctgcccagcaacggcagcatgcacaactactgcccccagcagaccaagatcaccagcgccttcaagtacatcaacaccgtgatcagctgcaccatcttcatcgtgggcatggtgggcaacgccaccctgctgagaatcatctaccagaacaagtgcatgagaaacggccccaacgccctgatcgccagcctggccctgggcgacctgatctacgtggtgatcgacctgcccatcaacgtgttcaagctgctggccggcagatggcccttcgaccacaacgacttcggcgtgttcctgtgcaagctgttccccttcctgcagaagagcagcgtgggcatcaccgtgctgaacctgtgcgccctgagcgtggacagaaagaccgagatgtag

SEQ ID NO: 122458 - DNA, 4135 bp, Artificial Sequence
  derived and/or modified sequence
gtgctttttagtggccgcgtcccaggatagctggaaggttaggacgctcttgcggtcccagagtggagtggaaggtctggagctttgggaggagacggggaggacagactggaggcgtgttcctccggagttttctttttcgtgcgagccctcgcgcgcgcgtacagtcatcccgctggtctgacgattgtggagaggcggtggagaggcttcatccatcccacccggtcgtcgccggggattggggtcccagcgagacctccccgggagaagcagtgcccaggaggttttctgaagccggggaagctgtgcagccgaagccgccgccgcgccggagcccgggacaccggccaccctccgcgccacccaccctcgccggctccggcttcctctggcccaggcgccgcgcggacccggcagctgtctgcgcacgccgagctccacggtgaaaaaaaagtgaaggtgtaaaagcagcacaagtgcaataagagatatttcctcaaatttgcctcaagatggaaaccctttgcctcagggcatccttttggctggcactggttggatgtgtaatcagtgataatcctgagagatacagcacaaatctaagcaatcatgtggatgatttcaccacttttcgtggcacagagctcagcttcctggttaccactcatcaacccactaatttggtcctacccagcaatggctcaatgcacaactattgcccacagcagactaaaattacttcagctttcaaatacattaacactgtgatatcttgtactattttcatcgtgggaatggtggggaatgcaactctgctcaggatcatttaccagaacaaatgtatgaggaatggccccaacgcgctgatagccagtcttgcccttggagaccttatctatgtggtcattgatctccctatcaatgtatttaagctgctggctgggcgctggccttttgatcacaatgactttggcgtatttctttgcaagctgttcccctttttgcagaagtcctcggtggggatcaccgtcctcaacctctgcgctcttagtgttgacaggtacagagcagttgcctcctggagtcgtgttcagggaattgggattcctttggtaactgccattgaaattgtctccatctggatcctgtcctttatcctggccattcctgaagcgattggcttcgtcatggtaccctttgaatataggggtgaacagcataaaacctgtatgctcaatgccacatcaaaattcatggagttctaccaagatgtaaaggactggtggctcttcgggttctatttctgtatgcccttggtgtgcactgcgatcttctacaccctcatgacttgtgagatgttgaacagaaggaatggcagcttgagaattgccctcagtgaacatcttaagcagcgtcgagaagtggcaaaaacagttttctgcttggttgtaatttttgctctttgctggttccctcttcatttaagccgtatattgaagaaaactgtgtataacgagatggacaagaaccgatgtgaattacttagtttcttactgctcatggattacatcggtattaacttggcaaccatgaattcatgtataaaccccatagctctgtattttgtgagcaagaaatttaaaaattgtttccagtcatgcctctgctgctgctgttaccagtccaaaagtctgatgacctcggtccccatgaacggaacaagcatccagtggaagaaccacgatcaaaacaaccacaacacagaccggagcagccataaggacagcatgaactgaccacccttagaagcactcctcggtactcccataatcctctcggagaaaaaaatcacaaggcaactgtgagtccgggaatctcttctctgatccttcttccttaattcactcccacacccaagaagaaatgctttccaaaaccgcaagggtagactggtttatccacccacaacatctacgaatcgtacttctttaattgatctaatttacatattctgcgtgttgtattcagcactaaaaaatggtgggagctgggggagaatgaagactgttaaatgaaaccagaaggatatttactacttttgcatgaaaatagagctttcaagtacatggctagcttttatggcagttctggtgaatgttcaatgggaactggtcaccatgaaactttagagattaacgacaagattttctactttttttaagtgatttttttgtccttcagccaaacacaatatgggctcaagtcacttttatttgaaatgtcatttggtgccagtattttttaactgcataatagcctaacatgattatttgaacttatttacacatagtttgaaaaaaaaaagacaaaaatagtattcaggtgagcaattagattagtattttccacgtcactgtttatttttttaaaacacaaattctaaagctacaacaaatactacaggcccttaaagcacagtctgatgacacatttggcagtttaatagatgttactcaaagaattttttaagaactgtattttattttttaaatggtgttttattacaagggaccttgaacatgttttgtatgttaaattcaaaagtaatgcttcaatcagatagttctttttcacaagttcaatctgtttttcatgtaaattttgtatgaaaaatcaatgtcaagtaccaaaatgttaatgtatgtgtcatttaactctgcctgagactttcagtgcactgtatatagaagtctaaaacacacctaagagaaaaagatcgaatttttcagatgattcagaaattttcattcaggtatttgtaatagtgacatatatatgtatatacatatcacctcctattctcttaatttttcttaaaatgttaactggcagtaagtcttttttgatcattcccttttccatataggaaacataattttgaagtggccagatgagtttatcatgtcagtgaaaaataattacccacaaatgccaccagaacttacgattcttcacttcttggggttttcagtatgaacctaactccccaccccaacatctccctcccacattgtcaccatttcaaagggcccacagtgacttttgctgggcattttcccagatgtttacagactgtgagtacagcagaaaatcttttactagtgtgtgtgtgtatatatataaacaattgtaaatttcttttagcccatttttctagactgtctctgtggaatatatttgtgtgtgtgatatatgcatgtgtgtgatggtatgtatggatttaatctaatctaataattgtgccccgcagttgtgccaaagtgcatagtctgagtaaaatctaggtgattgttcatcatgacaacctgcctcagtccattttaacctgtagcaaccttctgcattcataaatcttgtaatcatgttaccattacaaatgggatataagaggcagcgtgaaagcagatgagctgtggactagcaatatagggttttgtttggttggttggtttgataaagcagtatttggggtcatattgtttcctgtgctggagcaaaagtcattacactttgaagtattatattgttcttatcctcaattcaatgtggtgatgaaattgccaggttgtctgatatttctttcagacttcgccagacagattgctgataataaattaggtaagataatttgttgggccatattttaggacaggtaaaataacatcaggttccagttgcttgaattgcaaggctaagaagtactgcccttttgtgtgttagcagtcaaatctattattccactggcgcatcatatgcagtgatatatgcctataatataagccataggttcacaccattttgtttagacaattgtctttttttcaagatgctttgtttctttcatatgaaaaaaatgcattttataaattcagaaagtcatagatttctgaaggcgtcaacgtgcattttatttatggactggtaagtaactgtggtttactagcaggaatatttccaatttctacctttactacatcttttcaacaagtaactttgtagaaatgagccagaagccaaggccctgagttggcagtggcccataagtgtaaaataaaagtttacagaaaccttg

SEQ ID NO: 122459 - DNA, 4022 bp, Artificial Sequence
  derived and/or modified sequence
gggggcggcagctttgtgctttttagtggccgcgtcccaggatagctggaaggttaggacgctcttgcggtcccagagtggagtggaaggtctggagctttgggaggagacggggaggacagactggaggcgtgttcctccggagttttctttttcgtgcgagccctcgcgcgcgcgtacagtcatcccgctggtctgacgattgtggagaggcggtggagaggcttcatccatcccacccggtcgtcgccggggattggggtcccagcgagacctccccgggagaagcagtgcccaggaggttttctgaagccggggaagctgtgcagccgaagccgccgccgcgccggagcccgggacaccggccaccctccgcgccacccaccctcgccggctccggcttcctctggcccaggcgccgcgcggacccggcagctgtctgcgcacgccgagctccacggtgaaaaaaaagtgaaggtgtaaaagcagcacaagtgcaataagagatatttcctcaaatttgcctcaagatggaaaccctttgcctcagggcatccttttggctggcactggttggatgtgtaatcagtgataatcctgagagatacagcacaaatctaagcaatcatgtggatgatttcaccacttttcgtggcacagagctcagcttcctggttaccactcatcaacccactaatttggtcctacccagcaatggctcaatgcacaactattgcccacagcagactaaaattacttcagctttcaaatacattaacactgtgatatcttgtactattttcatcgtgggaatggtggggaatgcaactctgctcaggatcatttaccagaacaaatgtatgaggaatggccccaacgcgctgatagccagtcttgcccttggagaccttatctatgtggtcattgatctccctatcaatgtatttaaggtacagagcagttgcctcctggagtcgtgttcagggaattgggattcctttggtaactgccattgaaattgtctccatctggatcctgtcctttatcctggccattcctgaagcgattggcttcgtcatggtaccctttgaatataggggtgaacagcataaaacctgtatgctcaatgccacatcaaaattcatggagttctaccaagatgtaaaggactggtggctcttcgggttctatttctgtatgcccttggtgtgcactgcgatcttctacaccctcatgacttgtgagatgttgaacagaaggaatggcagcttgagaattgccctcagtgaacatcttaagcagcgtcgagaagtggcaaaaacagttttctgcttggttgtaatttttgctctttgctggttccctcttcatttaagccgtatattgaagaaaactgtgtataacgagatggacaagaaccgatgtgaattacttagtttcttactgctcatggattacatcggtattaacttggcaaccatgaattcatgtataaaccccatagctctgtattttgtgagcaagaaatttaaaaattgtttccagtcatgcctctgctgctgctgttaccagtccaaaagtctgatgacctcggtccccatgaacggaacaagcatccagtggaagaaccacgatcaaaacaaccacaacacagaccggagcagccataaggacagcatgaactgaccacccttagaagcactcctcggtactcccataatcctctcggagaaaaaaatcacaaggcaactgtgagtccgggaatctcttctctgatccttcttccttaattcactcccacacccaagaagaaatgctttccaaaaccgcaagggtagactggtttatccacccacaacatctacgaatcgtacttctttaattgatctaatttacatattctgcgtgttgtattcagcactaaaaaatggtgggagctgggggagaatgaagactgttaaatgaaaccagaaggatatttactacttttgcatgaaaatagagctttcaagtacatggctagcttttatggcagttctggtgaatgttcaatgggaactggtcaccatgaaactttagagattaacgacaagattttctactttttttaagtgatttttttgtccttcagccaaacacaatatgggctcaagtcacttttatttgaaatgtcatttggtgccagtattttttaactgcataatagcctaacatgattatttgaacttatttacacatagtttgaaaaaaaaaagacaaaaatagtattcaggtgagcaattagattagtattttccacgtcactgtttatttttttaaaacacaaattctaaagctacaacaaatactacaggcccttaaagcacagtctgatgacacatttggcagtttaatagatgttactcaaagaattttttaagaactgtattttattttttaaatggtgttttattacaagggaccttgaacatgttttgtatgttaaattcaaaagtaatgcttcaatcagatagttctttttcacaagttcaatctgtttttcatgtaaattttgtatgaaaaatcaatgtcaagtaccaaaatgttaatgtatgtgtcatttaactctgcctgagactttcagtgcactgtatatagaagtctaaaacacacctaagagaaaaagatcgaatttttcagatgattcagaaattttcattcaggtatttgtaatagtgacatatatatgtatatacatatcacctcctattctcttaatttttcttaaaatgttaactggcagtaagtcttttttgatcattcccttttccatataggaaacataattttgaagtggccagatgagtttatcatgtcagtgaaaaataattacccacaaatgccaccagaacttacgattcttcacttcttggggttttcagtatgaacctaactccccaccccaacatctccctcccacattgtcaccatttcaaagggcccacagtgacttttgctgggcattttcccagatgtttacagactgtgagtacagcagaaaatcttttactagtgtgtgtgtgtatatatataaacaattgtaaatttcttttagcccatttttctagactgtctctgtggaatatatttgtgtgtgtgatatatgcatgtgtgtgatggtatgtatggatttaatctaatctaataattgtgccccgcagttgtgccaaagtgcatagtctgagtaaaatctaggtgattgttcatcatgacaacctgcctcagtccattttaacctgtagcaaccttctgcattcataaatcttgtaatcatgttaccattacaaatgggatataagaggcagcgtgaaagcagatgagctgtggactagcaatatagggttttgtttggttggttggtttgataaagcagtatttggggtcatattgtttcctgtgctggagcaaaagtcattacactttgaagtattatattgttcttatcctcaattcaatgtggtgatgaaattgccaggttgtctgatatttctttcagacttcgccagacagattgctgataataaattaggtaagataatttgttgggccatattttaggacaggtaaaataacatcaggttccagttgcttgaattgcaaggctaagaagtactgcccttttgtgtgttagcagtcaaatctattattccactggcgcatcatatgcagtgatatatgcctataatataagccataggttcacaccattttgtttagacaattgtctttttttcaagatgctttgtttctttcatatgaaaaaaatgcattttataaattcagaaagtcatagatttctgaaggcgtcaacgtgcattttatttatggactggtaagtaactgtggtttactagcaggaatatttccaatttctacctttactacatcttttcaacaagtaactttgtagaaatgagccagaagccaaggccctgagttggcagtggcccataagtgtaaaataaaagtttacagaaaccttg

SEQ ID NO: 122460 - DNA, 1091 bp, Artificial Sequence
  derived and/or modified sequence
gggggcggcagctttgtgctttttagtggccgcgtcccaggatagctggaaggttaggacgctcttgcggtcccagagtggagtggaaggtctggagctttgggaggagacggggaggacagactggaggcgtgttcctccggagttttctttttcgtgcgagccctcgcgcgcgcgtacagtcatcccgctggtctgacgattgtggagaggcggtggagaggcttcatccatcccacccggtcgtcgccggggattggggtcccagcgagacctccccgggagaagcagtgcccaggaggttttctgaagccggggaagctgtgcagccgaagccgccgccgcgccggagcccgggacaccggccaccctccgcgccacccaccctcgccggctccggcttcctctggcccaggcgccgcgcggacccggcagctgtctgcgcacgccgagctccacggtgaaaaaaaagtgaaggtgtaaaagcagcacaagtgcaataagagatatttcctcaaatttgcctcaagatggaaaccctttgcctcagggcatccttttggctggcactggttggatgtgtaatcagtgataatcctgagagatacagcacaaatctaagcaatcatgtggatgatttcaccacttttcgtggcacagagctcagcttcctggttaccactcatcaacccactaatttggtcctacccagcaatggctcaatgcacaactattgcccacagcagactaaaattacttcagctttcaaatacattaacactgtgatatcttgtactattttcatcgtgggaatggtggggaatgcaactctgctcaggatcatttaccagaacaaatgtatgaggaatggccccaacgcgctgatagccagtcttgcccttggagaccttatctatgtggtcattgatctccctatcaatgtatttaagctgctggctgggcgctggccttttgatcacaatgactttggcgtatttctttgcaagctgttcccctttttgcagaagtcctcggtggggatcaccgtcctcaacctctgcgctcttagtgttgacagaaagactgaaatg

SEQ ID NO: 122461 - protein, 111 aa, Artificial Sequence
  derived and/or modified sequence
MGKEKTHINIVVIGHVDSGKSTTTGHLIYKCGGIDKRTIEKFEKEAAEMGKGSFKYAWVLDKLKAERERGITIDISLWKFETTKQWTRRLLELARSPSLPRKLRRLNEYYP

SEQ ID NO: 122462 - protein, 463 aa, Artificial Sequence
  derived and/or modified sequence
MGKEKTHINIVVIGHVDSGKSTTTGHLIYKCGGIDKRTIEKFEKEAAEMGKGSFKYAWVLDKLKAERERGITIDISLWKFETTKYYITIIDAPGHRDFIKNMITGTSQADCAVLIVAAGVGEFEAGISKNGQTREHALLAYTLGVKQLIVGVNKMDSTEPAYSEKRYDEIVKEVSAYIKKIGYNPATVPFVPISGWHGDNMLEPSPNMPWFKGWKVERKEGNASGVSLLEALDTILPPTRPTDKPLRLPLQDVYKIGGIGTVPVGRVETGILRPGMVVTFAPVNITTEVKSVEMHHEALSEALPGDNVGFNVKNVSVKDIRRGNVCGDSKSDPPQEAAQFTSQVIILNHPGQISAGYSPVIDCHTAHIACKFAELKEKIDRRSGKKLEDNPKSLKSGDAAIVEMVPGKPMCVESFSQYPPLGRFAVRDMRQTVAVGVIKNVEKKSGGAGKVTKSAQKAQKAGK

SEQ ID NO: 122463 - DNA, 1392 bp, Artificial Sequence
  derived and/or modified sequence
atgggaaaagaaaaaacacatattaacatcgtggttatcggccacgtggatagcggtaagtccaccaccaccgggcacttgatttacaagtgcggcggaatcgataagcgaacgatagagaaattcgagaaggaagctgctgaaatgggtaaaggctccttcaaatatgcctgggttctggataaactgaaagctgagcgcgaacgtggcataacaattgatatctctctctggaaattcgagactaccaagtactacattactatcatcgatgccccggggcatcgtgactttattaaaaatatgattacaggaaccagtcaagcggattgtgcggtgctcattgtggctgctggtgttggagagtttgaggccggcatctccaagaatggccagacaagagagcacgctttgctcgcctacacactgggagtcaagcagcttatcgtgggtgtgaacaagatggattccaccgagcctgcgtactctgagaaaaggtatgacgaaatagtcaaggaggtttccgcatacataaagaaaattggatacaatcccgctacggttccctttgtgcctatcagcgggtggcatggtgataacatgctggaaccttctccaaacatgccctggtttaaaggatggaaggtcgaaagaaaggagggcaacgccagtggagtgtccctcttagaagcactggacaccatcctgccccctacccgtccgaccgacaaacctctgagactgcccttgcaggacgtttataagatagggggcattggaacagtgccggtggggcgcgtcgaaacaggaattttacggccgggcatggtggtcacctttgcaccagtgaatattactacggaagtcaagtctgtggaaatgcatcacgaagcactctctgaggcgctgcccggggataatgtgggattcaacgtgaaaaatgtatcggtgaaagatatccgaagggggaacgtgtgtggcgacagtaagtcagaccctccgcaggaggccgcacagtttacaagccaggtgataatattgaatcatccaggccagatatctgccgggtactcacctgttatcgattgccacacagcccacatcgcttgcaaattcgctgagcttaaagaaaaaatcgataggcggagtgggaagaagctggaggataaccccaagagccttaagtcaggggatgcggccattgttgaaatggtgccagggaaaccgatgtgtgtggaatcttttagccaataccccccccttggacgcttcgccgtccgcgacatgaggcagacggtggctgtcggtgttatcaaaaacgttgaaaagaaatccggaggagccggcaaagtgaccaaaagcgcccagaaagcacagaaggctggcaaatag

SEQ ID NO: 122464 - DNA, 1392 bp, Artificial Sequence
  derived and/or modified sequence
atgggcaaggagaagacccacatcaacatcgtggtgattggacatgtggacagcggcaagagcaccaccaccggccacctgatctacaagtgtggcggcatcgacaagaggaccatcgagaagtttgagaaggaggccgctgagatgggcaagggcagcttcaagtatgcctgggtgctggacaagctgaaggccgagcgggagcggggcatcaccatcgacatcagcctgtggaagtttgagaccaccaagtactacatcaccatcattgatgcccctggccaccgggacttcatcaagaacatgatcaccggcaccagccaggccgactgtgctgtgctgattgtggccgccggcgtgggggagtttgaagctggcatcagcaagaatggccagacccgggagcacgccctgctggcctacaccctgggcgtgaagcagctgattgtgggcgtgaacaagatggacagcacagagcccgcctacagcgagaagagatatgatgagatcgtgaaggaggtgtctgcctacatcaagaagattggctacaacccagccaccgtgccctttgtgcccatcagcggctggcatggagacaacatgctggagcccagccccaacatgccctggttcaagggctggaaggtggagaggaaggagggcaatgccagcggcgtgtccctgctggaggccctggacaccatcctgccccccacccggcccacagacaagcccctgcggctgcccctgcaggatgtgtacaagattggaggcattggaacagtgcctgtgggccgggtggagaccggcatcctgcggcccggcatggtggtgacctttgcccctgtgaacatcaccacagaggtgaagtctgtggagatgcaccacgaggccctgtctgaggccctgcccggggacaacgtgggcttcaacgtgaagaatgtgtctgtgaaggacatcagaagaggaaatgtgtgtggggacagcaagagtgaccccccccaggaggccgcccagttcaccagccaggtgatcatcctgaaccaccctggccagatctctgctggctacagccctgtgattgactgccacacagcccacatcgcctgcaagtttgctgagctgaaggagaagattgacagaagaagtggcaagaagctggaggacaaccccaagagcctgaagtctggagatgctgccatcgtggagatggtgcctgggaagcccatgtgtgtggagagcttcagccagtacccacccctgggccgctttgctgtgcgggacatgaggcagacagtggccgtgggcgtcatcaagaatgtggagaagaagtctggaggagctgggaaggtgaccaagagcgcccagaaggcccagaaggccggcaagtag

SEQ ID NO: 122465 - DNA, 1392 bp, Artificial Sequence
  derived and/or modified sequence
atgggcaaggagaagacccacatcaacatcgtggtgatcggccacgttgacagtggtaagtccaccacaacgggccatcttatatataagtgcggaggcatagacaaacgtacaattgaaaagttcgaaaaggaggctgctgaaatgggaaagggaagcttcaaatatgcatgggtacttgataaattgaaggccgaacgggaacgcggcattacaatcgacattagcctttggaagtttgagacaacaaagtactatatcactattattgatgcccctggccatcgagatttcatcaagaacatgatcactgggacttctcaggctgactgtgctgtcctcatagtagcggctggcgtgggggaatttgaggcgggaatctcaaagaacggtcagaccagagagcatgctctgttggcttacaccctcggcgttaagcagctgattgtcggtgtcaataagatggattctacggagcctgcctattcagaaaagcggtacgatgagatagtcaaagaggtgtccgcatacattaagaagatcggatataacccagccactgtgcccttcgtgccgataagcggctggcacggtgacaatatgctcgaaccctccccaaacatgccttggttcaaaggttggaaagtggaaaggaaggaaggcaatgcctcaggcgtctccctgttagaggctcttgataccatcctccctcccacccgccccactgacaaacccctgcgactgcccctgcaggacgtttataagattggcgggatcgggacagtgcccgtcggtagagttgaaacaggcatcctccgacctggtatggtggttacttttgcccctgtaaatatcacaacagaggtgaaatccgtggaaatgcaccatgaagcattatcagaagcattgccaggagacaatgtcggatttaacgtgaagaacgtgtccgtcaaggatatacggcgtggcaatgtgtgcggagatagcaagtcagatccaccgcaggaagctgcccagttcactagccaggtgatcatcctaaatcatcccgggcagataagtgcagggtacagccccgtcattgactgccatacggctcacatcgcgtgcaagttcgctgagctgaaggaaaaaatcgaccggagaagcggcaagaaactggaagacaatcccaaatccttaaagagcggtgacgctgccatcgtggaaatggttcctgggaaaccaatgtgtgtcgaatcattctcccaatatcctccgctgggcagattcgcagttcgggatatgaggcagaccgtggccgtgggagtgataaagaacgtggaaaagaaatcagggggcgctgggaaagtcaccaagagtgcccaaaaggctcagaaagctggtaaatag

SEQ ID NO: 122466 - DNA, 1392 bp, Artificial Sequence
  derived and/or modified sequence
atgggtaaggagaagactcacatcaacattgtggtgattggacatgtcgatagcgggaaatctactaccactggccacctcatctacaagtgtgggggtatcgataagcgtactattgagaaattcgagaaggaggcggctgagatgggaaagggctcctttaaatatgcatgggtgctcgacaagttgaaagctgaacgcgagagaggtatcactattgacatttccctgtggaagttcgagaccactaagtattatattaccatcattgatgctcctggccatcgcgattttatcaaaaacatgatcacaggtacatcccaggccgactgcgcagtcttgattgtggctgcaggggttggagagtttgaagcgggtataagcaagaacggccagacacgagaacacgcgttactcgcctacaccctgggcgtgaaacagctaatagtgggagtgaacaaaatggattctacagagcctgcttatagtgagaagaggtatgacgaaatcgtgaaagaggtaagtgcttatataaagaagatcggatataatcctgccactgtcccctttgttcccatcagcggctggcatggcgataacatgctggaacctagccctaatatgccctggttcaaagggtggaaagtggaacgaaaagagggcaacgcgagcggggtatctctactcgaagctctcgataccatcctgccccctacgcggccaaccgataagccgctgcgcctccccctccaagatgtgtacaagatcgggggaattggcactgtacccgttgggagggtcgagaccggaatcctcagacccggaatggttgtgacgttcgccccagtgaacatcaccaccgaggtcaaatcagtggagatgcatcacgaggccctgagtgaagcactgcccggagacaatgttggttttaatgtgaagaacgtttccgtgaaagatataaggcggggaaatgtttgcggagattccaagtccgacccgccacaagaggccgcacagtttacgtctcaggtcattattctgaaccaccctgggcaaatttcagccggttactctccagtgattgactgtcacactgctcacatcgcttgtaaattcgcggagcttaaagagaagatagatcgtcgaagtggaaagaagcttgaagacaatcccaagtcactgaaatcaggcgacgccgctatagtcgaaatggtgcctggcaaacctatgtgtgtcgagtctttctcacagtatcccccattaggccgatttgcggtgcgcgacatgcgccaaactgtggccgtcggcgtcatcaaaaatgtcgagaagaagtcgggtggcgctggaaaagtaacaaaaagtgcacagaaagcccagaaggcagggaaatag

SEQ ID NO: 122467 - DNA, 1392 bp, Artificial Sequence
  derived and/or modified sequence
atgggcaaggagaagacccacatcaacatcgtggtgatcggccacgtggacagcggcaagagcaccaccaccggccacctgatctacaagtgcggcggcatcgacaagagaaccatcgagaagttcgagaaggaggccgccgagatgggcaagggcagcttcaagtacgcctgggtgctggacaagctgaaggccgagagagagagaggcatcaccatcgacatcagcctgtggaagttcgagaccaccaagtactacatcaccatcatcgacgcccccggccacagagacttcatcaagaacatgatcaccggcaccagccaggccgactgcgccgtgctgatcgtggccgccggcgtgggcgagttcgaggccggcatcagcaagaacggccagaccagagagcacgccctgctggcctacaccctgggcgtgaagcagctgatcgtgggcgtgaacaagatggacagcaccgagcccgcctacagcgagaagagatacgacgagatcgtgaaggaggtgagcgcctacatcaagaagatcggctacaaccccgccaccgtgcccttcgtgcccatcagcggctggcacggcgacaacatgctggagcccagccccaacatgccctggttcaagggctggaaggtggagagaaaggagggcaacgccagcggcgtgagcctgctggaggccctggacaccatcctgccccccaccagacccaccgacaagcccctgagactgcccctgcaggacgtgtacaagatcggcggcatcggcaccgtgcccgtgggcagagtggagaccggcatcctgagacccggcatggtggtgaccttcgcccccgtgaacatcaccaccgaggtgaagagcgtggagatgcaccacgaggccctgagcgaggccctgcccggcgacaacgtgggcttcaacgtgaagaacgtgagcgtgaaggacatcagaagaggcaacgtgtgcggcgacagcaagagcgaccccccccaggaggccgcccagttcaccagccaggtgatcatcctgaaccaccccggccagatcagcgccggctacagccccgtgatcgactgccacaccgcccacatcgcctgcaagttcgccgagctgaaggagaagatcgacagaagaagcggcaagaagctggaggacaaccccaagagcctgaagagcggcgacgccgccatcgtggagatggtgcccggcaagcccatgtgcgtggagagcttcagccagtacccccccctgggcagattcgccgtgagagacatgagacagaccgtggccgtgggcgtgatcaagaacgtggagaagaagagcggcggcgccggcaaggtgaccaagagcgcccagaaggcccagaaggccggcaagtag

SEQ ID NO: 122468 - DNA, 336 bp, Artificial Sequence
  derived and/or modified sequence
atgggaaaggagaaaacacatattaacattgttgtgatcggacacgtcgactccggaaagtctacaaccaccggacacctcatttataaatgcgggggcattgataaacgaacgattgagaagttcgaaaaggaagctgctgagatgggcaaaggctcctttaagtacgcatgggtgctggataagcttaaggccgagcgggagcgaggcattaccatagacatttcgctgtggaagtttgaaactaccaaacagtggacgaggcgcttgttggaactggccagatctccaagcttgcccagaaagctcagaagactgaatgaatactatccttag

SEQ ID NO: 122469 - DNA, 1392 bp, Artificial Sequence
  derived and/or modified sequence
atgggcaaagaaaagactcatataaatattgtcgtcattggccacgtcgactccggcaagtctactaccacagggcatctgatctacaagtgtggtggtatcgataaaaggaccattgagaaattcgaaaaggaggccgccgaaatgggtaaggggagctttaaatacgcctgggtgctggataaactgaaggcagagcgggagcggggcatcactatcgatatatctctctggaaattcgaaaccacaaagtattacatcacgataatagacgccccaggccacagggactttatcaagaacatgataactggcaccagtcaggctgattgtgctgtgctgatcgtggcggcaggagtgggagaatttgaggccggaattagcaagaatggccaaaccagggagcacgctttactggcctataccctgggagtcaaacagctcattgtgggagtgaataaaatggattcgaccgaacctgcatatagtgaaaagcggtatgatgagatcgtgaaggaggtgtccgcatacatcaagaagatcggctacaaccctgctaccgtgccctttgtgcctatctccggctggcatggggacaacatgctggagccgtccccaaacatgccctggttcaaagggtggaaagtggaacgcaaggaggggaacgcaagcggtgtgtccttgctcgaggccctggacacaatcctgccaccaacacggcctactgataaaccacttaggttgcctctgcaggatgtctacaagattgggggtatagggaccgtgcctgtgggcagggtggagacaggtattttgaggcccggaatggtagtgacgttcgcaccagtaaacattaccactgaggttaaatcagtagagatgcatcatgaggctctgagcgaagcactccccggcgataacgtaggctttaatgttaagaacgttagcgtcaaggatattcggcgaggaaatgtttgtggcgacagtaagtccgatcccccgcaggaggccgcacaattcacctcacaagttatcattctgaatcaccctggacaaatttccgccggctattcccctgtcatcgactgtcataccgcccatattgcatgtaagtttgctgagttaaaggaaaaaatcgaccggagatcgggcaagaaactagaagataatccgaaatcactgaaatcaggcgacgcagcaattgtagaaatggttcctggcaaaccaatgtgtgtggaatcattctcacaatatcctcccttgggccgcttcgctgtaagggatatgcggcagacagtggcagtgggagtgataaagaatgtggagaaaaaaagcggtggtgccggaaaggtgacaaaatccgcccagaaggcacaaaaagcagggaagtag

SEQ ID NO: 122470 - DNA, 336 bp, Artificial Sequence
  derived and/or modified sequence
atgggcaaggagaagacccacatcaacatcgtggtgattggacatgtggacagcggcaagagcaccaccaccggccacctgatctacaagtgtggcggcatcgacaagaggaccatcgagaagtttgagaaggaggccgctgagatgggcaagggcagcttcaagtatgcctgggtgctggacaagctgaaggccgagcgggagcggggcatcaccatcgacatcagcctgtggaagtttgagaccaccaagcagtggacccggcggctgctggagctggcccggagccccagcctgcccaggaagctgcggcggctgaatgagtactacccctag

SEQ ID NO: 122471 - DNA, 336 bp, Artificial Sequence
  derived and/or modified sequence
atgggcaaggagaagacccacatcaacatcgtggtgatcggccacgtggacagcggaaagtccactaccaccggtcatctcatttacaagtgtggggggattgacaaacgtactatcgagaaattcgaaaaagaagccgctgaaatggggaagggcagcttcaagtatgcatgggtactggacaagctgaaagctgagcgggaaagaggtatcaccatcgacattagcctctggaagtttgagacaaccaagcagtggacgcgcaggttgctggagctggcaagatctccctctcttccaaggaagttacggagattaaatgagtattacccctag

SEQ ID NO: 122472 - DNA, 1392 bp, Artificial Sequence
  derived and/or modified sequence
atgggcaaggagaagacccacatcaacatcgtggtgatcggccacgtggattcgggcaagtccacgacaactggccacctgatctacaagtgtggcgggatcgacaaaagaacgatcgaaaagtttgagaaggaagccgctgaaatgggcaagggctcgttcaagtatgcgtgggtccttgacaaattgaaggccgagcgcgagcgcggaattaccatcgatatttctctgtggaaatttgaaacaaccaagtactacattactatcatcgatgcacccggccaccgggacttcatcaagaatatgatcacggggaccagtcaggccgactgtgcagtcctgattgtcgcagctggtgtgggcgagtttgaggctggtatctccaagaacgggcaaacccgcgagcacgctctcttggcctatacacttggagtgaagcaactgattgtaggcgtaaataagatggactctaccgaaccggcatattccgaaaaacggtacgatgaaattgtgaaagaggtgagcgcatacatcaaaaaaatcggctacaacccggcaacagtcccctttgtgccaatttcaggatggcacggtgacaatatgctggaaccatctccgaacatgccttggttcaaaggctggaaggtggaaaggaaagaaggcaacgccagcggcgtcagcttgctagaggccctggatacgatcttgccaccgacgcggcccaccgataaaccccttaggctccccttgcaggatgtgtacaaaatcggtggtatcgggactgtcccagtgggccgcgttgaaacaggtatcctgcgcccagggatggtcgtcacttttgctcctgtcaatatcacgacagaggtgaaatcagttgagatgcatcacgaagcccttagcgaagccctgcctggcgataacgttgggttcaacgtgaagaatgtttcagtgaaagatatccggagggggaatgtctgtggggattcaaagtcggatcccccacaagaggcggcccagtttacttcgcaagttattatcctgaatcatcctggtcaaatttcagccggctattctcctgtgatagattgtcacaccgcccacatcgcctgtaaattcgcagagcttaaagaaaaaatcgatcgcaggagcgggaagaaactagaggacaacccgaaatctctgaaatccggagatgcggctatcgtggagatggtaccgggaaagcccatgtgtgtcgagtccttttctcagtatccacctctggggagattcgctgtaagggatatgcgccaaaccgtcgccgtgggcgtgataaagaacgtcgagaagaagtcgggcggcgctggaaaagttacaaagagtgctcagaaagcccagaaagctggtaaatag

SEQ ID NO: 122473 - DNA, 336 bp, Artificial Sequence
  derived and/or modified sequence
atgggcaaagaaaaaacccatattaacatcgtggttattgggcacgttgacagcggcaagtctacaactacgggtcatctaatctataaatgcggcggaatagataagcgcaccatcgaaaaatttgagaaggaagccgcagagatgggcaaaggaagcttcaagtacgcgtgggtcctggacaagttgaaagctgaaagagaaagggggattacaattgacatcagcctttggaagtttgaaaccactaaacagtggaccagacggctgctggaactggctaggagcccaagtctccctcgcaagttgcgaaggctgaatgagtattacccgtag

SEQ ID NO: 122474 - DNA, 1392 bp, Artificial Sequence
  derived and/or modified sequence
atgggcaaagaaaagacccacattaacatagttgtgattggccacgtcgacagtggcaaatctaccaccacagggcatcttatctacaagtgcggagggattgataaaaggaccatcgagaaatttgagaaagaggcagcagagatggggaagggttccttcaagtatgcttgggtgctggataagctcaaggctgagagggaaaggggcatcaccattgatatttcactatggaagtttgaaaccaccaaatactacattactattattgatgcacccggtcatcgcgactttattaagaacatgataactggcacaagtcaagccgattgtgctgttttgatcgtcgctgcaggcgtgggggaatttgaagctggcataagcaaaaacggtcagactagggagcacgcccttctggcctacacccttggggtgaagcaactgattgtaggcgtaaacaaaatggattctacagagcctgcgtatagcgagaaacgctacgacgaaatagttaaggaggtgagtgcctacattaagaaaattggttataatccggctaccgtcccttttgttccgatttcggggtggcatggcgacaacatgctggaaccatcacctaacatgccttggttcaaaggctggaaagtggagcggaaagagggcaacgcctcgggcgtctcactgttagaggccttggacaccatacttcctccgacaaggcccacggataagccactcagattgccactgcaggatgtgtacaagataggaggcattggaaccgtccccgttggaagagtggagaccgggatactgagaccagggatggtggtaacatttgctcccgtgaatatcactacggaggtgaagagcgtcgagatgcaccacgaggcactgagtgaggctcttcccggagacaacgtaggatttaatgtgaaaaacgtgagcgtgaaggatatccggagaggaaatgtgtgcggcgacagcaagtccgacccccctcaagaggccgctcagtttacttctcaggttattattctgaaccatcctggccagataagtgcagggtactcacccgtgatcgattgtcacacagcccacattgcatgtaagttcgctgagctgaaggagaaaatcgataggcgttctgggaagaagctggaagacaatcctaaaagcctgaaaagcggcgatgctgcgattgtggagatggtacctggcaaacctatgtgtgtcgagtcctttagtcagtacccccctctcggtcgatttgcggttagagacatgagacagacagtggctgtcggcgtcattaaaaacgttgagaaaaagagcggtggagctggaaaagtgaccaaaagcgcacaaaaggcacagaaggccggaaagtag

SEQ ID NO: 122475 - DNA, 336 bp, Artificial Sequence
  derived and/or modified sequence
atgggcaaggagaagacccacatcaacatcgtggtgatcggccacgtggacagcggcaagagcaccaccaccggccacctgatctacaagtgcggcggcatcgacaagagaaccatcgagaagttcgagaaggaggccgccgagatgggcaagggcagcttcaagtacgcctgggtgctggacaagctgaaggccgagagagagagaggcatcaccatcgacatcagcctgtggaagttcgagaccaccaagcagtggaccagaagactgctggagctggccagaagccccagcctgcccagaaagctgagaagactgaacgagtactacccctag

SEQ ID NO: 122476 - DNA, 1328 bp, Artificial Sequence
  derived and/or modified sequence
gtttgccgccagaacacaggtaagtgccgtgtgtggttcccgcgggcctggcctctttacgggttatggcccttgcgtgccttgaattacttccacgcccctggctgcagtacgtgattcttgatcccgagcttcgggttggaagtgggtgggagagttcgaggccttgcgcttaaggagccccttcgcctcgtgcttgagttgaggcctggcttgggcgctggggccgccgcgtgcgaatctggtggcaccttcgcgcctgtctcgctgctttcgataagtctctagccatttaaaatttttgatgacctgctgcgacgctttttttctggcaagatagtcttgtaaatgcgggccaagatctgcacactggtatttcggtttttggggccgcgggcggcgacggggcccgtgcgtcccagcgcacatgttcggcgaggcggggcctgcgagcgcggccaccgagaatcggacgggggtagtctcaagctggccggcctgctctggtgcctggcctcgcgccgccgtgtatcgccccgccctgggcggcaaggctggcccggtcggcaccagttgcgtgagcggaaagatggccgcttcccggccctgctgcagggagctcaaaatggaggacgcggcgctcgggagagcgggcgggtgagtcacccacacaaaggaaaagggcctttccgtcctcagccgtcgcttcatgtgactccacggagtaccgggcgccgtccaggcacctcgattagttctcgagcttttggagtacgtcgtctttaggttggggggaggggttttatgcgatggagtttccccacactgagtgggtggagactgaagttaggccagcttggcacttgatgtaattctccttggaatttgccctttttgagtttggatcttggttcattctcaagcctcagacagtggttcaaagtttttttcttccatttcaggtgtcgtgaaaactacccctaaaagccaaaatgggaaaggaaaagactcatatcaacattgtcgtcattggacacgtagattcgggcaagtccaccactactggccatctgatctataaatgcggtggcatcgacaaaagaaccattgaaaaatttgagaaggaggctgctgagatgggaaagggctccttcaagtatgcctgggtcttggataaactgaaagctgagcgtgaacgtggtatcaccattgatatctccttgtggaaatttgagaccacaaagcagtggacaagaaggctgctggagctggcaaggtcaccaagtctgcccagaaagctcagaaggctaaatgaatattatccctaa

SEQ ID NO: 122477 - DNA, 1843 bp, Artificial Sequence
  derived and/or modified sequence
actgcgccgccaccgtcaataggtggaccccctcccggagataaaaccgccggcgccggcgccgccagtccctctggctgagacctcggctccggaatcactgcagcccccctcgccctgagccagagcaccccgggtcccgccagcccctcacactcccagcaaaatgggcaaggagaagacccacatcaacatcgtggtcatcggccacgtggactccggaaagtccaccaccacgggccacctcatctacaaatgcggaggtattgacaaaaggaccattgagaagttcgagaaggaggcggctgagatggggaagggatccttcaagtatgcctgggtgctggacaagctgaaggcggagcgtgagcgcggcatcaccatcgacatctccctctggaagttcgagaccaccaagtactacatcaccatcatcgatgcccccggccaccgcgacttcatcaagaacatgatcacgggtacatcccaggcggactgcgcagtgctgatcgtggcggcgggcgtgggcgagttcgaggcgggcatctccaagaatgggcagacgcgggagcatgccctgctggcctacacgctgggtgtgaagcagctcatcgtgggcgtgaacaaaatggactccacagagccggcctacagcgagaagcgctacgacgagatcgtcaaggaagtcagcgcctacatcaagaagatcggctacaacccggccaccgtgccctttgtgcccatctccggctggcacggtgacaacatgctggagccctcccccaacatgccgtggttcaagggctggaaggtggagcgtaaggagggcaacgcaagcggcgtgtccctgctggaggccctggacaccatcctgccccccacgcgccccacggacaagcccctgcgcctgccgctgcaggacgtgtacaagattggcggcattggcacggtgcccgtgggccgggtggagaccggcatcctgcggccgggcatggtggtgacctttgcgccagtgaacatcaccactgaggtgaagtcagtggagatgcaccacgaggctctgagcgaagctctgcccggcgacaacgtcggcttcaatgtgaagaacgtgtcggtgaaggacatccggcggggcaacgtgtgtggggacagcaagtctgacccgccgcaggaggctgctcagttcacctcccaggtcatcatcctgaaccacccggggcagattagcgccggctactccccggtcatcgactgccacacagcccacatcgcctgcaagtttgcggagctgaaggagaagattgaccggcgctctggcaagaagctggaggacaaccccaagtccctgaagtctggagacgcggccatcgtggagatggtgccgggaaagcccatgtgtgtggagagcttctcccagtacccgcctctcggccgcttcgccgtgcgcgacatgaggcagacggtggccgtaggcgtcatcaagaacgtggagaagaagagcggcggcgccggcaaggtcaccaagtcggcgcagaaggcgcagaaggcgggcaagtgaagcgcgggcgcccgcggcgcgaccctccccggcggtgccgcgctccgaaccccgggcccgggcccccgccccgcccccgccccgcgcgccggtccggcgccccgcacccccgccaggcgcatgtctgcacctccgcttgccagaggccctcggtcagcgactggatgctcgccatcaaggtccagtggaagttcttcaagaggaaaggcgcccccgccccaggcttccgcgcccagcgctcgccacgctcagtgcccgttttaccaataaactgagcgaccccag

SEQ ID NO: 122478 - DNA, 1748 bp, Artificial Sequence
  derived and/or modified sequence
aatcactgcagcccccctcgccctgagccagagcaccccgggtcccgccagcccctcacactcccagcaaaatgggcaaggagaagacccacatcaacatcgtggtcatcggccacgtggactccggaaagtccaccaccacgggccacctcatctacaaatgcggaggtattgacaaaaggaccattgagaagttcgagaaggaggcggctgagatggggaagggatccttcaagtatgcctgggtgctggacaagctgaaggcggagcgtgagcgcggcatcaccatcgacatctccctctggaagttcgagaccaccaagtactacatcaccatcatcgatgcccccggccaccgcgacttcatcaagaacatgatcacgggtacatcccaggcggactgcgcagtgctgatcgtggcggcgggcgtgggcgagttcgaggcgggcatctccaagaatgggcagacgcgggagcatgccctgctggcctacacgctgggtgtgaagcagctcatcgtgggcgtgaacaaaatggactccacagagccggcctacagcgagaagcgctacgacgagatcgtcaaggaagtcagcgcctacatcaagaagatcggctacaacccggccaccgtgccctttgtgcccatctccggctggcacggtgacaacatgctggagccctcccccaacatgccgtggttcaagggctggaaggtggagcgtaaggagggcaacgcaagcggcgtgtccctgctggaggccctggacaccatcctgccccccacgcgccccacggacaagcccctgcgcctgccgctgcaggacgtgtacaagattggcggcattggcacggtgcccgtgggccgggtggagaccggcatcctgcggccgggcatggtggtgacctttgcgccagtgaacatcaccactgaggtgaagtcagtggagatgcaccacgaggctctgagcgaagctctgcccggcgacaacgtcggcttcaatgtgaagaacgtgtcggtgaaggacatccggcggggcaacgtgtgtggggacagcaagtctgacccgccgcaggaggctgctcagttcacctcccaggtcatcatcctgaaccacccggggcagattagcgccggctactccccggtcatcgactgccacacagcccacatcgcctgcaagtttgcggagctgaaggagaagattgaccggcgctctggcaagaagctggaggacaaccccaagtccctgaagtctggagacgcggccatcgtggagatggtgccgggaaagcccatgtgtgtggagagcttctcccagtacccgcctctcggccgcttcgccgtgcgcgacatgaggcagacggtggccgtaggcgtcatcaagaacgtggagaagaagagcggcggcgccggcaaggtcaccaagtcggcgcagaaggcgcagaaggcgggcaagtgaagcgcgggcgcccgcggcgcgaccctccccggcggtgccgcgctccgaaccccgggcccgggcccccgccccgcccccgccccgcgcgccggtccggcgccccgcacccccgccaggcgcatgtctgcacctccgcttgccagaggccctcggtcagcgactggatgctcgccatcaaggtccagtggaagttcttcaagaggaaaggcgcccccgccccaggcttccgcgcccagcgctcgccacgctcagtgcccgttttaccaataaactgagcgaccccag

SEQ ID NO: 122479 - protein, 281 aa, Artificial Sequence
  derived and/or modified sequence
MATNFLAHEKIWFDKFKYDDAERRFYEQMNGPVAGASRQENGASVILRDIARARENIQKSLAGSSGPGASSGTSGDHGELVVRIASLEVENQSLRGVVQELQQAISKLEARLNVLEKSSPGHRATAPQTQHVSPMRQVEPPAKKPATPAEDDEDDDIDLFGSDNEEEDKEAAQLREERLRQYAEKKAKKPALVAKSSILLDVKPWDDETDMAQLEACVRSIQLDGLVWGASKLVPVGYGIRKLQIQCVVEDDKVGTDLLEEEITKFEEHVQSVDIAAFNKI

SEQ ID NO: 122480 - protein, 63 aa, Artificial Sequence
  derived and/or modified sequence
MATNFLAHEKIWFDKFKYDDAERRFYEQMNGPVAGASRQENGASVILRDIARARENIQKSLAG

SEQ ID NO: 122481 - protein, 204 aa, Artificial Sequence
  derived and/or modified sequence
MATNFLAHEKIWFDKFKYDDAERRFYEQMNGPVAGASRQENGASVILRDIARARENIQKSLAGSSGPGASSGTSGDHGELVVRIASLEVENQSLRGVVQELQQAISKLEARLNVLEKSSPGHRATAPQTQHVSPMRQVEPPAKKPATPAEDDEDDDIDLFGSDNEEEDKEAAQLREERLRQYAEKKAKKPALVAKSSILLDVKP

SEQ ID NO: 122482 - protein, 166 aa, Artificial Sequence
  derived and/or modified sequence
MATNFLAHEKIWFDKFKYDDAERRFYEQMNGPVAGASRQENGASVILRDIARARENIQKSLAGSSGPGASSGTSGDHGELVVRIASLEVENQSLRGVVQELQQAISKLEARLNVLEKSSPGHRATAPQTQHVSPMRQVEPPAKKPATPAEDDEDDDIDLFGSDNEE

SEQ ID NO: 122483 - protein, 199 aa, Artificial Sequence
  derived and/or modified sequence
MATNFLAHEKIWFDKFKYDDAERRFYEQMNGPVAGASRQENGASVILRDIARARENIQKSLAGSSGPGASSGTSGDHGELVVRIASLEVENQSLRGVVQELQQAISKLEARLNVLEKSSPGHRATAPQTQHVSPMRQVEPPAKKPATPAEDDEDDDIDLFGSDNEEEDKEAAQLREERLRQYAEKKAKKPALVAKSSIL

SEQ ID NO: 122484 - protein, 168 aa, Artificial Sequence
  derived and/or modified sequence
MATNFLAHEKIWFDKFKYDDAERRFYEQMNGPVAGASRQENGASVILRDIARARENIQKSLAGSSGPGASSGTSGDHGELVVRIASLEVENQSLRGVVQELQQAISKLEARLNVLEKSSPGHRATAPQTQHVSPMRQVEPPAKKPATPAEDDEDDDIDLFGSDNEEED

SEQ ID NO: 122485 - protein, 261 aa, Artificial Sequence
  derived and/or modified sequence
MATNFLAHEKIWFDKFKYDDAERRFYEQMNGPVAGASRQENGASVILRDIARARENIQKSLAGSSGPGASSGTSGDHGELVVRIASLEVENQSLRGVVQELQQAISKLEARLNVLEKSSPGHRATAPQTQHVSPMRQVEPPAKKPATPAEDDEDDDIDLFGSDNEEEDKEAAQLREERLRQYAEKKAKKPALVAKSSILLDVKPWDDETDMAQLEACVRSIQLDGLVWGASKLVPVGYGIRKLQIQCVVEDDKVGTDLLEE

SEQ ID NO: 122486 - DNA, 846 bp, Artificial Sequence
  derived and/or modified sequence
atggccaccaatttcctggcccatgagaaaatatggtttgataaattcaagtacgacgacgccgagcgtaggttttacgaacagatgaacggtccagtagccggggcctcgaggcaagagaacggtgctagcgtcatcctgcgtgatatagcccgggccagagagaacattcagaagtccctggccgggtctagtggaccaggggcctctagtggcacctctggagaccatggcgaactggtggtgcggattgctagtctcgaggttgaaaatcaaagcctgcgaggcgtcgtacaggagctgcagcaggctatcagcaagctggaagcaaggctgaacgtgcttgagaagtcctcacccggacatcgggccaccgcgccacaaacccaacatgtgtcacctatgaggcaggtcgagcctccagccaagaaaccggccactcccgctgaggatgatgaggacgatgacatcgacttgttcggaagtgataacgaggaagaagacaaagaagctgcccaacttagggaggagaggctgagacagtacgcagaaaagaaggccaaaaagcccgcattagtggctaagagctccattttacttgacgtgaagccctgggacgacgaaacagatatggctcaactcgaagcatgcgtgcgatcaatccagctcgacggtctggtctggggagccagcaaactggtccctgtggggtatggcattagaaaactgcagatccagtgtgtggtggaagatgacaaggttgggactgacctgcttgaggaggagatcaccaaatttgaggagcacgtgcagtctgtcgatatcgctgcattcaacaagatctag

SEQ ID NO: 122487 - DNA, 846 bp, Artificial Sequence
  derived and/or modified sequence
atggctacaaacttcctcgctcatgagaagatttggtttgacaagttcaagtacgacgacgctgagagacgcttttacgagcagatgaatggacccgttgccggtgccagccgtcaggaaaacggcgcaagtgtcatcttacgagacatcgctcgggctcgagaaaatattcagaaaagcctggcagggtccagtgggcctggggcctctagcggaactagtggggaccatggagagctcgtggtgagaatcgcctcactcgaagtcgaaaaccaatcacttcgtggtgtcgtccaggagctgcaacaggcgatcagcaagctcgaggcacgactcaatgtgcttgaaaagtcttctcctgggcaccgtgcaactgcccctcagacccagcatgtgtcaccgatgcgacaagtggaacctcctgctaaaaaacctgcaactccagctgaagatgacgaggacgacgacatcgacctcttcggctccgacaatgaggaagaagataaagaggccgcccaattgagagaggagcggctccggcagtacgctgaaaagaaggccaaaaagcctgcactggttgcaaagtcttccattctgctggatgtgaagccatgggacgatgagactgacatggcacagctggaggcttgcgttaggtccattcagctcgatggactggtctggggcgcttccaaacttgtgcctgtgggttacggcatcaggaaactgcaaattcagtgcgtagttgaggacgacaaagtgggcactgacctgttggaggaggagatcactaagttcgaagaacacgtccaatctgtcgacatagccgccttcaataaaatctag

SEQ ID NO: 122488 - DNA, 846 bp, Artificial Sequence
  derived and/or modified sequence
atggccaccaattttttagcacacgagaagatttggttcgataagtttaaatatgacgacgccgagaggcgcttctatgaacagatgaatggccctgtcgctggggcctctaggcaggaaaatggggctagcgttatcctgcgcgatatcgcacgcgcaagagagaacattcaaaagagtctcgctggcagctcagggcctggagcctctagcggtacatcaggcgatcacggcgagttggtggtgcgcatagcaagcttggaagtggaaaatcagtcccttcgcggagtagtccaggaattgcagcaggcgatctctaagttggaagcaagactgaatgtgctcgaaaagtctagtcccggccacagagccactgccccacagactcaacacgtctcgcccatgaggcaggtggagccccccgcaaagaaaccagccacccctgcggaagatgatgaggacgacgacatcgacctgttcggttctgataatgaggaggaggacaaagaggccgcgcaactacgcgaagaacgtcttaggcagtacgccgagaagaaggctaagaagcctgcactggtcgctaaaagcagcattctgctcgacgttaagccctgggatgatgaaaccgacatggcgcagttggaagcctgcgtgcggagtattcagctggacggactcgtgtggggagcgtcgaagctggtgcctgtgggttatggaatacgtaagctgcagattcaatgtgtcgttgaggatgacaaagtgggcaccgatctccttgaggaagagattaccaagttcgaagagcacgtccagagcgtggacatcgccgcatttaataagatctag

SEQ ID NO: 122489 - DNA, 846 bp, Artificial Sequence
  derived and/or modified sequence
atggctactaattttctggcacacgaaaaaatctggttcgacaagtttaagtacgacgatgccgagaggagattttacgaacagatgaatggcccggttgccggggcctctcggcaggagaacggagcttcggtgattcttagggatattgcccgggctcgggagaatattcagaaatccctcgcaggaagcagcgggcctggagccagtagcggcactagtggtgatcatggagagttggtagtccggattgcatccctggaggtggagaatcaatccctgagaggtgttgtgcaggaattgcagcaggcaatctctaagctcgaagcaaggctcaacgtgttggagaaaagctctcctggtcatagagccaccgccccccaaacacagcacgtgagtcccatgagacaggtggagccgccagcgaagaagcctgccaccccagccgaggacgacgaggacgacgacattgacctgttcggttctgacaacgaggaagaagacaaagaggctgcccagctcagagaggagaggctgcggcagtatgcagaaaagaaggccaaaaaaccagctttggtggccaaatcttcaattttactggacgttaaaccttgggatgacgagacagacatggcccagctagaggcttgcgttagatcgatccagttggacggtctggtatggggggcatccaaactagtccctgtcggatacggaattaggaaactgcaaatccagtgcgttgtcgaggacgacaaggtgggaaccgatctgctcgaagaagagatcacaaagttcgaggaacatgtacagtccgttgacatcgctgccttcaacaagatctag

SEQ ID NO: 122490 - DNA, 615 bp, Artificial Sequence
  derived and/or modified sequence
atggcaaccaatttcttggcccacgaaaaaatttggtttgacaaatttaagtatgatgacgccgaacgtcggttttacgagcagatgaatggaccggtggctggtgccagcaggcaagaaaatggggcgtctgtgatactgcgcgatatagcaagagcaagggagaatatccaaaagtccctcgccggttcctccggccccggtgcgtcctccggtacttctggggaccatggcgaactcgtcgtgaggattgccagccttgaagtggaaaatcagagtctgaggggggttgtccaggaattgcaacaggctataagtaagttggaagccagactcaatgtgttggaaaagtcctcgccggggcatagagccacggccccccagacacagcacgtctccccaatgcggcaggtggaacccccagcaaagaagcccgccactcctgcggaagacgatgaggatgacgatattgacctgttcgggtctgacaatgaggaggaggacaaggaagctgcccagcttcgcgaggagcgcctacgtcaatacgcggagaaaaaagctaaaaaaccggcattagtcgccaagagtagtatactgttggatgtcaaaccgtag

SEQ ID NO: 122491 - DNA, 501 bp, Artificial Sequence
  derived and/or modified sequence
atggccaccaattttcttgcccacgagaaaatttggttcgacaagtttaaatatgacgacgccgaaaggaggttttacgaacagatgaatggtccagttgccggcgcaagcagacaggagaacggggcttcggttatccttcgagatatcgcccgtgccagagaaaacattcagaaatctttagcaggcagctccggccccggtgcctccagcggcactagcggagaccatggggaactagtcgtgcgcattgcaagcttggaggtggagaaccagtctttacgcggggtcgtgcaggaattgcagcaagcgattagcaaactggaggccagactgaacgttctcgaaaagtcttccccaggccatcgcgcaactgccccacagacacagcatgtatccccaatgagacaggtggaacccccggccaaaaagcctgcaactccagccgaggatgatgaagacgacgatattgatctatttggtagcgacaatgaagagtag

SEQ ID NO: 122492 - DNA, 600 bp, Artificial Sequence
  derived and/or modified sequence
atggccacgaactttcttgcacacgagaaaatctggtttgacaagtttaagtacgatgacgccgagcggcgcttctacgaacagatgaacggccccgtcgccggggccagcagacaggaaaacggggcctcggtgatcctgcgggacatcgctagggccagagagaacatacagaagtctctggccgggagttcgggccctggagcaagctccggcacctctggtgaccacggcgaactggtagttcgaatcgcttcattggaggtggaaaaccagtcgctccgaggggtggtgcaggaactgcagcaggcaatctctaaacttgaggcaaggctcaacgtgcttgagaagtcttctcctgggcatcgtgcaactgcacctcagacacagcatgtttcacccatgaggcaagtggaacctcctgctaaaaagcctgcaacccctgctgaagacgacgaagacgacgacattgaccttttcggttccgataacgaggaggaggacaaagaggctgcacagctgcgagaagagcggttgcggcagtacgccgagaagaaggccaagaagccagccctcgttgccaagtccagtatcctttag

SEQ ID NO: 122493 - DNA, 615 bp, Artificial Sequence
  derived and/or modified sequence
atggctacaaacttccttgctcatgaaaagatttggttcgacaagtttaagtatgacgacgccgagagacgattctacgagcagatgaacggccctgtggccggtgcgtcaagacaggaaaacggggcctccgtaatcctccgcgatatagctcgggcacgggagaatatccagaagagcctcgcgggcagttccggccccggggcttccagcggcactagtggtgaccacggtgaactggtggttcgcatcgccagcctggaagttgaaaaccaatcactcaggggggtcgtgcaggaactacaacaggccatttccaaactggaggctcggttgaatgtactggagaaaagtagtcctggccatcgggccaccgccccacagacccagcacgtctcccccatgcggcaggtggaacccccggccaaaaagcctgcaacacctgccgaagatgatgaagacgacgacatcgacctgtttggctcagataatgaggaggaagacaaggaggcagctcagctaagggaagagcgtctgcgccagtacgcggaaaaaaaggcaaaaaagccggcactagtggcaaagtcctccattttacttgatgttaagccttag

SEQ ID NO: 122494 - DNA, 507 bp, Artificial Sequence
  derived and/or modified sequence
atggcaaccaattttctggctcatgagaaaatttggttcgacaaatttaaatacgatgatgctgagagaagattttacgaacagatgaacggtcccgtagccggggcctccaggcaagagaacggagcctctgtgattctccgggatattgctcgcgcgagggagaatatccagaagtcactggccggcagtagcgggcccggagcctcaagcggaacgtccggagatcatggagaacttgtagtgcgaatcgccagtttggaagtcgagaatcaatctctccgcggggtcgttcaggagctccagcaggcgataagcaagctggaagctagacttaacgtactggagaaatctagtccaggacaccgggctaccgctccccagacgcaacatgtaagtccaatgcgtcaggtcgaacccccagccaagaagccagccactccggcggaggacgacgaagacgatgacatcgatctgttcgggtcggacaacgaggaagaggattag

SEQ ID NO: 122495 - DNA, 786 bp, Artificial Sequence
  derived and/or modified sequence
atggccacaaactttttggcgcacgaaaagatctggttcgataaattcaaatacgacgatgcagagaggagattctacgaacagatgaacggacctgttgctggagcgtcgaggcaagaaaatggcgctagtgtcatattacgggacattgccagggcccgggaaaatattcaaaagagcttagccggttcttccggacccggcgcaagcagtggcacatccggtgaccacggcgaactggtggttcggattgcttcccttgaggtagagaatcagtcgctgcgcggagttgttcaagagctgcaacaggccattagtaagttggaggcccggctgaacgtgcttgagaaatcttctcccggtcacagggccaccgcgccacagactcagcacgtgagccccatgaggcaggtggaaccgccggctaaaaagccagccacccctgccgaggatgatgaggacgatgacattgatctgttcgggagcgacaatgaagaagaggacaaggaggctgcccagctgcgggaggagcggctgcgtcagtacgccgagaaaaaagctaagaaaccagccctcgtagcgaaatcttcaatactgctcgacgttaaaccatgggacgatgagaccgatatggcgcaactagaggcttgtgtgcgaagtattcaacttgacgggctcgtctggggcgcatccaaattggtcccggttggctatggtatcaggaaactgcaaatccagtgcgtcgtggaagacgacaaggtcggcacagatttgctggaagagtag

SEQ ID NO: 122496 - DNA, 846 bp, Artificial Sequence
  derived and/or modified sequence
atggccaccaacttcctggcccacgagaagatctggtttgacaagttcaagtatgatgatgctgagcggcgcttctatgagcagatgaatggacctgtggccggggccagccggcaggagaatggagccagcgtcatcctgcgggacatcgcccgggcccgggagaacatccagaagagcctggccggcagcagcggccctggggccagcagcggcaccagcggggaccatggagagctggtggtgcgcatcgccagcctggaggtggagaaccagagcctgcggggcgtggtgcaggagctgcagcaggccatcagcaagctggaggcccggctgaatgtgctggagaagagcagccctggccaccgggccacagccccccagacccagcacgtgagccccatgaggcaggtggagcccccagccaagaagccagccaccccagcagaagatgatgaagatgatgacatcgacctgtttggaagtgacaatgaggaggaggacaaggaggccgcccagctgcgggaggagcggctgcggcagtatgcagagaagaaggccaagaagccagccctggtggccaagagcagcatcctgctggatgtgaagccctgggatgatgaaacagacatggcccagctggaggcctgtgtgcgcagcatccagctggatggcctggtgtggggcgccagcaagctggtgcctgtgggctacggcatcaggaagctgcagatccagtgtgtggtggaggatgacaaggtgggcacagacctgctggaggaggagatcaccaagtttgaggagcacgtgcagagcgtggacattgctgccttcaacaagatctag

SEQ ID NO: 122497 - DNA, 615 bp, Artificial Sequence
  derived and/or modified sequence
atggccaccaacttcctggcccacgagaagatctggtttgacaagttcaagtatgatgatgctgagcggcgcttctatgagcagatgaatggacctgtggccggggccagccggcaggagaatggagccagcgtcatcctgcgggacatcgcccgggcccgggagaacatccagaagagcctggccggcagcagcggccctggggccagcagcggcaccagcggggaccatggagagctggtggtgcgcatcgccagcctggaggtggagaaccagagcctgcggggcgtggtgcaggagctgcagcaggccatcagcaagctggaggcccggctgaatgtgctggagaagagcagccctggccaccgggccacagccccccagacccagcacgtgagccccatgaggcaggtggagcccccagccaagaagccagccaccccagcagaagatgatgaagatgatgacatcgacctgtttggaagtgacaatgaggaggaggacaaggaggccgcccagctgcgggaggagcggctgcggcagtatgcagagaagaaggccaagaagccagccctggtggccaagagcagcatcctgctggatgtgaagccctag

SEQ ID NO: 122498 - DNA, 501 bp, Artificial Sequence
  derived and/or modified sequence
atggccaccaacttcctggcccacgagaagatctggtttgacaagttcaagtatgatgatgctgagcggcgcttctatgagcagatgaatggacctgtggccggggccagccggcaggagaatggagccagcgtcatcctgcgggacatcgcccgggcccgggagaacatccagaagagcctggccggcagcagcggccctggggccagcagcggcaccagcggggaccatggagagctggtggtgcgcatcgccagcctggaggtggagaaccagagcctgcggggcgtggtgcaggagctgcagcaggccatcagcaagctggaggcccggctgaatgtgctggagaagagcagccctggccaccgggccacagccccccagacccagcacgtgagccccatgaggcaggtggagcccccagccaagaagccagccaccccagcagaagatgatgaagatgatgacatcgacctgtttggaagtgacaatgaggagtag

SEQ ID NO: 122499 - DNA, 600 bp, Artificial Sequence
  derived and/or modified sequence
atggccaccaacttcctggcccacgagaagatctggtttgacaagttcaagtatgatgatgctgagcggcgcttctatgagcagatgaatggacctgtggccggggccagccggcaggagaatggagccagcgtcatcctgcgggacatcgcccgggcccgggagaacatccagaagagcctggccggcagcagcggccctggggccagcagcggcaccagcggggaccatggagagctggtggtgcgcatcgccagcctggaggtggagaaccagagcctgcggggcgtggtgcaggagctgcagcaggccatcagcaagctggaggcccggctgaatgtgctggagaagagcagccctggccaccgggccacagccccccagacccagcacgtgagccccatgaggcaggtggagcccccagccaagaagccagccaccccagcagaagatgatgaagatgatgacatcgacctgtttggaagtgacaatgaggaggaggacaaggaggccgcccagctgcgggaggagcggctgcggcagtatgcagagaagaaggccaagaagccagccctggtggccaagagcagcatcctgtag

SEQ ID NO: 122500 - DNA, 507 bp, Artificial Sequence
  derived and/or modified sequence
atggccaccaacttcctggcccacgagaagatctggtttgacaagttcaagtatgatgatgctgagcggcgcttctatgagcagatgaatggacctgtggccggggccagccggcaggagaatggagccagcgtcatcctgcgggacatcgcccgggcccgggagaacatccagaagagcctggccggcagcagcggccctggggccagcagcggcaccagcggggaccatggagagctggtggtgcgcatcgccagcctggaggtggagaaccagagcctgcggggcgtggtgcaggagctgcagcaggccatcagcaagctggaggcccggctgaatgtgctggagaagagcagccctggccaccgggccacagccccccagacccagcacgtgagccccatgaggcaggtggagcccccagccaagaagccagccaccccagcagaagatgatgaagatgatgacatcgacctgtttggaagtgacaatgaggaggaggactag

SEQ ID NO: 122501 - DNA, 786 bp, Artificial Sequence
  derived and/or modified sequence
atggccaccaacttcctggcccacgagaagatctggtttgacaagttcaagtatgatgatgctgagcggcgcttctatgagcagatgaatggacctgtggccggggccagccggcaggagaatggagccagcgtcatcctgcgggacatcgcccgggcccgggagaacatccagaagagcctggccggcagcagcggccctggggccagcagcggcaccagcggggaccatggagagctggtggtgcgcatcgccagcctggaggtggagaaccagagcctgcggggcgtggtgcaggagctgcagcaggccatcagcaagctggaggcccggctgaatgtgctggagaagagcagccctggccaccgggccacagccccccagacccagcacgtgagccccatgaggcaggtggagcccccagccaagaagccagccaccccagcagaagatgatgaagatgatgacatcgacctgtttggaagtgacaatgaggaggaggacaaggaggccgcccagctgcgggaggagcggctgcggcagtatgcagagaagaaggccaagaagccagccctggtggccaagagcagcatcctgctggatgtgaagccctgggatgatgaaacagacatggcccagctggaggcctgtgtgcgcagcatccagctggatggcctggtgtggggcgccagcaagctggtgcctgtgggctacggcatcaggaagctgcagatccagtgtgtggtggaggatgacaaggtgggcacagacctgctggaggagtag

SEQ ID NO: 122502 - DNA, 846 bp, Artificial Sequence
  derived and/or modified sequence
atggccaccaacttcctggcccacgagaagatctggttcgacaagtttaaatacgacgatgccgaacggcgtttctacgagcagatgaatggtcctgtggctggtgcaagtagacaagagaatggggcctcagtcatcctacgagatatagccagagcgagagaaaacattcagaaatctctcgctggcagcagtgggccaggcgcatcatccggcaccagtggagaccatggagagctcgtggtgagaatcgcttcactggaagttgaaaaccaaagtctgaggggcgtcgtgcaggaactgcagcaggctatcagcaagctcgaggctaggctgaatgtgctggaaaaatccagcccgggacatagagccactgccccacaaacacagcatgtgagccccatgcgccaggtcgagcctcctgccaagaagcctgcgactcccgccgaagacgacgaagatgatgacatcgacctctttggatcagacaacgaggaggaagataaagaggccgcccaattaagggaagagaggttgcgccagtatgcagaaaagaaagcgaaaaaaccagctcttgtcgcaaagtcttcaattctgttggacgtcaaaccctgggacgatgagactgatatggcccagctggaagcatgtgtgaggtcaattcagctggacggactagtgtggggcgctagtaaactagtcccagtggggtacggcatcaggaaacttcaaatccaatgcgtggtcgaagatgacaaagtggggactgatctgctcgaagaggagatcaccaaatttgaggagcatgtgcagtcggtggacattgccgctttcaataaaatttag

SEQ ID NO: 122503 - DNA, 846 bp, Artificial Sequence
  derived and/or modified sequence
atggccaccaacttcctggcccacgagaagatctggttcgacaagtttaaatacgacgacgcagaacggaggttttatgaacaaatgaacggacccgtggcaggcgctagtaggcaggagaatggggccagtgtcattctgagagacattgcacgcgcccgcgagaacatacagaaatctttggccggttcgtccggcccaggggcttctagtggcacatctggggaccatggggaactcgtggtccgaatcgcttcactggaagtagagaaccagtcactgagaggggtggttcaggagttgcaacaagctattagtaagctcgaggcccgtttgaatgtgttggagaagagttcacccggacatagggccacagcccctcaaacacagcatgtgagtcccatgaggcaggtggaaccaccggccaaaaaaccggcaacacctgctgaggatgacgaggatgacgacatcgacctgtttggctcggataacgaggaggaagacaaagaagccgcccagttgagggaggaacggttgagacagtatgccgaaaagaaggcaaagaagcctgccctggtggctaagagctcgatccttcttgacgttaagccatgggacgatgagactgacatggcccagttggaggcttgcgttaggtccattcagctcgatggcttggtttggggtgccagcaaactggtgccagtcggctatggaatcaggaagctccagatccagtgtgtagtggaagatgacaaagtgggaacagatttactagaagaggagatcactaagtttgaggagcatgtgcagtctgtagatatcgcagcttttaataagatttag

SEQ ID NO: 122504 - DNA, 846 bp, Artificial Sequence
  derived and/or modified sequence
atggccaccaacttcctggcccacgagaagatctggttcgacaagttcaaatacgacgacgctgaacggcgattttatgagcagatgaacgggcccgttgcaggcgcaagccgccaggaaaatggagctagcgtgattctcagagatattgcacgggccagggagaacatccaaaaatctctggcgggcagctcagggcctggagcaagctctggtacctctggggatcacggcgagctggtggtcaggatagcctcgctagaggtagagaatcagagcctgcgtggtgtcgttcaagagctgcagcaggcaatttccaaactggaagcacgcttaaatgttctggagaagagctcgcctggacaccgggctaccgcaccccagacgcagcatgtgtcgcctatgagacaagtcgagccacctgccaaaaagccggccaccccagcggaggacgacgaggacgatgatattgacctctttggtagtgacaacgaagaagaggacaaggaagctgctcaacttcgggaggagcgcctaaggcaatatgctgagaaaaaggcaaaaaagcctgcactggtcgcaaagagttccattctgctcgatgtcaaaccatgggatgacgaaacagacatggctcagctcgaggcttgcgtgcgttcgatccaattagatggactggtctggggtgccagtaaactggtgccagtgggctacggtataaggaagctgcagattcagtgcgtggtcgaagatgacaaggtgggaactgatctgctcgaagaggagattaccaagttcgaggagcatgtgcagtccgtggatattgcggcatttaacaagatctag

SEQ ID NO: 122505 - DNA, 846 bp, Artificial Sequence
  derived and/or modified sequence
atggccaccaacttcctggcccacgagaagatctggttcgacaagttcaaatatgatgacgcagaacgacgtttctacgaacagatgaacggaccggtggcaggagcctcacgtcaggagaatggggctagcgtgatcctccgagatatagcgagggcccgggaaaatatccagaaaagcctcgcaggctccagcggacctggtgccagttcaggaacttccggagatcacggtgagctagtggtacggatagccagtctcgaagtggagaaccaatctctgcggggcgtcgtccaggagttacagcaggcaatatctaagcttgaggccagactcaacgtcctcgagaagtcgtctccaggacaccgggcgaccgcaccacagacccagcacgttagccctatgcggcaagtggagccccctgcaaagaagccagctacccccgctgaggatgatgaggacgatgatatagatctgtttgggagcgacaatgaggaggaggacaaagaagccgcccagctgcgggaagagaggttaaggcagtatgcggaaaagaaggctaagaaacccgcactggtagctaaatctagcatattgctggacgtaaagccatgggacgacgaaacagacatggctcagttagaggcttgtgtccgctcaatccaactggacggactggtatggggcgccagcaagctggtgcccgtcggatatggcattagaaaactgcagatacagtgcgtggtggaagatgacaaagtcgggactgatctcctagaagaagagattaccaaattcgaggagcatgttcagtctgtggacatcgccgctttcaataaaatatag

SEQ ID NO: 122506 - DNA, 615 bp, Artificial Sequence
  derived and/or modified sequence
atggccaccaacttcctggcccacgagaagatctggttcgacaagttcaaatacgatgacgccgagcggagattctacgaacagatgaacgggccggtagctggtgcctcacgacaggaaaacggggcctccgtgattctgcgggacatcgcacgtgctcgtgagaacatccagaagagcttagccgggagctccggaccgggggcgtcatcaggtactagtggcgatcacggtgagctggtcgttcgaatcgcttccctcgaggtcgaaaaccagtctttacgaggcgtcgtccaggaacttcagcaagccatttcaaagttggaggcacgtcttaacgtgctagagaagtccagccctggacatcgggcaacagctccacaaactcagcacgtgtccccaatgcggcaagtcgaacccccagccaagaagccagccactccagcagaagacgacgaggatgatgacattgacctctttggatctgacaacgaagaagaggataaggaagcagcacagctgcgggaggaacgcctcagacagtacgctgaaaagaaggcgaaaaaacccgcactggtggccaaatcctctatcctgctagatgtcaagccctag

SEQ ID NO: 122507 - DNA, 501 bp, Artificial Sequence
  derived and/or modified sequence
atggccaccaacttcctggcccacgagaagatctggttcgacaagttcaaatacgatgacgccgaaaggaggttctacgagcaaatgaatggtcccgtggccggtgcctctcggcaagagaacggcgcatctgttattcttcgggacattgcacgggcacgggaaaacatccagaaatctttggcaggctctagcggtcctggcgcctcctctgggacctccggtgatcacggcgaacttgtggtgagaatagcttccctggaggtggagaatcagagtctgaggggagttgtccaggaactgcagcaagcgatatctaagctcgaggcccgtctgaacgttttggagaagtcatctcctggccacagggccactgcgcctcagacacagcatgtctcgccaatgagacaagttgaacctcccgccaagaaacccgcgaccccagcagaagatgacgaggacgacgatatcgatctgttcggtagcgacaatgaagagtag

SEQ ID NO: 122508 - DNA, 600 bp, Artificial Sequence
  derived and/or modified sequence
atggccaccaacttcctggcccacgagaagatctggttcgacaagtttaagtacgatgacgccgaacgccgattttatgagcagatgaacggccctgtagccggagcgtctcgccaggaaaacggcgccagcgtgatactgagggacattgccagagcccgcgaaaacattcagaagagtctggccggcagcagtggtccaggcgcctcctccgggacatctggcgaccacggggagctagtcgtcaggattgctagcctggaggtggaaaatcagtctttacgcggagttgtccaggagctgcaacaggcaatctcaaaattggaagcacgtttgaatgtgttggagaaatcatccccagggcacagggcaacagccccacagacccaacatgtatcccccatgagacaggttgagccccccgccaagaaaccagccaccccagccgaggatgatgaagatgacgacatcgatttattcggctcggacaatgaggaagaagacaaggaggctgcacagctgagggaggagcgcctcaggcagtatgctgaaaagaaggcaaagaagcccgcacttgtcgccaagtcctcaatcctgtag

SEQ ID NO: 122509 - DNA, 615 bp, Artificial Sequence
  derived and/or modified sequence
atggccaccaacttcctggcccacgagaagatctggttcgacaagttcaagtatgatgatgccgaaagaaggttttatgagcagatgaatgggccggtcgcgggggccagccgccaggagaacggggccagtgtgatactccgtgacatcgccagggcccgagaaaacatacagaagtcactcgcggggagtagcggccccggcgcctcctcaggaacctcaggggatcatggagagctcgttgtgcggatcgccagtctggaggttgaaaaccagagccttcggggcgtggttcaggaattgcagcaggctatttctaagctggaagctcgtctcaatgtactagagaagtcatctcctgggcatcgagccactgcccctcagacgcagcatgtcagcccgatgaggcaggtagaacccccggcaaaaaaacctgccacccccgctgaggacgacgaggacgacgacatcgacctgtttgggtccgacaacgaagaggaggacaaagaagctgcgcagctgagagaggaacgtctgcgccaatacgctgaaaaaaaggctaaaaagcctgcgttggttgctaagtcctccattctgttggacgtaaagccatag

SEQ ID NO: 122510 - DNA, 507 bp, Artificial Sequence
  derived and/or modified sequence
atggccaccaacttcctggcccacgagaagatctggttcgacaagtttaagtacgacgatgccgagagaagattctacgagcaaatgaacggaccagtggccggcgcatcacgccaagaaaatggggcaagcgtgatactccgagacattgctagagcacgggaaaatatccagaagtctcttgcagggtcttctggcccaggagcgtcctccggcacaagcggggaccatggcgaactggtggtgcgcatcgcaagccttgaggtggagaatcaatccttgcggggggttgtgcaggagttgcaacaggccatatccaagctcgaagcacggcttaacgtgctggagaaatcctctccaggtcatagagccaccgcacctcaaacccagcacgtcagccccatgcgacaggtcgagcctccagcaaagaagccggccacccccgcagaggacgatgaggacgatgatatcgatttatttggctccgataacgaggaagaagattag

SEQ ID NO: 122511 - DNA, 786 bp, Artificial Sequence
  derived and/or modified sequence
atggccaccaacttcctggcccacgagaagatctggttcgacaagtttaagtacgatgacgccgagaggagattttatgaacagatgaatggtccggtggctggggctagtaggcaagagaacggcgcctcggtgatcctccgtgatatcgcacgggccagggagaatatacagaagagtctggccgggagctcaggtccgggcgccagcagcggaacaagtggagatcacggagagcttgtggtacgtatagcttcgttagaggtagagaaccagagtctcaggggcgtggtgcaggagttacaacaggctatatcaaagctggaagctaggctgaacgttttggaaaaatcgtctccaggtcacagggctaccgcaccacaaacccagcacgtgtctcctatgagacaggtggagcccccagctaaaaaacccgcaacaccagccgaagacgatgaggacgacgatatagatctattcggctccgacaacgaggaggaagataaggaagccgctcagctgcgtgaggaacggctccgtcaatatgccgagaagaaagccaagaagcccgccttggtagccaagtcaagcattctgctcgacgtgaaaccgtgggacgatgagaccgacatggcacaactggaggcatgtgttaggtcaattcagttggatgggctggtatggggagcctcaaagctggtaccagtgggatacggaatacggaagttgcagatacagtgtgttgtcgaagacgataaggttggaactgatctgctggaagagtag

SEQ ID NO: 122512 - DNA, 846 bp, Artificial Sequence
  derived and/or modified sequence
atggcgactaatttccttgcacatgagaagatctggtttgacaaattcaagtatgacgacgctgagaggagattctatgagcagatgaacggccctgtggccggtgcctcacggcaggagaacggagcctctgtgatacttagggacattgcccgtgctagagaaaatattcagaagtctctcgccggaagtagcggccctggggctagctcgggtacgagcggagaccatggcgaattggtcgtccggatagcatctttggaggtggagaaccagtctttacggggtgtggttcaagagctgcaacaagctatttcaaagctggaggcacgtctcaacgttctggagaaatcatccccaggccaccgggctacagcacctcagacacagcatgtctccccaatgagacaagtagaaccaccagctaagaaacccgctacgccagccgaggatgatgaggatgacgatatcgacttgttcggaagcgataacgaggaggaagacaaggaggccgcacagctcagagaagaaagactgcgacaatacgcagagaagaaggctaagaaaccagcgctggtggcgaagagctcgatactgctggacgtgaagccgtgggatgatgaaaccgatatggcacagctggaggcctgcgtgcgtagtattcagctggacggtttggtttggggagcctccaagctggtgccagttggttatgggatccgtaagttacagatacagtgcgtggtggaagatgacaaagtcggtacagacctcttagaggaggaaatcacaaagttcgaggaacacgtgcaatcagtagatatagcagccttcaacaaaatctag

SEQ ID NO: 122513 - DNA, 846 bp, Artificial Sequence
  derived and/or modified sequence
atggcgacaaacttcctggctcatgaaaagatatggtttgacaagttcaagtacgacgacgcagagagaagattttacgaacagatgaatgggccagtggcaggcgcatcccgccaggagaacggagcaagcgtaattctgcgtgatatagcaagggctagggagaatattcagaagtcactggcgggaagttctggtccaggagccagtagtggtacatctggggatcacggcgaactcgtcgtgaggatcgcgagtttggaggtagagaatcagagtctccgtggggtggtgcaggagctgcaacaggcaatctctaaactggaagccagactgaatgtgctggaaaagtcctctcctggccaccgcgctactgcgcctcagacccagcacgttagccctatgcggcaggtagaaccacctgcaaagaagccggcaacaccagctgaggacgacgaggacgatgatatagatttgttcggttccgacaatgaggaagaggacaaggaagctgctcaacttcgtgaggagcgcctgagacagtacgcagaaaaaaaagctaaaaaaccagcactggtagccaagtcatccatcctgttagatgtcaagccgtgggatgacgaaaccgatatggcacaactggaagcttgtgtccgctcgatacagctggacggcctagtgtggggcgcatctaaactggtaccagtagggtacggcataagaaagttacagatacagtgtgttgtcgaggatgacaaggtaggcaccgatcttttagaagaagagataaccaaattcgaagaacacgtccaaagcgttgacatagcagccttcaacaaaatctag

SEQ ID NO: 122514 - DNA, 846 bp, Artificial Sequence
  derived and/or modified sequence
atggcaacaaactttctcgcccacgaaaagatctggtttgataagtttaaatatgatgatgccgaaaggagattctatgagcaaatgaatggcccagtcgcaggagcctctcgccaggaaaacggcgctagtgtaattctgcgagacatcgctagagctcgagagaatattcagaagtccctagcagggagctcaggtccaggtgcaagctctggcacttccggagaccacggggagctggtggtgagaattgcctcactagaagtagaaaatcaaagtctgagaggcgtggtacaggaactccagcaggccatcagcaagctcgaagcgagactcaatgtgctggagaaatcttccccagggcacagagcgactgctccacagacacagcacgtgagcccaatgagacaggtggagccacccgcaaaaaagcccgcaacgcccgcagaagacgatgaggacgatgacatcgacctgttcggtagcgacaatgaggaagaagataaggaggccgctcaactgcgcgaggagaggttgcgccagtacgcagagaagaaggccaagaagcccgctctggttgccaagagctccattctgctagacgtgaagccatgggacgacgaaaccgatatggcgcagctggaagcctgcgtccggagtatccaattggatggcctcgtgtggggtgcttccaaactggtacctgtgggttatggcattcgcaaattacaaattcagtgtgttgtggaggacgataaagtggggaccgacttgcttgaggaggagattacaaaatttgaagaacacgtccagtctgtggatatcgcggctttcaacaaaatctag

SEQ ID NO: 122515 - DNA, 846 bp, Artificial Sequence
  derived and/or modified sequence
atggctacaaacttccttgctcatgaaaaaatttggttcgataagttcaagtacgacgacgccgagcgcagattttatgaacaaatgaatggccctgtcgccggagcttcacgccaagaaaatggggctagtgtgattctaagggacattgccagagcacgcgagaacattcagaaatccctggccggaagtagcggtccgggtgcatcatccggcactagtggcgaccacggagagctggtcgttaggatcgcatcactggaggtcgaaaatcagtccctccgcggagtagtccaagaactccagcaggcgatctctaagctcgaagctagactgaatgtcctggaaaagtcctcacccggacatcgggcaacagctccccaaactcagcatgtgtcacccatgcgacaggttgagcctcccgcaaaaaaaccagcgacccccgcagaagacgacgaggacgatgatatagatctgttcgggtcagacaatgaagaggaggataaggaggccgctcagctaagggaagagcggctgaggcagtacgctgaaaagaaagctaagaaacctgcactggtggctaagagctctatactgctcgacgttaagccttgggacgacgaaacagatatggcccagctggaggcctgtgtgcgttcaatccagttagatggccttgtgtggggagccagcaagctggtaccagtgggatacgggatccggaaactccagatccagtgtgtggtcgaagacgataaagtcgggacagacttgctggaggaggaaattacaaaattcgaggagcacgtgcaatccgttgacatcgctgctttcaataaaatctag

SEQ ID NO: 122516 - DNA, 615 bp, Artificial Sequence
  derived and/or modified sequence
atggcaactaattttcttgctcacgaaaagatttggttcgacaaattcaaatatgacgatgccgaaagaagattttacgagcagatgaacggacccgtcgcaggggcttctcgccaggaaaatggagcttccgtgattttacgtgatattgcacgcgctagagagaatattcagaaaagtctagcaggcagcagcggacccggtgcatcatcaggtacctcaggggatcacggcgaattggtggtccggatcgccagcctagaagtggagaaccagagtctcaggggcgttgttcaggagctgcagcaggccatttccaagctggaggcaaggctaaatgtcctggagaagagttcccccggacaccgagccacggccccacagacccaacatgtcagtcccatgcgccaagtggaaccgcctgccaagaaacccgctaccccagctgaagacgacgaggatgacgatattgatctatttggctcagacaacgaagaagaagacaaagaggctgcccaactgagagaagagcgactcagacagtatgctgagaaaaaggcaaagaagcccgcactagtcgccaagtctagcatccttcttgacgtgaaaccttag

SEQ ID NO: 122517 - DNA, 501 bp, Artificial Sequence
  derived and/or modified sequence
atggcgacgaacttcctggctcacgaaaagatttggtttgataaatttaagtatgacgacgctgagcgacggttttacgagcagatgaatgggcctgtcgctggcgcaagccggcaagagaatggggcatctgtgatcttacgcgacattgcacgagcaagggagaatatacagaagtccttggctggatcttctgggccaggcgcaagcagcggaaccagcggggaccacggggagttggttgtacgtattgcatcactggaggtcgagaaccagagtttgagaggggtggtgcaggaactccagcaggcaattagtaaactcgaggctcgcctcaacgtgttagaaaagtccagccctggccacagagctacggccccacaaacccagcacgtgtcccctatgcggcaagtggaaccacccgctaagaaaccagcaacgcctgcagaagacgacgaggacgacgacattgacctctttggttcagacaatgaagaatag

SEQ ID NO: 122518 - DNA, 600 bp, Artificial Sequence
  derived and/or modified sequence
atggcaaccaactttttggcacatgaaaagatatggtttgataagttcaagtatgatgatgctgagaggcgattttatgaacaaatgaatggccctgtggctggtgccagccgccaagaaaacggggctagcgtgattctacgcgacattgctcgcgcacgtgagaatatccaaaaatcactggctggctcgtctggacctggcgctagctccgggacgtctggtgaccacggcgagctggttgtgagaatcgcgagcctcgaagtggaaaatcaatcactgcgcggagtcgttcaagagctacagcaagccatctccaagctggaggccaggctgaatgtgctggagaagagctcccctggtcacagagctactgcaccacagactcagcatgtttcccccatgaggcaggtggagcctcccgctaaaaaacctgccactcccgctgaagacgacgaagacgacgatattgatttgtttggaagcgacaacgaggaagaagataaggaggccgcacaactacgagaggagaggctgcgccagtatgctgaaaagaaggccaagaagccagcccttgtggccaaatcctctatcctgtag

SEQ ID NO: 122519 - DNA, 615 bp, Artificial Sequence
  derived and/or modified sequence
atggcaacaaattttctggcccacgagaaaatctggttcgacaaattcaagtatgacgacgctgagcgaaggttttatgaacaaatgaacggtcctgtggctggggcatctcgccaggaaaacggggctagcgtgatccttagagatattgcaagagcccgagagaatatccagaaatctctagccggttccagcggtcccggtgcttccagtggaacctctggagaccacggagagttggtggtccgcatcgcttccctggaggtcgagaatcagagcctgcggggagtcgtgcaggaactacaacaagccatctctaaattagaggccaggctgaatgttctagaaaaaagctccccgggacacagggccaccgccccacagacccaacatgttagccctatgagacaggtggaaccgcctgcaaagaagcccgctactcccgcagaagacgatgaagacgatgacattgacctcttcggcagcgataacgaggaggaggacaaggaagcagcacagctgagagaggagagattaaggcaatatgccgaaaagaaagccaaaaaacctgccctcgtggcaaagtcctccatattactcgacgttaaaccatag

SEQ ID NO: 122520 - DNA, 507 bp, Artificial Sequence
  derived and/or modified sequence
atggccactaattttttggcacacgagaaaatttggtttgataagtttaagtatgatgatgccgagcgcagattctacgaacagatgaacggtccagtcgccggtgcttcacgtcaagaaaatggcgctagcgttatactccgggatattgccagggccagagagaacatacagaagagcctggcagggagttcagggccaggtgccagttcgggcacaagcggggaccatggcgagctggtggtgcgcatcgcctccctggaagtcgagaatcagtctctgagaggcgttgtgcaggagttgcaacaggccattagtaagctggaggcacgtctgaatgtactagagaagagttcacccggtcatcgcgcaacagcccctcaaacccagcatgtcagtcccatgaggcaggtggagcctcccgctaagaagccagccactcccgctgaagatgatgaagacgatgacatagatttgtttgggagtgacaacgaggaagaggactag

SEQ ID NO: 122521 - DNA, 786 bp, Artificial Sequence
  derived and/or modified sequence
atggcgaccaattttctggcgcacgagaagatttggtttgacaaattcaagtacgacgatgcagaaagaagattttatgaacagatgaacgggcctgtcgcaggggcatccagacaagagaacggcgctagcgtgatattgcgtgatatcgctagagcccgagagaacatccaaaaaagcctcgccggaagtagtggcccaggagccagctccgggacttcaggggaccatggagaattggtggtgcgtatcgcgagcctagaggtggaaaaccaaagtctgcgtggcgtggtgcaagagcttcagcaagctattagcaaactggaggctagattgaatgttcttgaaaagagtagtcctggtcacagggccacagcgccacaaacgcagcatgtcagtcccatgcggcaggtggagccccctgctaagaagcctgctactcccgcagaggacgacgaagacgacgacatcgatctcttcggctccgacaatgaggaggaagataaagaagccgcacaactaagggaagagagactacgacagtacgccgaaaagaaagccaagaagcctgccctggtggcaaaatctagcattctactggatgtcaagccctgggatgacgagacagatatggcacagctggaagcatgcgttcggtccatccagctggatggcctggtgtggggtgcatcgaaattggtcccagtggggtacggcattaggaaactccagatacagtgtgtggtggaagatgataaggtaggaaccgatctccttgaagagtag

SEQ ID NO: 122522 - DNA, 846 bp, Artificial Sequence
  derived and/or modified sequence
atggccaccaacttcctggcccacgagaagatctggttcgacaagttcaagtacgacgacgccgagagaagattctacgagcagatgaacggccccgtggccggcgccagcagacaggagaacggcgccagcgtgatcctgagagacatcgccagagccagagagaacatccagaagagcctggccggcagcagcggccccggcgccagcagcggcaccagcggcgaccacggcgagctggtggtgagaatcgccagcctggaggtggagaaccagagcctgagaggcgtggtgcaggagctgcagcaggccatcagcaagctggaggccagactgaacgtgctggagaagagcagccccggccacagagccaccgccccccagacccagcacgtgagccccatgagacaggtggagccccccgccaagaagcccgccacccccgccgaggacgacgaggacgacgacatcgacctgttcggcagcgacaacgaggaggaggacaaggaggccgcccagctgagagaggagagactgagacagtacgccgagaagaaggccaagaagcccgccctggtggccaagagcagcatcctgctggacgtgaagccctgggacgacgagaccgacatggcccagctggaggcctgcgtgagaagcatccagctggacggcctggtgtggggcgccagcaagctggtgcccgtgggctacggcatcagaaagctgcagatccagtgcgtggtggaggacgacaaggtgggcaccgacctgctggaggaggagatcaccaagttcgaggagcacgtgcagagcgtggacatcgccgccttcaacaagatctag

SEQ ID NO: 122523 - DNA, 615 bp, Artificial Sequence
  derived and/or modified sequence
atggccaccaacttcctggcccacgagaagatctggttcgacaagttcaagtacgacgacgccgagagaagattctacgagcagatgaacggccccgtggccggcgccagcagacaggagaacggcgccagcgtgatcctgagagacatcgccagagccagagagaacatccagaagagcctggccggcagcagcggccccggcgccagcagcggcaccagcggcgaccacggcgagctggtggtgagaatcgccagcctggaggtggagaaccagagcctgagaggcgtggtgcaggagctgcagcaggccatcagcaagctggaggccagactgaacgtgctggagaagagcagccccggccacagagccaccgccccccagacccagcacgtgagccccatgagacaggtggagccccccgccaagaagcccgccacccccgccgaggacgacgaggacgacgacatcgacctgttcggcagcgacaacgaggaggaggacaaggaggccgcccagctgagagaggagagactgagacagtacgccgagaagaaggccaagaagcccgccctggtggccaagagcagcatcctgctggacgtgaagccctag

SEQ ID NO: 122524 - DNA, 501 bp, Artificial Sequence
  derived and/or modified sequence
atggccaccaacttcctggcccacgagaagatctggttcgacaagttcaagtacgacgacgccgagagaagattctacgagcagatgaacggccccgtggccggcgccagcagacaggagaacggcgccagcgtgatcctgagagacatcgccagagccagagagaacatccagaagagcctggccggcagcagcggccccggcgccagcagcggcaccagcggcgaccacggcgagctggtggtgagaatcgccagcctggaggtggagaaccagagcctgagaggcgtggtgcaggagctgcagcaggccatcagcaagctggaggccagactgaacgtgctggagaagagcagccccggccacagagccaccgccccccagacccagcacgtgagccccatgagacaggtggagccccccgccaagaagcccgccacccccgccgaggacgacgaggacgacgacatcgacctgttcggcagcgacaacgaggagtag

SEQ ID NO: 122525 - DNA, 600 bp, Artificial Sequence
  derived and/or modified sequence
atggccaccaacttcctggcccacgagaagatctggttcgacaagttcaagtacgacgacgccgagagaagattctacgagcagatgaacggccccgtggccggcgccagcagacaggagaacggcgccagcgtgatcctgagagacatcgccagagccagagagaacatccagaagagcctggccggcagcagcggccccggcgccagcagcggcaccagcggcgaccacggcgagctggtggtgagaatcgccagcctggaggtggagaaccagagcctgagaggcgtggtgcaggagctgcagcaggccatcagcaagctggaggccagactgaacgtgctggagaagagcagccccggccacagagccaccgccccccagacccagcacgtgagccccatgagacaggtggagccccccgccaagaagcccgccacccccgccgaggacgacgaggacgacgacatcgacctgttcggcagcgacaacgaggaggaggacaaggaggccgcccagctgagagaggagagactgagacagtacgccgagaagaaggccaagaagcccgccctggtggccaagagcagcatcctgtag

SEQ ID NO: 122526 - DNA, 507 bp, Artificial Sequence
  derived and/or modified sequence
atggccaccaacttcctggcccacgagaagatctggttcgacaagttcaagtacgacgacgccgagagaagattctacgagcagatgaacggccccgtggccggcgccagcagacaggagaacggcgccagcgtgatcctgagagacatcgccagagccagagagaacatccagaagagcctggccggcagcagcggccccggcgccagcagcggcaccagcggcgaccacggcgagctggtggtgagaatcgccagcctggaggtggagaaccagagcctgagaggcgtggtgcaggagctgcagcaggccatcagcaagctggaggccagactgaacgtgctggagaagagcagccccggccacagagccaccgccccccagacccagcacgtgagccccatgagacaggtggagccccccgccaagaagcccgccacccccgccgaggacgacgaggacgacgacatcgacctgttcggcagcgacaacgaggaggaggactag

SEQ ID NO: 122527 - DNA, 786 bp, Artificial Sequence
  derived and/or modified sequence
atggccaccaacttcctggcccacgagaagatctggttcgacaagttcaagtacgacgacgccgagagaagattctacgagcagatgaacggccccgtggccggcgccagcagacaggagaacggcgccagcgtgatcctgagagacatcgccagagccagagagaacatccagaagagcctggccggcagcagcggccccggcgccagcagcggcaccagcggcgaccacggcgagctggtggtgagaatcgccagcctggaggtggagaaccagagcctgagaggcgtggtgcaggagctgcagcaggccatcagcaagctggaggccagactgaacgtgctggagaagagcagccccggccacagagccaccgccccccagacccagcacgtgagccccatgagacaggtggagccccccgccaagaagcccgccacccccgccgaggacgacgaggacgacgacatcgacctgttcggcagcgacaacgaggaggaggacaaggaggccgcccagctgagagaggagagactgagacagtacgccgagaagaaggccaagaagcccgccctggtggccaagagcagcatcctgctggacgtgaagccctgggacgacgagaccgacatggcccagctggaggcctgcgtgagaagcatccagctggacggcctggtgtggggcgccagcaagctggtgcccgtgggctacggcatcagaaagctgcagatccagtgcgtggtggaggacgacaaggtgggcaccgacctgctggaggagtag

SEQ ID NO: 122528 - DNA, 1179 bp, Artificial Sequence
  derived and/or modified sequence
ttggagggcgtccgcgggacgggggcgccgggagcactgtctcacggcgcatcccggtcgtggaagcccctcggccaggctgctggggcctaaggcctgtgtttgctgccgtctccgtgggagaccagacatctgccccagctgtttctctggcctgcagaccttcgtacaccacgtctttgtcaagcaccagttactgcacgcatcagctgagcacggaggggataggcacggacgcaacacttttggaacttagacgctacagaaaaatggctacaaacttcctagcacatgagaagatctggttcgacaagttcaaatatgacgacgcagaaaggagattctacgagcagatgaacgggcctgtggcaggtgcctcccgccaggagaacggcgccagcgtgatcctccgtgacattgcgagagccagagagaacatccagaaatccctggctggaagctcaggccccggggcctccagcggcaccagcggagaccacggtgagctcgtcgtccggattgccagtctggaagtggagaaccagagtctgcgtggcgtggtacaggagctgcagcaggccatctccaagctggaggcccggctgaacgtgctggagaagagctcgcctggccaccgggccacggccccacagacccagcacgtatctcccatgcgccaagtggagcccccagccaagaagccagccacaccagcagaggatgacgaggatgatgacattgacctgtttggcagtgacaatgaggaggaggacaaggaggcggcacagctgcgggaggagcggctacggcagtacgcggagaagaaggccaagaagcctgcactggtggccaagtcctccatcctgctggatgtcaagccttgggatgatgagacggacatggcccagctggaggcctgtgtgcgctctatccagctggacgggctggtctggggggcttccaagctggtgcccgtgggctacggtatccggaagctacagattcagtgtgtggtggaggacgacaaggtggggacagacttgctggaggaggagatcaccaagtttgaggagcacgtgcagagtgtcgatatcgcagctttcaacaagatctgaagcctgagtgtgtgtacgtgcgcgcgtgcgtgaggccctgccacgattaaagactgagaccggc

SEQ ID NO: 122529 - DNA, 1249 bp, Artificial Sequence
  derived and/or modified sequence
cggcgacaccactggccgcgaagcgcagggggggcgcgcgcgctgccgcccgttcccagcacttgtgcagactcctccggggaagagcggcctccgcggtcatctccaacggaattctgcctttgaagtgtcggggcacggcgcgtcgagggtcctggcggccaggcggggcgtgtgcaagggtcgcgtcccccccccgggcccccggcccgtggctcttggtagagcccagtgcttcatttcccgtgcgcggcccgggcggccctccctttcatcagtcttcccgcgtccgccgattcctcctccttggtcgccgcgtccttggctggcgtcagaaaaatggctacaaacttcctagcacatgagaagatctggttcgacaagttcaaatatgacgacgcagaaaggagattctacgagcagatgaacgggcctgtggcaggtgcctcccgccaggagaacggcgccagcgtgatcctccgtgacattgcgagagccagagagaacatccagaaatccctggctggaagctcaggccccggggcctccagcggcaccagcggagaccacggtgagctcgtcgtccggattgccagtctggaagtggagaaccagagtctgcgtggcgtggtacaggagctgcagcaggccatctccaagctggaggcccggctgaacgtgctggagaagagctcgcctggccaccgggccacggccccacagacccagcacgtatctcccatgcgccaagtggagcccccagccaagaagccagccacaccagcagaggatgacgaggatgatgacattgacctgtttggcagtgacaatgaggaggaggacaaggaggcggcacagctgcgggaggagcggctacggcagtacgcggagaagaaggccaagaagcctgcactggtggccaagtcctccatcctgctggatgtcaagccttgggatgatgagacggacatggcccagctggaggcctgtgtgcgctctatccagctggacgggctggtctggggggcttccaagctggtgcccgtgggctacggtatccggaagctacagattcagtgtgtggtggaggacgacaaggtggggacagacttgctggaggaggagatcaccaagtttgaggagcacgtgcagagtgtcgatatcgcagctttcaacaagatctgaagcctgagtgtgtgtacgtgcgcgcgtgcgtgaggccctgccacgattaaagactgagaccggc

SEQ ID NO: 122530 - DNA, 1452 bp, Artificial Sequence
  derived and/or modified sequence
gacaccactggccgcgaagcgcagggggggcgcgcgcgctgccgcccgttcccagcacttgtgcagactcctccggggaagagcggcctccgcggtcatctccaacggaattctgcctttgaagtgtcggggcacggcgcgtcgagggtcctggcggccaggcggggcgtgtgcaagggtcgcgtcccccccccgggcccccggcccgtggctcttggtagagcccagtgcttcatttcccgtgcgcggcccgggcggccctccctttcatcagtcttcccgcgtccgccgattcctcctccttggtcgccgcgtccttggctggcgtaaagctcctcctgagcttggataaactgcaggagcgaaggggctgaccgtttgtcgggacgcagttgaaagagtcgctgtgtcctgctccgggctctcctgctggagaggagaggcttgcacgtgcctgtcgtctgcgcaagctttgaagctcagacttggtctctgttaggagagatgaaaaatggctacaaacttcctagcacatgagaagatctggttcgacaagttcaaatatgacgacgcagaaaggagattctacgagcagatgaacgggcctgtggcaggtgcctcccgccaggagaacggcgccagcgtgatcctccgtgacattgcgagagccagagagaacatccagaaatccctggctggaagctcaggccccggggcctccagcggcaccagcggagaccacggtgagctcgtcgtccggattgccagtctggaagtggagaaccagagtctgcgtggcgtggtacaggagctgcagcaggccatctccaagctggaggcccggctgaacgtgctggagaagagctcgcctggccaccgggccacggccccacagacccagcacgtatctcccatgcgccaagtggagcccccagccaagaagccagccacaccagcagaggatgacgaggatgatgacattgacctgtttggcagtgacaatgaggaggaggacaaggaggcggcacagctgcgggaggagcggctacggcagtacgcggagaagaaggccaagaagcctgcactggtggccaagtcctccatcctgctggatgtcaagccttgggatgatgagacggacatggcccagctggaggcctgtgtgcgctctatccagctggacgggctggtctggggggcttccaagctggtgcccgtgggctacggtatccggaagctacagattcagtgtgtggtggaggacgacaaggtggggacagacttgctggaggaggagatcaccaagtttgaggagcacgtgcagagtgtcgatatcgcagctttcaacaagatctgaagcctgagtgtgtgtacgtgcgcgcgtgcgtgaggccctgccacgattaaagactgagaccggccctctggctccgtcctggtcatttcctgctc

SEQ ID NO: 122531 - DNA, 1311 bp, Artificial Sequence
  derived and/or modified sequence
cgcgcctgcgcgctggccgcctcgtgcgtcactcggcgcttgccggctgccggacccgcccccaccggcgacaccactggccgcgaagcgcagggggggcgcgcgcgctgccgcccgttcccagcacttgtgcagactcctccggggaagagcggcctccgcggtcatctccaacggaattctgcctttgaagtgtcggggcacggcgcgtcgagggtcctggcggccaggcggggcgtgtgcaagggtcgcgtcccccccccgggcccccggcccgtggctcttggtagagcccagtgcttcatttcccgtgcgcggcccgggcggccctccctttcatcagtcttcccgcgtccgccgattcctcctccttggtcgccgcgtccttggctggcgtaaaaatggctacaaacttcctagcacatgagaagatctggttcgacaagttcaaatatgacgacgcagaaaggagattctacgagcagatgaacgggcctgtggcaggtgcctcccgccaggagaacggcgccagcgtgatcctccgtgacattgcgagagccagagagaacatccagaaatccctggctggaagctcaggccccggggcctccagcggcaccagcggagaccacggtgagctcgtcgtccggattgccagtctggaagtggagaaccagagtctgcgtggcgtggtacaggagctgcagcaggccatctccaagctggaggcccggctgaacgtgctggagaagagctcgcctggccaccgggccacggccccacagacccagcacgtatctcccatgcgccaagtggagcccccagccaagaagccagccacaccagcagaggatgacgaggatgatgacattgacctgtttggcagtgacaatgaggaggaggacaaggaggcggcacagctgcgggaggagcggctacggcagtacgcggagaagaaggccaagaagcctgcactggtggccaagtcctccatcctgctggatgtcaagccttgggatgatgagacggacatggcccagctggaggcctgtgtgcgctctatccagctggacgggctggtctggggggcttccaagctggtgcccgtgggctacggtatccggaagctacagattcagtgtgtggtggaggacgacaaggtggggacagacttgctggaggaggagatcaccaagtttgaggagcacgtgcagagtgtcgatatcgcagctttcaacaagatctgaagcctgagtgtgtgtacgtgcgcgcgtgcgtgaggccctgccacgattaaagactgagaccggc

SEQ ID NO: 122532 - DNA, 853 bp, Artificial Sequence
  derived and/or modified sequence
gtcttcccgcgtccgccgattcctcctccttggtcgccgcgtccttggctggcgtaaagctcctcctgagcttggataaactgcaggagcgaaggggctgaccgtttgtcgggacgcagttgaaagagtcgctgtgtcctgctccgggctctcctgctggagaggagaggcttgcacgtgcctgtcgtctgcgcaagctttgaagctcagacttggtctctgttaggagagatgcagaaaaatggctacaaacttcctagcacatgagaagatctggttcgacaagttcaaatatgacgacgcagaaaggagattctacgagcagatgaacgggcctgtggcaggtgcctcccgccaggagaacggcgccagcgtgatcctccgtgacattgcgagagccagagagaacatccagaaatccctggctggaagctcaggccccggggcctccagcggcaccagcggagaccacggtgagctcgtcgtccggattgccagtctggaagtggagaaccagagtctgcgtggcgtggtacaggagctgcagcaggccatctccaagctggaggcccggctgaacgtgctggagaagagctcgcctggccaccgggccacggccccacagacccagcacgtatctcccatgcgccaagtggagcccccagccaagaagccagccacaccagcagaggatgacgaggatgatgacattgacctgtttggcagtgacaatgaggaggaggacaaggaggcggcacagctgcgggaggagcggctacggcagtacgcggagaagaaggccaagaagcctgcactggtggccaagtcctccatcctgctggatgtcaagcct

SEQ ID NO: 122533 - DNA, 1217 bp, Artificial Sequence
  derived and/or modified sequence
ctgagatcaggagttcaagaccagcctggccaacatggtgaaaccttgtctactaaaaatacaaaaaattagccaggcacagtggtgtgcactggtagtcccagttactcgggaggctgaggcaggaaaatcgcttgaacccaggaggcggacgttgcggtgagccgagatcgcgccgctgattccagcctgggcgacaagagtgagactccatctcacacaaaaaaaaaataacaaaaaaactcagaaatgctaagtgtacttatttgttgaagaaacttgttacatattactaacatcttttttttttatgagaaatacttttcccataaccaaaaaattcagtgagcagaatggccttgcttgaggtttttgcaaatctctcgggtgtctggcttagtgggaggcagctgggccctcatacctgcctccgcacttcagctgtttgacataaacccagcttcgtgtgagtgaaagggaagggcctggggaccctcagaggttctcggaccacactttgagaactcctcgtctggaagacaggcctggggatgccatgtggggtgagggcttacgggcttggtgtcgctttgtggagaaccgctggtgtctgaagcgggtgtcagccccactgcaccttggtgcttctgggctgtcctgatgccgaggcccacttcccagccatgctgactttgcctctttcccctcccagcagaaaaatggctacaaacttcctagcacatgagaagatctggttcgacaagttcaaatatgacgacgcagaaaggagattctacgagcagatgaacgggcctgtggcaggtgcctcccgccaggagaacggcgccagcgtgatcctccgtgacattgcgagagccagagagaacatccagaaatccctggctggaagctcaggccccggggcctccagcggcaccagcggagaccacggtgagctcgtcgtccggattgccagtctggaagtggagaaccagagtctgcgtggcgtggtacaggagctgcagcaggccatctccaagctggaggcccggctgaacgtgctggagaagagctcgcctggccaccgggccacggccccacagacccagcacgtatctcccatgcgccaagtggagcccccagccaagaagccagccacaccagcagaggatgacgaggatgatgacattgacctgtttggcagtgacaatgaggag

SEQ ID NO: 122534 - DNA, 787 bp, Artificial Sequence
  derived and/or modified sequence
ctcctccttggtcgccgcgtccttggctggcgttgtcacctccacaccacctcgccaagcagcttctggaaaggcccccggccgccccgggctgacctgctgctgtgtctgacccggttagtctttctggctgcctctaaccttgctgcttttccttcatgctgtcctaggaggccaaagcaaacagaaaaatggctacaaacttcctagcacatgagaagatctggttcgacaagttcaaatatgacgacgcagaaaggagattctacgagcagatgaacgggcctgtggcaggtgcctcccgccaggagaacggcgccagcgtgatcctccgtgacattgcgagagccagagagaacatccagaaatccctggctggaagctcaggccccggggcctccagcggcaccagcggagaccacggtgagctcgtcgtccggattgccagtctggaagtggagaaccagagtctgcgtggcgtggtacaggagctgcagcaggccatctccaagctggaggcccggctgaacgtgctggagaagagctcgcctggccaccgggccacggccccacagacccagcacgtatctcccatgcgccaagtggagcccccagccaagaagccagccacaccagcagaggatgacgaggatgatgacattgacctgtttggcagtgacaatgaggaggaggacaaggaggcggcacagctgcgggaggagcggctacggcagtacgcggagaagaaggccaagaagcctgcactggtggccaagtcctccatcct

SEQ ID NO: 122535 - DNA, 842 bp, Artificial Sequence
  derived and/or modified sequence
gcgtccgccgattcctcctccttggtcgccgcgtccttggctggcgtaaagctcctcctgagcttggataaactgcaggagcgaaggggctgaccgtttgtcgggacgcagttgaaagagtcgctgtgtcctgctccgggctctcctgctggagaggagaggcttgcacgtgcctgtcgtctgcgcaagctttgaagctcagacttggtctctgttaggagagatgaaaaatggctacaaacttcctagcacatgagaagatctggttcgacaagttcaaatatgacgacgcagaaaggagattctacgagcagatgaacgggcctgtggcaggtgcctcccgccaggagaacggcgccagcgtgatcctccgtgacattgcgagagccagagagaacatccagaaatccctggctggaagctcaggccccggggcctccagcggcaccagcggagaccacggtgagctcgtcgtccggattgccagtctggaagtggagaaccagagtctgcgtggcgtggtacaggagctgcagcaggccatctccaagctggaggcccggctgaacgtgctggagaagagctcgcctggccaccgggccacggccccacagacccagcacgtatctcccatgcgccaagtggagcccccagccaagaagccagccacaccagcagaggatgacgaggatgatgacattgacctgtttggcagtgacaatgaggaggaggacaaggaggcggcacagctgcgggaggagcggctacggcagtacgcggagaagaaggccaagaagcctgcactggtggccaagtcctccatcctgctggatgtcaagcct

SEQ ID NO: 122536 - DNA, 758 bp, Artificial Sequence
  derived and/or modified sequence
cgcgtccttggctggcgtggcctgcctaggctccaactgacagtaatcccaagagctcccctttcaggggatgacggagtgacgtcacctgtgtggactcagctgccacctgggattgtggtggcggcgggtctgtctggcgctcagcttccatctccaccagtgtcacctccacaccacctcgccaagcagcttctggaaaggcccccggccgccccgggctgacctgctgctgtgtctgacccgcagaaaaatggctacaaacttcctagcacatgagaagatctggttcgacaagttcaaatatgacgacgcagaaaggagattctacgagcagatgaacgggcctgtggcaggtgcctcccgccaggagaacggcgccagcgtgatcctccgtgacattgcgagagccagagagaacatccagaaatccctggctggaagctcaggccccggggcctccagcggcaccagcggagaccacggtgagctcgtcgtccggattgccagtctggaagtggagaaccagagtctgcgtggcgtggtacaggagctgcagcaggccatctccaagctggaggcccggctgaacgtgctggagaagagctcgcctggccaccgggccacggccccacagacccagcacgtatctcccatgcgccaagtggagcccccagccaagaagccagccacaccagcagaggatgacgaggatgatgacattgacctgtttggcagtgacaatgaggaggaggaca

SEQ ID NO: 122537 - DNA, 1001 bp, Artificial Sequence
  derived and/or modified sequence
gtccttggctggcgtaaagctcctcctgagcttggataaactgcaggagcgaaggggctgaccgtttgtcgggacgcagttgaaagagtcgctgtgtcctgctccgggctctcctgctggagaggagaggcttgcacgtgcctgtcgtctgcgcaagctttgaagctcagacttggtctctgttaggagagatggtgcgctgcgtccggcagaaaaatggctacaaacttcctagcacatgagaagatctggttcgacaagttcaaatatgacgacgcagaaaggagattctacgagcagatgaacgggcctgtggcaggtgcctcccgccaggagaacggcgccagcgtgatcctccgtgacattgcgagagccagagagaacatccagaaatccctggctggaagctcaggccccggggcctccagcggcaccagcggagaccacggtgagctcgtcgtccggattgccagtctggaagtggagaaccagagtctgcgtggcgtggtacaggagctgcagcaggccatctccaagctggaggcccggctgaacgtgctggagaagagctcgcctggccaccgggccacggccccacagacccagcacgtatctcccatgcgccaagtggagcccccagccaagaagccagccacaccagcagaggatgacgaggatgatgacattgacctgtttggcagtgacaatgaggaggaggacaaggaggcggcacagctgcgggaggagcggctacggcagtacgcggagaagaaggccaagaagcctgcactggtggccaagtcctccatcctgctggatgtcaagccttgggatgatgagacggacatggcccagctggaggcctgtgtgcgctctatccagctggacgggctggtctggggggcttccaagctggtgcccgtgggctacggtatccggaagctacagattcagtgtgtggtggaggacgacaaggtggggacagacttgctggaggagga

SEQ ID NO: 122538 - protein, 858 aa, Artificial Sequence
  derived and/or modified sequence
MVNFTVDQIRAIMDKKANIRNMSVIAHVDHGKSTLTDSLVCKAGIIASARAGETRFTDTRKDEQERCITIKSTAISLFYELSENDLNFIKQSKDGAGFLINLIDSPGHVDFSSEVTAALRVTDGALVVVDCVSGVCVQTETVLRQAIAERIKPVLMMNKMDRALLELQLEPEELYQTFQRIVENVNVIISTYGEGESGPMGNIMIDPVLGTVGFGSGLHGWAFTLKQFAEMYVAKFAAKGEGQLGPAERAKKVEDMMKKLWGDRYFDPANGKFSKSATSPEGKKLPRTFCQLILDPIFKVFDAIMNFKKEETAKLIEKLDIKLDSEDKDKEGKPLLKAVMRRWLPAGDALLQMITIHLPSPVTAQKYRCELLYEGPPDDEAAMGIKSCDPKGPLMMYISKMVPTSDKGRFYAFGRVFSGLVSTGLKVRIMGPNYTPGKKEDLYLKPIQRTILMMGRYVEPIEDVPCGNIVGLVGVDQFLVKTGTITTFEHAHNMRVMKFSVSPVVRVAVEAKNPADLPKLVEGLKRLAKSDPMVQCIIEESGEHIIAGAGELHLEICLKDLEEDHACIPIKKSDPVVSYRETVSEESNVLCLSKSPNKHNRLYMKARPFPDGLAEDIDKGEVSARQELKQRARYLAEKYEWDVAEARKIWCFGPDGTGPNILTDITKGVQYLNEIKDSVVAGFQWATKEGALCEENMRGVRFDVHDVTLHADAIHRGGGQIIPTARRCLYASVLTAQPRLMEPIYLVEIQCPEQVVGGIYGVLNRKRGHVFEESQVAGTPMFVVKAYLPVNESFGFTADLRSNTGGQAFPQCVFDHWQILPGDPFDNSSRPSQVVAETRKRKGLKEGIPALDNFLDKL

SEQ ID NO: 122539 - protein, 583 aa, Artificial Sequence
  derived and/or modified sequence
MVNFTVDQIRAIMDKKANIRNMSVIAHVDHGKSTLTDSLVCKAGIIASARAGETRFTDTRKDEQERCITIKSTAISLFYELSENDLNFIKQSKDGAGFLINLIDSPGHVDFSSEVTAALRVTDGALVVVDCVSGVCVQTETVLRQAIAERIKPVLMMNKMDRALLELQLEPEELYQTFQRIVENVNVIISTYGEGESGPMGNIMIDPVLGTVGFGSGLHGWAFTLKQFAEMYVAKFAAKGEGQLGPAERAKKVEDMMKKLWGDRYFDPANGKFSKSATSPEGKKLPRTFCQLILDPIFKVFDAIMNFKKEETAKLIEKLDIKLDSEDKDKEGKPLLKAVMRRWLPAGDALLQMITIHLPSPVTAQKYRCELLYEGPPDDEAAMGIKSCDPKGPLMMYISKMVPTSDKGRFYAFGRVFSGLVSTGLKVRIMGPNYTPGKKEDLYLKPIQRTILMMGRYVEPIEDVPCGNIVGLVGVDQFLVKTGTITTFEHAHNMRVMKFSVSPVVRVAVEAKNPADLPKLVEGLKRLAKSDPMVQCIIEESGEHIIAGAGELHLEICLKDLEEDHACIPIKKETVSKKKKKKK

SEQ ID NO: 122540 - DNA, 3157 bp, Artificial Sequence
  derived and/or modified sequence
ctcttccgccgtcgtcgccgccatcctcggcgcgactcgcttctttcggttctacctgggagaatccaccgccatccgccaccatggtgaacttcacggtagaccagatccgcgccatcatggacaagaaggccaacatccgcaacatgtctgtcatcgcccacgtggaccatggcaagtccacgctgacagactccctggtgtgcaaggcgggcatcatcgcctcggcccgggccggggagacacgcttcactgatacccggaaggacgagcaggagcgttgcatcaccatcaagtcaactgccatctccctcttctacgagctctcggagaatgacttgaacttcatcaagcagagcaaggacggtgccggcttcctcatcaacctcattgactcccccgggcatgtcgacttctcctcggaggtgactgctgccctccgagtcaccgatggcgcattggtggtggtggactgcgtgtcaggcgtgtgcgtgcagacggagacagtgctgcggcaggccattgccgagcgcatcaagcctgtgctgatgatgaacaagatggaccgcgccctgctggagctgcagctggagcccgaggagctctaccagactttccagcgcatcgtggagaacgtgaacgtcatcatctccacctacggcgagggcgagagcggccccatgggcaacatcatgatcgatcctgtcctcggtaccgtgggctttgggtctggcctccacgggtgggccttcaccctgaagcagtttgccgagatgtatgtggccaagttcgccgccaagggggagggccagttggggcctgccgagcgggccaagaaagtagaggacatgatgaagaagctgtggggtgacaggtactttgacccagccaacggcaagttcagcaagtcagccaccagccccgaagggaagaagctgccacgcaccttctgccagctgatcctggaccccatcttcaaggtgtttgatgcgatcatgaatttcaagaaagaggagacagcaaaactgatagagaaactggacatcaaactggacagcgaggacaaggacaaagaaggcaaacccctgctgaaggctgtgatgcgccgctggctgcctgccggagacgccttgttgcagatgatcaccatccacctgccctcccctgtgacggcccagaagtaccgctgcgagctcctgtacgaggggcccccggacgacgaggctgccatgggcattaaaagctgtgaccccaaaggccctcttatgatgtatatttccaaaatggtgccaacctccgacaaaggtcggttctacgcctttggacgagtcttctcggggctggtctccactggcctgaaggtcaggatcatggggcccaactatacccctgggaagaaggaggacctctacctgaagccaatccagagaacaatcttgatgatgggccgctacgtggagcccatcgaggatgtgccttgtgggaacattgtgggcctcgtgggcgtggaccagttcctggtgaagacgggcaccatcaccaccttcgagcacgcgcacaacatgcgggtgatgaagttcagcgtcagccctgttgtcagagtggccgtggaggccaagaacccggctgacctgcccaagctggtggaggggctgaagcggctggccaagtccgaccccatggtgcagtgcatcatcgaggagtcgggagagcatatcatcgcgggcgccggcgagctgcacctggagatctgcctgaaggacctggaggaggaccacgcctgcatccccatcaagaaatctgacccggtcgtctcgtaccgcgagacggtcagtgaagagtcgaacgtgctctgcctctccaagtcccccaacaagcacaaccggctgtacatgaaggcgcggcccttccccgacggcctggccgaggacatcgataaaggcgaggtgtccgcccgtcaggagctcaagcagcgggcgcgctacctggccgagaagtacgagtgggacgtggctgaggcccgcaagatctggtgctttgggcccgacggcaccggccccaacatcctcaccgacatcaccaagggtgtgcagtacctcaacgagatcaaggacagtgtggtggccggcttccagtgggccaccaaggagggcgcactgtgtgaggagaacatgcggggtgtgcgcttcgacgtccacgacgtcaccctgcacgccgacgccatccaccgcggagggggccagatcatccccacagcacggcgctgcctctatgccagtgtgctgaccgcccagccacgcctcatggagcccatctaccttgtggagatccagtgtccagagcaggtggtcggtggcatctacggggttttgaacaggaagcggggccacgtgttcgaggagtcccaggtggccggcacccccatgtttgtggtcaaggcctatctgcccgtcaacgagtcctttggcttcaccgctgacctgaggtccaacacgggcggccaggcgttcccccagtgtgtgtttgaccactggcagatcctgcccggagaccccttcgacaacagcagccgccccagccaggtggtggcggagacccgcaagcgcaagggcctgaaagaaggcatccctgccctggacaacttcctggacaaattgtaggcggcccttcctgcagcgcctgccgccccggggactcgcagcacccacagcaccacgtcctcgaattctcagacgacacctggagactgtcccgacacagcgacgctcccctgagaggtttctggggcccgctgcgtgccatcactcaaccataacacttgatgccgtttctttcaatatttatttccagagtccggaggcagcagacacgccctcttagtagggacttaatgggccggtcggggagggggaggcgggatgggacacccaacactttttccatttcttcagagggaaactcagatgtccaaactaattttaacaaacgcattaagaggtttatttgggtacatggcccgcagtggcttttgccccagaaaggggaaaggaacacgcgggtagatgatttctagcaggcaggaagtcctgtgcggtgtcaccatgagcacctccagctgtactagtgccattggaataataaatttgataaggtggtg

SEQ ID NO: 122541 - DNA, 1832 bp, Artificial Sequence
  derived and/or modified sequence
ctcttccgccgtcgtcgccgccatcctcggcgcgactcgcttctttcggttctacctgggagaatccaccgccatccgccaccatggtgaacttcacggtagaccagatccgcgccatcatggacaagaaggccaacatccgcaacatgtctgtcatcgcccacgtggaccatggcaagtccacgctgacagactccctggtgtgcaaggcgggcatcatcgcctcggcccgggccggggagacacgcttcactgatacccggaaggacgagcaggagcgttgcatcaccatcaagtcaactgccatctccctcttctacgagctctcggagaatgacttgaacttcatcaagcagagcaaggacggtgccggcttcctcatcaacctcattgactcccccgggcatgtcgacttctcctcggaggtgactgctgccctccgagtcaccgatggcgcattggtggtggtggactgcgtgtcaggcgtgtgcgtgcagacggagacagtgctgcggcaggccattgccgagcgcatcaagcctgtgctgatgatgaacaagatggaccgcgccctgctggagctgcagctggagcccgaggagctctaccagactttccagcgcatcgtggagaacgtgaacgtcatcatctccacctacggcgagggcgagagcggccccatgggcaacatcatgatcgatcctgtcctcggtaccgtgggctttgggtctggcctccacgggtgggccttcaccctgaagcagtttgccgagatgtatgtggccaagttcgccgccaagggggagggccagttggggcctgccgagcgggccaagaaagtagaggacatgatgaagaagctgtggggtgacaggtactttgacccagccaacggcaagttcagcaagtcagccaccagccccgaagggaagaagctgccacgcaccttctgccagctgatcctggaccccatcttcaaggtgtttgatgcgatcatgaatttcaagaaagaggagacagcaaaactgatagagaaactggacatcaaactggacagcgaggacaaggacaaagaaggcaaacccctgctgaaggctgtgatgcgccgctggctgcctgccggagacgccttgttgcagatgatcaccatccacctgccctcccctgtgacggcccagaagtaccgctgcgagctcctgtacgaggggcccccggacgacgaggctgccatgggcattaaaagctgtgaccccaaaggccctcttatgatgtatatttccaaaatggtgccaacctccgacaaaggtcggttctacgcctttggacgagtcttctcggggctggtctccactggcctgaaggtcaggatcatggggcccaactatacccctgggaagaaggaggacctctacctgaagccaatccagagaacaatcttgatgatgggccgctacgtggagcccatcgaggatgtgccttgtgggaacattgtgggcctcgtgggcgtggaccagttcctggtgaagacgggcaccatcaccaccttcgagcacgcgcacaacatgcgggtgatgaagttcagcgtcagccctgttgtcagagtggccgtggaggccaagaacccggctgacctgcccaagctggtggaggggctgaagcggctggccaagtccgaccccatggtgcagtgcatcatcgaggagtcgggagagcatatcatcgcgggcgccggcgagctgcacctggagatctgcctgaaggacctggaggaggaccacgcctgcatccccatcaagaaggagactgtctcaaaaaaaaaaaaaaaaaaaaaa

SEQ ID NO: 122542 - DNA, 2577 bp, Artificial Sequence
  derived and/or modified sequence
atggtaaatttcactgtggatcagatcagagccataatggacaagaaggccaacatacgaaacatgtccgtgattgcacacgtggaccacggcaagagcacccttaccgattctttagtttgtaaagccggcattatcgccagtgccagggcaggggagacacgcttcactgacactcggaaggacgaacaagaaagatgtataaccattaagagtactgcaatcagtctgttttatgaactgagcgagaatgacctgaatttcatcaaacagtctaaagatggcgcaggcttcttgatcaacttgatcgactctccggggcacgtggactttagtagtgaagtcaccgccgccctgcgggtcaccgatggagctttggtggtggtggactgcgtgtctggtgtatgtgtccaaacagagaccgtccttaggcaggccattgcagagaggatcaaacccgtgctaatgatgaataaaatggacagggcactgctggaactgcagttagagcctgaggagctgtatcaaacattccaaagaattgtggagaacgttaacgtcattattagcacgtatggcgagggggagagcggccctatgggcaacattatgatcgatcccgtgttgggcaccgtcggcttcggctctggcctgcacggctgggcttttaccttgaagcaattcgctgaaatgtatgtggcaaagtttgctgctaagggagaaggccagttggggcccgccgaaagagcaaaaaaagtggaggacatgatgaagaagctgtggggcgataggtactttgaccccgccaatggaaaatttagtaagtccgccacatctcctgagggcaagaagctgccgcgtaccttctgtcaattgatactcgaccccattttcaaggtgtttgacgctatcatgaactttaagaaggaggagacagccaaactgatagagaagcttgacatcaagctggattcagaagacaaagataaggaaggcaaaccactgctgaaggcagtcatgcgccggtggctaccggctggcgacgccctgctgcagatgatcacaattcatctcccaagccctgtgaccgcccaaaagtatcgctgtgaactgctttacgaaggtccgccggacgacgaagccgccatgggcatcaaaagctgtgatccaaaggggcccctaatgatgtatatatctaagatggtgcctacctctgacaaaggaagattctatgcctttggacgggtgttctccggtctagtcagtaccgggcttaaagtccggattatgggacctaattacacacccgggaagaaggaggacctgtacctcaagcctatacagaggacaattctgatgatgggccgatatgtcgagcccatcgaggatgtgccttgcggcaacattgtggggctggtgggtgttgatcagtttctggtgaagacgggcaccataaccacgtttgagcacgcccataacatgagggtcatgaagttctcagtgtctcccgttgtcagagtggccgtagaagccaaaaaccctgccgacctgccaaaactggtggagggccttaagaggctggctaagtcagatccgatggtccaatgcattatcgaggaatctggcgagcacataatcgccggcgctggggagctccacctcgagatatgcctcaaagatctggaagaggatcacgcttgcattccgatcaagaaaagtgaccctgtcgtgagctacagggagactgtttctgaagagagcaacgtcctatgcctgtccaaaagccccaacaagcataaccgcctatacatgaaagcacgaccctttccggatggactggccgaggacatcgacaagggagaggttagtgccagacaggagctcaagcagcgagcccgttatctcgccgaaaaatacgagtgggacgtcgccgaagcccggaaaatatggtgctttggccctgatgggaccgggcccaatatcctgactgacattactaaaggggtgcagtatctaaatgagataaaggattctgtggtcgccggctttcaatgggccaccaaagaaggggctctttgtgaagagaacatgagaggcgttcgcttcgacgtacacgacgtaacgctgcacgccgacgctattcatagagggggcgggcagatcatacctacagctcggcgctgtctgtatgcctctgtgttgacagcacagcccagactgatggaacctatctatctggttgaaatccaatgtccagaacaagtggtgggcggcatttacggggtgttgaatcggaagagaggtcacgtttttgaagaatctcaagtagccgggacacccatgttcgtggtgaaagcctacctccctgtgaatgaatcttttggatttaccgcagatctgcgctccaatacaggcggccaggcatttcctcaatgtgtgtttgatcattggcaaatcctgcccggcgacccctttgataactcatctcgtccaagccaggtcgtcgcagagacgcgaaagcgcaaaggactgaaagaagggattcctgccttagataactttcttgacaagctgtag

SEQ ID NO: 122543 - DNA, 1752 bp, Artificial Sequence
  derived and/or modified sequence
atggttaactttactgttgatcagatacgtgccattatggacaaaaaggctaatatccgtaatatgagcgtgattgcccatgtcgatcacggcaaaagtacactgactgatagcctggtgtgtaaggcaggaattattgcatctgccagagcaggcgaaacccggtttaccgacaccaggaaagatgagcaggagaggtgtattacaatcaagagtaccgccatctcgcttttctacgaactcagcgaaaatgaccttaactttatcaaacagtccaaggatggagctgggtttttgatcaacctcattgactcccccggtcacgttgacttctcaagtgaggtgaccgccgcactccgcgtgactgatggtgctctcgtggtagtggattgtgtgtcgggagtatgtgtccaaacagagactgtgttgaggcaggctatagccgagcgcataaagcctgtgcttatgatgaacaagatggatcgagctctgttggagcttcaactggagccagaggagctttaccagacatttcagcgtatagtagagaatgttaacgtgataatcagcacctatggggagggtgagtcaggtccgatgggaaacatcatgatcgaccctgtgctgggcacagtgggctttggtagcggcctacatggttgggctttcacgcttaaacaattcgctgagatgtacgtggcaaagtttgcagccaagggcgagggccagctgggacccgcagagcgggccaaaaaagtggaggacatgatgaaaaagttatggggtgaccggtattttgatccagcaaatggtaagttttcaaaatctgccactagccctgaggggaagaagctgccgcgcacattctgccagttgatcctggatcctatctttaaagtgttcgacgccattatgaatttcaaaaaggaggagaccgcaaagttgatcgagaagctggacatcaaactcgattctgaggataaagacaaggaggggaaacccttgcttaaagccgtgatgaggaggtggcttccagctggagacgccctgcttcagatgataacgatccatcttccttcacccgtgactgcccagaaataccgctgcgaattgctttatgagggtcctccggatgacgaggctgcaatgggaataaagagctgtgatcccaaggggccgctcatgatgtacatctccaagatggtgccgacgtccgataagggaagattctacgcatttggtcgcgtgttctcaggcctggtgagcacggggctcaaggttcggatcatgggacctaattacactcccgggaagaaagaggatttgtacttaaagcctattcaacgaacaatactaatgatggggaggtatgtggaaccaatcgaggatgtaccgtgtggcaatattgtaggcctggtgggagtagaccagtttctggtcaaaactggaacgatcactacttttgagcatgctcacaacatgagagtgatgaagttcagtgtctccccagtggtaagagtcgctgtggaggctaagaacccagccgacctccccaagctcgttgagggtctaaaacggctggcgaagtcggatcctatggtgcaatgtatcattgaggagagtggagagcacatcattgccggggcaggcgagcttcacctggaaatttgcctgaaggatcttgaagaggaccatgcgtgtattccaattaagaaggagaccgtgtctaagaaaaagaaaaagaaaaagtag

SEQ ID NO: 122544 - DNA, 2577 bp, Artificial Sequence
  derived and/or modified sequence
atggtgaacttcaccgtggaccagatccgggccatcatggacaagaaggccaacatccggaacatgtctgtgattgcccacgtggaccacggcaagagcaccctgacagacagcctggtgtgcaaggccggcatcatcgccagcgcccgggccggggagacccgcttcacagacaccaggaaggatgagcaggagcgctgcatcaccatcaagagcacagccatcagcctcttctatgagctgtctgaaaatgacctgaacttcatcaagcagagcaaggatggagctggcttcctgatcaacctgattgacagccctggccacgtggacttcagcagcgaggtgacagctgccctgcgggtgacagatggagccctggtggtggtggactgtgtgtctggagtgtgtgtgcagacagaaacagtgctgcggcaggccatcgccgagcgcatcaagcctgtgctgatgatgaacaagatggaccgggccctgctggagctgcagctggagcctgaggagctgtaccagaccttccagagaattgtggagaatgtgaatgtcatcatcagcacctacggggagggggagagcggccccatgggcaacatcatgattgatcctgtgctgggcaccgtgggcttcggcagcggcctgcacggctgggccttcaccctgaagcagtttgctgagatgtatgtggccaagtttgctgccaagggggagggccagctgggccctgctgagcgggccaagaaggtggaggacatgatgaagaagctgtggggagaccgctactttgatcctgccaacgggaagttcagcaagagcgccaccagccctgagggcaagaagctgcccaggaccttctgccagctgatcctggaccccatcttcaaggtgtttgatgccatcatgaacttcaagaaggaggagacagccaagctgattgagaagctggacatcaagctggacagcgaggacaaggacaaggagggcaagcccctgctgaaggctgtgatgaggcgctggctgcctgctggagatgccctgctgcagatgatcaccatccacctgcccagccctgtgacagcccagaagtaccgctgtgagctgctgtatgagggccccccagatgatgaagctgccatgggcatcaagagctgtgaccccaagggccccctgatgatgtacatcagcaagatggtgcccaccagtgacaagggccgcttctacgccttcggccgggtcttcagcggcctggtgtccacaggcctgaaggtgcgcatcatgggccccaactacacccctgggaagaaggaggacctgtacctgaagcccatccagaggaccatcctgatgatgggccgctacgtggagcccattgaagatgtgccctgtggcaacatcgtgggcctggtgggcgtggaccagttcctggtgaagacaggcaccatcaccacctttgagcacgcccacaacatgagggtgatgaagttctctgtgtcccctgtggtgcgggtggccgtggaggccaagaacccagctgacctgcccaagctggtggagggcctgaagaggctggccaagagtgaccccatggtgcagtgcatcatcgaggagagcggggagcacatcatcgccggggccggggagctgcacctggagatctgcctgaaggacctggaggaggaccacgcctgcatccccatcaagaagagtgaccctgtggtgtcctaccgggagaccgtgtctgaggagagcaatgtgctgtgcctgagcaagagccccaacaagcacaaccggctgtacatgaaggcccggcccttcccagatggcctggctgaagatattgacaagggggaggtgtctgcccggcaggagctgaagcagagggcccgctacctggccgagaagtatgagtgggatgtggccgaggccaggaagatctggtgcttcggcccagatggcaccggccccaacatcctgacagacatcaccaagggcgtgcagtacctgaatgagatcaaggacagcgtggtggccggcttccagtgggccaccaaggagggcgccctgtgtgaggagaacatgagaggagtgcgctttgatgtgcatgatgtgaccctgcatgctgatgccatccacagaggaggcggccagatcatccccacagcccggcgctgcctgtatgcctctgtgctgacagcccagccccggctgatggagcccatctacctggtggagatccagtgcccagagcaggtggtgggcggcatctacggcgtgctgaacaggaagaggggccacgtgtttgaggagagccaggtggccggcacccccatgtttgtggtgaaggcctacctgcctgtgaatgaaagctttggcttcaccgctgacctgcggagcaacacaggaggccaggccttcccccagtgtgtgtttgaccactggcagatcctgcccggggacccctttgacaacagcagccggcccagccaggtggtggccgagaccaggaagaggaagggcctgaaggagggcatcccagccctggacaacttcctggacaagctgtag

SEQ ID NO: 122545 - DNA, 1752 bp, Artificial Sequence
  derived and/or modified sequence
atggtgaacttcaccgtggaccagatccgggccatcatggacaagaaggccaacatccggaacatgtctgtgattgcccacgtggaccacggcaagagcaccctgacagacagcctggtgtgcaaggccggcatcatcgccagcgcccgggccggggagacccgcttcacagacaccaggaaggatgagcaggagcgctgcatcaccatcaagagcacagccatcagcctcttctatgagctgtctgaaaatgacctgaacttcatcaagcagagcaaggatggagctggcttcctgatcaacctgattgacagccctggccacgtggacttcagcagcgaggtgacagctgccctgcgggtgacagatggagccctggtggtggtggactgtgtgtctggagtgtgtgtgcagacagaaacagtgctgcggcaggccatcgccgagcgcatcaagcctgtgctgatgatgaacaagatggaccgggccctgctggagctgcagctggagcctgaggagctgtaccagaccttccagagaattgtggagaatgtgaatgtcatcatcagcacctacggggagggggagagcggccccatgggcaacatcatgattgatcctgtgctgggcaccgtgggcttcggcagcggcctgcacggctgggccttcaccctgaagcagtttgctgagatgtatgtggccaagtttgctgccaagggggagggccagctgggccctgctgagcgggccaagaaggtggaggacatgatgaagaagctgtggggagaccgctactttgatcctgccaacgggaagttcagcaagagcgccaccagccctgagggcaagaagctgcccaggaccttctgccagctgatcctggaccccatcttcaaggtgtttgatgccatcatgaacttcaagaaggaggagacagccaagctgattgagaagctggacatcaagctggacagcgaggacaaggacaaggagggcaagcccctgctgaaggctgtgatgaggcgctggctgcctgctggagatgccctgctgcagatgatcaccatccacctgcccagccctgtgacagcccagaagtaccgctgtgagctgctgtatgagggccccccagatgatgaagctgccatgggcatcaagagctgtgaccccaagggccccctgatgatgtacatcagcaagatggtgcccaccagtgacaagggccgcttctacgccttcggccgggtcttcagcggcctggtgtccacaggcctgaaggtgcgcatcatgggccccaactacacccctgggaagaaggaggacctgtacctgaagcccatccagaggaccatcctgatgatgggccgctacgtggagcccattgaagatgtgccctgtggcaacatcgtgggcctggtgggcgtggaccagttcctggtgaagacaggcaccatcaccacctttgagcacgcccacaacatgagggtgatgaagttctctgtgtcccctgtggtgcgggtggccgtggaggccaagaacccagctgacctgcccaagctggtggagggcctgaagaggctggccaagagtgaccccatggtgcagtgcatcatcgaggagagcggggagcacatcatcgccggggccggggagctgcacctggagatctgcctgaaggacctggaggaggaccacgcctgcatccccatcaagaaggagaccgtgtccaagaagaagaagaagaagaagtag

SEQ ID NO: 122546 - DNA, 2577 bp, Artificial Sequence
  derived and/or modified sequence
atggtgaacttcaccgtggaccagatccgggccatcatggacaagaaagccaatatacgcaatatgtccgtaatcgctcatgtcgatcacgggaaatccacactgacagacagtctggtttgtaaagctggtataatagccagcgcaagagctggagagactcgattcacagatacgcgtaaagacgagcaggagcggtgtattacaattaagagcacggccatcagtctgttctatgaactatctgagaacgacttgaactttattaagcagagcaaagacggagccgggtttctgatcaatctcatcgactcccctggccacgttgatttctctagtgaagtgacagccgcactgagagtcactgacggtgcactagtcgtggtggattgcgtttcaggcgtttgtgtccagacagaaactgtgctaaggcaagccattgccgaaagaataaagcccgtattgatgatgaacaagatggatagagcgctccttgaactgcaactggagccggaggagctgtatcagacattccaaaggattgtcgaaaatgtgaatgtgattatcagcacgtacggcgaaggcgaatccggtcctatgggcaatattatgatcgatcctgttttggggaccgttggtttcggcagcgggctccacggttgggccttcacactgaaacaatttgcagaaatgtacgtggcaaaatttgctgcgaaaggggagggccagttaggcccggcagaaagggccaagaaggtcgaggatatgatgaagaaactgtggggagatcgttacttcgatccagccaacggcaagttttctaaatccgctacgagcccggaaggtaaaaagctgccgcgcactttctgccagctgatcctggatcccatctttaaagtgttcgatgccatcatgaactttaagaaggaggagacagctaaactgattgagaagctggacattaagctggacagtgaggacaaggacaaagaaggaaagccactgcttaaggccgtgatgcgcaggtggctgcctgctggggacgcccttctccaaatgattactatccacctgccttccccagtcactgctcagaaataccggtgcgaacttctgtatgagggtccgcccgacgacgaggcagccatgggaattaagtcatgcgaccctaaagggcctctgatgatgtacatctctaaaatggtccctacaagcgacaaggggcgcttctatgctttcgggcgcgttttctccgggctcgttagcaccgggctaaaggtccgtattatgggcccaaattatacacctgggaagaaagaggacctatacttaaagccgattcagcgtaccattttaatgatggggcggtatgtagagcctattgaagacgtcccgtgtgggaacatagtgggcttagtcggcgtggaccagtttctagtgaaaaccgggacaattacaacgttcgaacacgcccataacatgagagtgatgaaattctctgtgtctcccgtggttcgcgttgcggtcgaggccaagaaccccgcagacctccccaagctcgttgagggcctgaagcgattggcaaagtcagatcctatggtccagtgcatcatcgaggaatcgggagagcatatcattgctggtgccggggagttgcatctcgaaatctgtttaaaagatctcgaggaagatcacgcttgcattcctatcaagaagtcagacccagtggtgtcttacagggagacggttagcgaagaatccaacgtgctatgtttgagcaagagtcctaacaaacataacagactgtatatgaaggcccgccccttcccggatggcctggcggaggatattgataaaggagaagtgtcagcgcgtcaagaactgaagcagagagcgcgctacctggcagagaaatacgaatgggacgtggccgaggctcgcaagatatggtgctttggacccgatgggacgggccctaatatcctcaccgacattacaaagggcgtccaatacctcaatgaaattaaggacagcgttgttgccggcttccagtgggccactaaggaaggcgcactctgcgaggagaacatgcgaggggtgcgctttgatgtccacgacgtcacgctgcacgctgatgctattcacagaggtggtggccagattattccaacagcccgaaggtgtctttatgcctccgtgttgactgcgcagccaaggttgatggaaccaatatatctggtcgagattcaatgtcctgagcaggttgtgggcggtatctatggagtcctgaacagaaaacgggggcacgtatttgaggagagccaggtggctggaacaccgatgtttgtcgtcaaggcctatctgcccgtgaacgagtctttcggcttcacggccgacctgcggtccaatactggggggcaggcctttccccaatgcgtattcgatcattggcagatcttacccggggatccatttgataactcttcccgcccaagccaggtggttgctgagaccaggaaacgcaagggccttaaggaggggattccggcgctggataattttctggataagctgtag

SEQ ID NO: 122547 - DNA, 1752 bp, Artificial Sequence
  derived and/or modified sequence
atggtgaacttcaccgtggaccagatccgggccatcatggacaagaaggcaaatatcaggaatatgtctgtaatcgctcacgtggaccacggtaagtccacgctcaccgattccttagtgtgtaaggccggcattatagcaagcgccagggccggcgagacacgttttactgatactcggaaggatgaacaggagcgctgtattactataaagagcactgctatttcactgttctacgagctcagtgagaacgacttgaatttcatcaaacagagcaaagatggagccgggtttttgataaatctgatagattctccaggccatgtcgacttctcctcagaggtgactgctgcccttagggttacagatggggcactggtcgtcgtagattgtgtcagcggcgtgtgtgtgcagaccgagacagtcctgaggcaggccatcgccgaaaggatcaagccagtgctgatgatgaacaagatggatcgagcactgctggaactgcagctggaaccggaggaattgtaccagaccttccagcggatagtggaaaacgtcaacgttatcatctctacttacggtgaaggagagagcgggccgatggggaatatcatgatcgatcccgtactggggacagtcggctttggctcaggactccacggatgggccttcactttgaaacagttcgcagaaatgtacgtagctaagttcgccgcgaagggggaaggacagctcggtcccgctgaacgagcgaagaaagtggaggacatgatgaagaaattgtggggggaccgctactttgacccagcgaatggtaaattcagcaaaagtgctacttcgcctgagggaaaaaaattgcctcgcaccttctgtcagctgattcttgaccctatcttcaaagtgtttgatgcaatcatgaacttcaagaaagaggaaacagctaaattgatcgagaaattggacattaagcttgactcagaagataaggacaaggaaggcaagccattgctgaaagccgtgatgcgccgttggttgcccgccggtgacgccctgctgcagatgattacgattcacctgccaagtcccgttaccgctcagaagtaccgatgcgagctgttgtacgaaggtcctccagacgatgaggccgctatgggcattaaaagttgtgacccgaaaggtcccctgatgatgtacatatctaaaatggttcccacgtcagacaaaggcagattctacgccttcggacgcgtgttttccggtctggtatccacaggattaaaagtcaggataatgggccccaactacactcctggcaaaaaggaggatctgtatttaaaaccgatccagcgaactattctgatgatggggagatacgtcgaacccatcgaagacgtgccctgtggaaacattgtcggccttgtcggggttgaccagttcctagtgaaaacaggcacaatcacaactttcgagcatgctcacaacatgagggttatgaagttctctgtgtccccggttgttcgtgtcgcagtggaggcaaaaaatcccgcagatctgcctaaactcgtagaaggcttgaaacgcctcgccaagtcagatcctatggtccaatgcatcatcgaggaatctggtgaacacataatcgccggtgccggcgagctgcatctcgagatttgcctgaaggatttagaagaggaccatgcgtgtatccctataaagaaagagaccgtctcaaaaaaaaaaaagaagaaaaagtag

SEQ ID NO: 122548 - DNA, 2577 bp, Artificial Sequence
  derived and/or modified sequence
atggtaaactttactgtagaccagatccgtgccatcatggataagaaagccaacatcaggaacatgagcgtcatagctcatgtcgatcacggcaagagcaccctgaccgacagtctcgtgtgcaaagcgggtatcatagccagcgctcgcgctggcgagaccagatttaccgacacgcgtaaagacgaacaggagagatgcataactattaaaagtactgccatttcattgttttacgaactcagcgaaaacgacttgaacttcatcaaacagagcaaagacggagccggatttttgattaacctgattgattcccccggacacgttgattttagcagcgaggtcactgcagccctccgggtgaccgacggagcactggtggtcgtggattgcgtgagcggcgtgtgcgttcagactgaaacagttcttagacaggcaattgcggagagaatcaagcctgtgctaatgatgaacaaaatggaccgagcactgttagaacttcagctggagcccgaggagctctaccaaacctttcagcgcattgtagaaaacgtgaatgtgatcattagtacttatggagagggggagagtggacctatgggaaacatcatgatagacccagtgctggggacagtgggctttgggagtggtctgcacggttgggcgtttaccctgaagcaattcgccgaaatgtacgtggccaagtttgccgcaaagggcgagggacagttaggcccagccgagcgcgctaaaaaagtcgaggacatgatgaagaaactgtggggggatagatactttgatcccgcaaacggcaaattttccaaaagtgccacaagtcctgaggggaagaagctgccaagaaccttttgccagctgattctagatcccattttcaaggtgttcgacgcaattatgaacttcaaaaaggaagagacagctaagcttatcgaaaagctagatatcaaattggacagcgaggacaaagacaaagagggtaagccacttcttaaagccgtgatgagacgctggctgcccgctggagacgctttactgcagatgataaccatccacctgccttccccagttacggctcagaagtacaggtgtgaactcttgtacgaagggccaccagatgacgaggccgcaatggggatcaaatcttgcgaccctaaaggccctctgatgatgtacattagcaaaatggtgcctaccagtgataagggtcgtttctacgccttcggaagggtcttttctggcctggtctcgaccggcctgaaggtccggatcatgggtcccaactatacacctgggaagaaggaggacctgtatctgaaacctattcagcgtactatacttatgatggggcgatatgtcgaacccattgaggatgtaccttgtggaaatattgtggggctcgttggagtcgaccagttcctcgtgaaaactggcaccataaccacatttgagcacgcccacaatatgcgagtcatgaaattttccgtcagtccggtggtccgcgttgccgttgaggcaaaaaatcctgcagatcttcccaagctggtggagggactcaagcgactggcgaaatctgaccctatggtccaatgtataatcgaagagtcgggagagcacatcatcgccggagctggagaactccacctggaaatttgcctgaaagatctggaagaagaccacgcatgcatccctattaaaaagtccgacccagttgtgagctatcgggagaccgtctccgaagagtccaacgtgctctgtctgtccaaatcaccaaataagcataataggctttacatgaaggccagaccctttcccgatggcttagcagaagatatagataagggagaggttagtgcaaggcaggaactgaaacagcgcgctcgctatttagcggaaaaatacgagtgggacgttgccgaggccaggaaaatatggtgctttggaccagacggaacaggacccaatattttgacagacatcacgaagggagtgcagtacctgaacgagattaaggacagtgtcgttgccggtttccagtgggctaccaaagaaggggcactgtgcgaggaaaatatgcgtggggtcaggtttgatgtgcatgatgtgactctgcacgcggacgcaattcaccgcggaggcggtcagatcattcccacagctagacggtgcctgtatgcgtccgtacttaccgcccaacccagactgatggaaccgatctaccttgtggaaattcagtgtcccgaacaggtggtgggagggatttacggtgtcctgaatcgaaaaagggggcacgtgttcgaggagagtcaggtggctgggactccaatgttcgtggtcaaggcctacctcccagtgaacgagtccttcggtttcaccgccgatctcaggagtaacactggtggacaggctttccctcagtgcgtattcgaccactggcaaattctgccaggcgatccattcgacaactcttcaagaccttcacaggtagtggcagagacaaggaagcgtaaggggctaaaagaaggaatccctgcactcgataacttcctcgacaaactctag

SEQ ID NO: 122549 - DNA, 1752 bp, Artificial Sequence
  derived and/or modified sequence
atggtcaacttcacggtggaccaaattcgcgctattatggacaaaaaggcaaatataaggaatatgtccgtcatcgcgcatgtagaccacggaaagagcactcttaccgatagcctggtctgtaaggcagggattatcgcttcggctcgagcaggagagaccaggttcactgacacacggaaggacgaacaagagcgctgcatcactattaaaagcactgccatttctctgttttatgagctctctgaaaatgacttgaactttattaagcagtcaaaggacggcgctggattcttgataaatctcatagattcgccaggtcacgtcgactttagctccgaggtaaccgcagccctccgggtcacagatggtgcactggtggtcgtggattgcgtgtcaggcgtgtgtgtccaaactgaaactgtgcttcggcaggcgatcgctgagcggattaaaccagtgctcatgatgaacaaaatggacagagctctgctagagctgcagctggaacccgaggagttgtaccaaacctttcagagaatcgtggaaaacgtaaatgtgattatcagtacctacggggagggtgaatcagggccaatgggtaatatcatgattgatccagtccttggcactgtcggttttggttccggtctgcatggctgggctttcactcttaaacaattcgctgagatgtatgttgctaaatttgccgcaaagggcgagggccagctcgggcctgccgaacgcgcaaaaaaagttgaggacatgatgaaaaagctctggggagacaggtacttcgaccctgccaatggtaaattctcgaagagtgcaacgtcccctgagggtaaaaagcttccccgaaccttctgccagcttatcctagaccccatttttaaggtgtttgatgccattatgaactttaaaaaagaagaaaccgctaagttgattgagaagctcgatataaagctggatagcgaagataaggataaggaaggcaagcctcttctgaaggccgtaatgcgcaggtggctgcccgctggagatgcccttctccaaatgattacaatccacctgcccagccccgtcacagctcagaaataccgctgtgaactgttgtatgaggggcctccggatgacgaggcggctatgggtataaagtcctgcgaccctaaagggcctctgatgatgtacatttcgaagatggtgcctaccagtgataaaggccgtttttacgcattcggcagggtgttcagtggtctggtgtccacagggttaaaagtgcgcatcatgggccctaactatacccctggaaaaaaggaagacctgtacctaaagccaattcaaaggaccatccttatgatgggaagatacgtggaacccatcgaggatgtgccttgtggaaacatcgtcggactagttggagtggaccagtttctggtgaagacaggtaccatcacaacttttgagcatgcccacaacatgagagtgatgaaattctctgtgtcacctgtggtcagggtcgccgtagaggcaaagaatcccgcagacctgccaaagcttgtagaaggccttaaacggctggctaagtctgaccccatggtgcagtgcataatcgaagaaagcggtgagcatatcatcgcaggggctggggagcttcatctcgagatctgtctcaaagatctagaagaggaccacgcgtgtatccctatcaaaaaagaaaccgtcagtaaaaagaaaaaaaaaaaaaaatag

SEQ ID NO: 122550 - DNA, 2577 bp, Artificial Sequence
  derived and/or modified sequence
atggtgaacttcaccgtggaccagatcagagccatcatggacaagaaggccaacatcagaaacatgagcgtgatcgcccacgtggaccacggcaagagcaccctgaccgacagcctggtgtgcaaggccggcatcatcgccagcgccagagccggcgagaccagattcaccgacaccagaaaggacgagcaggagagatgcatcaccatcaagagcaccgccatcagcctgttctacgagctgagcgagaacgacctgaacttcatcaagcagagcaaggacggcgccggcttcctgatcaacctgatcgacagccccggccacgtggacttcagcagcgaggtgaccgccgccctgagagtgaccgacggcgccctggtggtggtggactgcgtgagcggcgtgtgcgtgcagaccgagaccgtgctgagacaggccatcgccgagagaatcaagcccgtgctgatgatgaacaagatggacagagccctgctggagctgcagctggagcccgaggagctgtaccagaccttccagagaatcgtggagaacgtgaacgtgatcatcagcacctacggcgagggcgagagcggccccatgggcaacatcatgatcgaccccgtgctgggcaccgtgggcttcggcagcggcctgcacggctgggccttcaccctgaagcagttcgccgagatgtacgtggccaagttcgccgccaagggcgagggccagctgggccccgccgagagagccaagaaggtggaggacatgatgaagaagctgtggggcgacagatacttcgaccccgccaacggcaagttcagcaagagcgccaccagccccgagggcaagaagctgcccagaaccttctgccagctgatcctggaccccatcttcaaggtgttcgacgccatcatgaacttcaagaaggaggagaccgccaagctgatcgagaagctggacatcaagctggacagcgaggacaaggacaaggagggcaagcccctgctgaaggccgtgatgagaagatggctgcccgccggcgacgccctgctgcagatgatcaccatccacctgcccagccccgtgaccgcccagaagtacagatgcgagctgctgtacgagggcccccccgacgacgaggccgccatgggcatcaagagctgcgaccccaagggccccctgatgatgtacatcagcaagatggtgcccaccagcgacaagggcagattctacgccttcggcagagtgttcagcggcctggtgagcaccggcctgaaggtgagaatcatgggccccaactacacccccggcaagaaggaggacctgtacctgaagcccatccagagaaccatcctgatgatgggcagatacgtggagcccatcgaggacgtgccctgcggcaacatcgtgggcctggtgggcgtggaccagttcctggtgaagaccggcaccatcaccaccttcgagcacgcccacaacatgagagtgatgaagttcagcgtgagccccgtggtgagagtggccgtggaggccaagaaccccgccgacctgcccaagctggtggagggcctgaagagactggccaagagcgaccccatggtgcagtgcatcatcgaggagagcggcgagcacatcatcgccggcgccggcgagctgcacctggagatctgcctgaaggacctggaggaggaccacgcctgcatccccatcaagaagagcgaccccgtggtgagctacagagagaccgtgagcgaggagagcaacgtgctgtgcctgagcaagagccccaacaagcacaacagactgtacatgaaggccagacccttccccgacggcctggccgaggacatcgacaagggcgaggtgagcgccagacaggagctgaagcagagagccagatacctggccgagaagtacgagtgggacgtggccgaggccagaaagatctggtgcttcggccccgacggcaccggccccaacatcctgaccgacatcaccaagggcgtgcagtacctgaacgagatcaaggacagcgtggtggccggcttccagtgggccaccaaggagggcgccctgtgcgaggagaacatgagaggcgtgagattcgacgtgcacgacgtgaccctgcacgccgacgccatccacagaggcggcggccagatcatccccaccgccagaagatgcctgtacgccagcgtgctgaccgcccagcccagactgatggagcccatctacctggtggagatccagtgccccgagcaggtggtgggcggcatctacggcgtgctgaacagaaagagaggccacgtgttcgaggagagccaggtggccggcacccccatgttcgtggtgaaggcctacctgcccgtgaacgagagcttcggcttcaccgccgacctgagaagcaacaccggcggccaggccttcccccagtgcgtgttcgaccactggcagatcctgcccggcgaccccttcgacaacagcagcagacccagccaggtggtggccgagaccagaaagagaaagggcctgaaggagggcatccccgccctggacaacttcctggacaagctgtag

SEQ ID NO: 122551 - DNA, 1752 bp, Artificial Sequence
  derived and/or modified sequence
atggtgaacttcaccgtggaccagatcagagccatcatggacaagaaggccaacatcagaaacatgagcgtgatcgcccacgtggaccacggcaagagcaccctgaccgacagcctggtgtgcaaggccggcatcatcgccagcgccagagccggcgagaccagattcaccgacaccagaaaggacgagcaggagagatgcatcaccatcaagagcaccgccatcagcctgttctacgagctgagcgagaacgacctgaacttcatcaagcagagcaaggacggcgccggcttcctgatcaacctgatcgacagccccggccacgtggacttcagcagcgaggtgaccgccgccctgagagtgaccgacggcgccctggtggtggtggactgcgtgagcggcgtgtgcgtgcagaccgagaccgtgctgagacaggccatcgccgagagaatcaagcccgtgctgatgatgaacaagatggacagagccctgctggagctgcagctggagcccgaggagctgtaccagaccttccagagaatcgtggagaacgtgaacgtgatcatcagcacctacggcgagggcgagagcggccccatgggcaacatcatgatcgaccccgtgctgggcaccgtgggcttcggcagcggcctgcacggctgggccttcaccctgaagcagttcgccgagatgtacgtggccaagttcgccgccaagggcgagggccagctgggccccgccgagagagccaagaaggtggaggacatgatgaagaagctgtggggcgacagatacttcgaccccgccaacggcaagttcagcaagagcgccaccagccccgagggcaagaagctgcccagaaccttctgccagctgatcctggaccccatcttcaaggtgttcgacgccatcatgaacttcaagaaggaggagaccgccaagctgatcgagaagctggacatcaagctggacagcgaggacaaggacaaggagggcaagcccctgctgaaggccgtgatgagaagatggctgcccgccggcgacgccctgctgcagatgatcaccatccacctgcccagccccgtgaccgcccagaagtacagatgcgagctgctgtacgagggcccccccgacgacgaggccgccatgggcatcaagagctgcgaccccaagggccccctgatgatgtacatcagcaagatggtgcccaccagcgacaagggcagattctacgccttcggcagagtgttcagcggcctggtgagcaccggcctgaaggtgagaatcatgggccccaactacacccccggcaagaaggaggacctgtacctgaagcccatccagagaaccatcctgatgatgggcagatacgtggagcccatcgaggacgtgccctgcggcaacatcgtgggcctggtgggcgtggaccagttcctggtgaagaccggcaccatcaccaccttcgagcacgcccacaacatgagagtgatgaagttcagcgtgagccccgtggtgagagtggccgtggaggccaagaaccccgccgacctgcccaagctggtggagggcctgaagagactggccaagagcgaccccatggtgcagtgcatcatcgaggagagcggcgagcacatcatcgccggcgccggcgagctgcacctggagatctgcctgaaggacctggaggaggaccacgcctgcatccccatcaagaaggagaccgtgagcaagaagaagaagaagaagaagtag

SEQ ID NO: 122552 - protein, 228 aa, Artificial Sequence
  derived and/or modified sequence
MLHVEMLTLVFLVLWMCVFSQDPGSKAVADRYAVYWNSSNPRFQRGDYHIDVCINDYLDVFCPHYEDSVPEDKTERYVLYMVNFDGYSACDHTSKGFKRWECNRPHSPNGPLKFSEKFQLFTPFSLGFEFRPGREYFYISSAIPDNGRRSCLKLKVFVRPTNSCMKTIGVHDRVFDVNDKVENSLEPADDTVHESAEPSRGENAAQTPRIPSRLLAILLFLLAMLLTL

SEQ ID NO: 122553 - DNA, 687 bp, Artificial Sequence
  derived and/or modified sequence
atgctgcacgtggagatgctgaccctggtgttcctggtgctgtggatgtgcgtgttcagccaggaccccggcagcaaggccgtggccgacagatacgccgtgtactggaacagcagcaaccccagattccagagaggcgactaccacatcgacgtgtgcatcaacgactacctggacgtgttctgcccccactacgaggacagcgtgcccgaggacaagaccgagagatacgtgctgtacatggtgaacttcgacggctacagcgcctgcgaccacaccagcaagggcttcaagagatgggagtgcaacagaccccacagccccaacggccccctgaagttcagcgagaagttccagctgttcacccccttcagcctgggcttcgagttcagacccggcagagagtacttctacatcagcagcgccatccccgacaacggcagaagaagctgcctgaagctgaaggtgttcgtgagacccaccaacagctgcatgaagaccatcggcgtgcacgacagagtgttcgacgtgaacgacaaggtggagaacagcctggagcccgccgacgacaccgtgcacgagagcgccgagcccagcagaggcgagaacgccgcccagacccccagaatccccagcagactgctggccatcctgctgttcctgctggccatgctgctgaccctgtag

SEQ ID NO: 122554 - DNA, 5335 bp, Artificial Sequence
  derived and/or modified sequence
gcttctctccatcttgtgattcctttttcctcctgaaccctccagtgggggtgcgagtttgtctttatcaccccccatcccaccgccttcttttcttctcgctctcctacccctccccagcttggtgggcgcctctttcctttctcgcccactttcatttttatttattcatatttatttggcgcccgctctctctctgtccctttgcctgcctccctccctccggatccccgctctctccccggagtggcgcgtcgggggctccgccgctggccaggcgtgatgttgcacgtggagatgttgacgctggtgtttctggtgctctggatgtgtgtgttcagccaggacccgggctccaaggccgtcgccgaccgctacgctgtctactggaacagcagcaaccccagattccagaggggtgactaccatattgatgtctgtatcaatgactacctggatgttttctgccctcactatgaggactccgtcccagaagataagactgagcgctatgtcctctacatggtgaactttgatggctacagtgcctgcgaccacacttccaaagggttcaagagatgggaatgtaaccggcctcactctccaaatggaccgctgaagttctctgaaaaattccagctcttcactcccttttctctaggatttgaattcaggccaggccgagaatatttctacatctcctctgcaatcccagataatggaagaaggtcctgtctaaagctcaaagtctttgtgagaccaacaaatagctgtatgaaaactataggtgttcatgatcgtgttttcgatgttaacgacaaagtagaaaattcattagaaccagcagatgacaccgtacatgagtcagccgagccatcccgcggcgagaacgcggcacaaacaccaaggatacccagccgccttttggcaatcctactgttcctcctggcgatgcttttgacattatagcacagtctcctcccatcacttgtcacagaaaacatcagggtcttggaacaccagagatccacctaactgctcatcctaagaagggacttgttattgggttttggcagatgtcagatttttgttttctttctttcagcctgaattctaagcaacaacttcaggttgggggcctaaacttgttcctgcctccctcaccccaccccgccccacccccagccctggcccttggcttctctcacccctcccaaattaaatggactccagatgaaaatgccaaattgtcatagtgacaccagtggttcgtcagctcctgtgcattctcctctaagaactcacctccgttagcgcactgtgtcagcgggctatggacaaggaagaatagtggcagatgcagccagcgctggctagggctgggagggttttgctctcctatgcaatatttatgccttctcattcagaactgtaagatgatcgcgcagggcatcatgtcaccatgtcaggtccggaggggaggtattaagaatagatacgatattacaccatttcctataggagtatgtaaatgaacaggcttctaaaaggttgagacactggtttttttttttaatatgactgtcttaaagcattcttgacagcaaaacttgtgctctctaaaagaagccttttttttttttctaggaggcaggttgggtgtggaatgctaatacagagcaggtgtgaaaacagagaaaactacaggtttgctgggggtgtgtatgtgtgagtgcctctaatttttttggtgactgggcagtgcacaccagatattttttctttgaatacagatcaccatggtgctacaactttttttttttttttttttttttttttttttttttttaagaaactcaaagaggcatttttatgaataaagtgaccttccccaaggctgacaagccagggttgatgagtgcatagtggaatagctttggatactcctctgggggatgacatgtaccaaggagaggaccgcagtggccagaggagacatgatttggctttgctggagcgccagtgtgctgtggcctttccccgcctcccaccctagtacccacgttttgctccacactccttgaccgcaggggctcggacacaaacccctgtcaccaggagagtcagtcagcactacttgggagggctaaagggaaatttggaaataaaattccaaagtttggagtaaaaaaattcaagtgttgattttatattctttccctttctgacacagcctaaagcgtagggggaacatgtgtttatctgtgggagataaacaagatggagtcccaaagactttaacaaaatatttttttaaaaatccactagaatagaaaatacattatttagatatactttatgctgagagtgagtatatatgcttgtcctatttaaacttgtgagaaaaagtggtatcccttgatacatttagaaatatgggggctatcttgtttcattgtgggggtggggcagaaggagaataaatgcaggatgaccctgttgaaggaatcttagcatggccaacaggggacgtttccagtcgattaccaggaaatgcaagccttggggtttctactggtggtggggctgtcatgaactttaaaatccaaagcctagacaaggaaaagtgttagaccaattgaaaagcaatccagccctttttttttttttttttttggctttgcacgacatgtcaacagaaaccatgcctttcaatataagaaataaatgtgatgatcatgtaaaatgtgaaaaattgaaagcattccagcaaaataagaattttttatatatttgttttttaagatgtatatgttaaaaaaagagaaggtcgcattatggacagacttcgtgaatgggaatttgcttagaattgtgagtagttctgaattagaaaagtatgtgaaggaaaggcagctgtaaacgtattgtgccctggagagttgtacacatgttgaaatgtaatctgggcttacctgatccatttggagtggatgtcactgccgagtctgttctcacatggaaccatgtgtgtggggttgccagcctcacagatacaatcaatcctattcccctctgacataaggaactcctctggagtggcagagtcttatcacagaaggcagccaccatttcaccaaaacaaaagttcacggcattcaattcctttttcctttagctatttatatatgcagtactctcagtcatatgcagaaatacttttttttttttaattaatagttacaggcttgttggtccagtgggatttgggtagggggagaaagataccttctaaaatggatcaatagaaccaaaataatacagcatgttctataaccacaaggaaatcaaatgatcctgtcatgattccagttagtcataactatgttagcagtgctaaatgcattttagaaatggtgacttctgtggttttcctagcatttgtctctaacaaatggtgaaataattactcatggccctctctgccattgtctttcattttttcacagtgaaattagacccctttacttcaccattctgccactgcaaattaagtataaagaaaatagcaagagtgtccacaccagtagacagtaagcttctctacctgtaagtgatgaaatcatagctaatgcacttgccatggagttttcaagatgattggtgtcagacagttttcactttgtttaaaaagtgttggtggccttttgtggtggtgttacaatcctctgggggcttaggaggatgttgatgcaacttttagaagcttttaatttcaaaaacaactcaaaaatctgaaggacagtcatagctgccactcagccccagttagtcaaaccccagtgacctttgcccctggttgccaagggctttgcaacatcaagcagggaaataaggatctgtctgtttagtggataccgtgtatcctttaatagaccaggtaacagttcgtgttagtttagactattgttttgtactgtactttcttgggtggcagaggaaagaaaagtaaaacattaaaaaaaaaaaaaaaactgcgttctttaaattctgtattattagcaacctctgttgtacatagtgtttgataataaagtattaatttgattcttatgtcttttgtaagtgagaacaatagactttcaggatacaaaacatgcattgaggctttgaaacatccaatgtgtaccatggctgaaaaaaagagtcacaagtggctgagacactgctccatacaggactcatgtgtggtcattgcccacccaatcttatgactccatcatcttgggacctggaacaacatgacttttttgatcgatattttgtcctcggtgttttcaaggtctgatgttggagccctgtggcccaccctcccttctccaccagcatgttggtttgaaaaggatagggaatttagaaacagttctgtactttggtttggtttggttttctgtttgtgattgttttcatggactgttttattttttcccaggaagagtctttatcaatatcatgtgcagctcactcatggaaatggttgcaaaccaatcagtgtaggaagcttaaatggggctgtttccctctctgtgtcgttgtgaaaggaagagtcacacagtacctgtggattttcagggactctgtttttctccggtgccttagcaacggcagcagccatttgtattattttcaaataattagaaaaacagttttcaactcctcctttccattcattgctctcagagttgtggtcactgacttttcttttgaaaaccgcctccaccaacacccccgtttgcctacaccaccccccttttacttagtatgtttattttttgtgtgtctcttgccttcctcccacgttttatttcccctcagagctgtgaatgggcaggtctgtctctggtttggcatcactgagtttttcccatgcattggccccagggctgctaggatgtgagacaaatctccctacaatgggcttgctcccattgtctgtacagtttaatagatgctggcatgtcggaggttacccatgagtcaaaatccgctctccatgcttactcttgacaccccattgaagccactcattgtgtgtgcgtctgggtgtgaagtccagctccgtgtggtcctgtgcttgtactgccctgctttgcagttcctttgcacttactcatcgagtgctgttttgaaatgctgacattatataaacgtaaaagaaaatgtaaaaaaaaaaaacccacacacaaacaaacccatacgatctgtatttgtatatacacgtgtccgtacaagtataactaaataaaaattaaagattttcatcattttaattgga

SEQ ID NO: 122555 - DNA, 687 bp, Artificial Sequence
  derived and/or modified sequence
atgcttcatgtggagatgcttactttagtttttcttgtgctctggatgtgtgtgttcagccaggaccccggctctaaggctgtggccgatcggtacgctgtctactggaatagtagtaaccccagattccaaaggggcgactaccacattgatgtttgcatcaatgactatctcgacgtgttctgcccccactacgaagactccgtccccgaagacaaaactgagcgctacgtgctgtatatggtgaactttgacggctattccgcatgcgatcatacgtcaaagggatttaagcgttgggagtgcaacaggccacactcccctaacggtccactcaaattttctgaaaagtttcaactcttcaccccattcagcctcggttttgaatttcgccctggtagggagtatttttacatctcgtcagcaatacccgataatgggcgcaggtcctgtctcaagcttaaagtatttgtgcgtccaactaattcatgtatgaaaacaatcggtgtccatgatcgagtgtttgatgttaacgacaaggttgagaacagtctggaaccagctgacgatactgtgcacgaaagtgccgagccgtcccggggagagaacgctgcacagaccccaaggataccgagccgactcctggctatcctgctgttcctgctggcaatgctgcttaccttgtag

SEQ ID NO: 122556 - DNA, 687 bp, Artificial Sequence
  derived and/or modified sequence
atgctgcacgtggagatgctgaccctggtgttcctggtgctgtggatgtgtgtgttcagccaggaccccggcagcaaggctgtggccgacagatatgctgtgtactggaacagcagcaacccccgcttccagagaggagactaccacattgatgtgtgcatcaatgactacctggatgtgttctgcccccactatgaggacagcgtgcctgaggacaagacagaaagatatgtgctgtacatggtgaactttgatggctacagcgcctgtgaccacaccagcaagggcttcaagcgctgggagtgcaaccggccccacagccccaacggccccctgaagttcagcgagaagttccagctgttcacccccttcagcctgggctttgagttccggcccggccgggagtacttctacatcagcagcgccatcccagacaatggccgccgcagctgcctgaagctgaaggtgtttgtgcggcccaccaacagctgcatgaagaccatcggcgtgcatgacagagtgtttgatgtgaatgacaaggtggagaacagcctggagccagcagatgacacagtgcatgaatctgctgagcccagcagaggagaaaatgctgcccagaccccccgcatccccagccggctgctggccatcctgctcttcctgctggccatgctgctgaccctgtag

SEQ ID NO: 122557 - DNA, 687 bp, Artificial Sequence
  derived and/or modified sequence
atgctgcacgtggagatgctgaccctggtgttcctggtgctgtggatgtgcgtgttcagtcaagatcctgggagcaaggcggtggccgatcgctatgcggtctattggaatagttctaaccccaggttccagaggggggactatcatattgatgtctgtattaacgattaccttgacgtattttgccctcattatgaagacagtgtacctgaagataagactgaacggtatgtgctgtacatggtgaattttgacgggtattctgcttgcgatcataccagcaagggatttaagagatgggagtgcaaccgccctcatagcccgaatgggcccctgaagttcagtgaaaaattccagctgttcacgccattttccctgggctttgagttcaggcctggacgggagtatttttacatttctagcgctattccagataacggcaggagaagttgtctcaaactcaaggtcttcgtgagaccgaccaacagttgcatgaagacaatcggagttcacgaccgggtctttgacgtgaatgacaaagtcgagaatagcctggagcctgctgacgacaccgtccacgagtcagccgagccctcccgtggcgagaatgcggcacaaacaccgaggataccctcacggctgcttgccatcctcctgttcctcctggccatgctattgaccctgtag

SEQ ID NO: 122558 - DNA, 687 bp, Artificial Sequence
  derived and/or modified sequence
atgttgcacgtcgagatgctgaccctcgttttccttgtgctgtggatgtgtgtgttcagccaggatccaggctccaaagccgttgccgaccgatatgctgtgtactggaactcaagtaatcccagattccagcgaggtgactaccatatagatgtgtgtatcaatgattatctagacgtgttctgtccccattacgaagactctgtgcctgaggataagacagaacgttacgttttgtacatggtgaactttgacggatactccgcttgcgaccacacatccaagggattcaagcgatgggagtgcaaccgtccacattctcctaatggccctcttaaattttccgagaaattccaattgtttaccccattttctctgggattcgagttccgacctgggagagaatacttctacatcagcagtgccatcccggataacgggaggagatcctgtctgaagctgaaggtgttcgtccggcctaccaacagctgtatgaagaccattggagttcacgatcgggtgttcgatgtcaacgacaaagtggaaaactccttggagccagccgacgatacagtgcatgagtcggcagagccatcgcgcggagagaacgcggcacagactcctcgcattcccagcaggttgttagccatactgttgttccttctcgcaatgcttttaaccctctag

SEQ ID NO: 122559 - protein, 1207 aa, Artificial Sequence
  derived and/or modified sequence
MLLTLIILLPVVSKFSFVSLSAPQHWSCPEGTLAGNGNSTCVGPAPFLIFSHGNSIFRIDTEGTNYEQLVVDAGVSVIMDFHYNEKRIYWVDLERQLLQRVFLNGSRQERVCNIEKNVSGMAINWINEEVIWSNQQEGIITVTDMKGNNSHILLSALKYPANVAVDPVERFIFWSSEVAGSLYRADLDGVGVKALLETSEKITAVSLDVLDKRLFWIQYNREGSNSLICSCDYDGGSVHISKHPTQHNLFAMSLFGDRIFYSTWKMKTIWIANKHTGKDMVRINLHSSFVPLGELKVVHPLAQPKAEDDTWEPEQKLCKLRKGNCSSTVCGQDLQSHLCMCAEGYALSRDRKYCEDVNECAFWNHGCTLGCKNTPGSYYCTCPVGFVLLPDGKRCHQLVSCPRNVSECSHDCVLTSEGPLCFCPEGSVLERDGKTCSGCSSPDNGGCSQLCVPLSPVSWECDCFPGYDLQLDEKSCAASGPQPFLLFANSQDIRHMHFDGTDYGTLLSQQMGMVYALDHDPVENKIYFAHTALKWIERANMDGSQRERLIEEGVDVPEGLAVDWIGRRFYWTDRGKSLIGRSDLNGKRSKIITKENISQPRGIAVHPMAKRLFWTDTGINPRIESSSLQGLGRLVIASSDLIWPSGITIDFLTDKLYWCDAKQSVIEMANLDGSKRRRLTQNDVGHPFAVAVFEDYVWFSDWAMPSVMRVNKRTGKDRVRLQGSMLKPSSLVVVHPLAKPGADPCLYQNGGCEHICKKRLGTAWCSCREGFMKASDGKTCLALDGHQLLAGGEVDLKNQVTPLDILSKTRVSEDNITESQHMLVAEIMVSDQDDCAPVGCSMYARCISEGEDATCQCLKGFAGDGKLCSDIDECEMGVPVCPPASSKCINTEGGYVCRCSEGYQGDGIHCLDIDECQLGEHSCGENASCTNTEGGYTCMCAGRLSEPGLICPDSTPPPHLREDDHHYSVRNSDSECPLSHDGYCLHDGVCMYIEALDKYACNCVVGYIGERCQYRDLKWWELRHAGHGQQQKVIVVAVCVVVLVMLLLLSLWGAHYYRTQKLLSKNPKNPYEESSRDVRSRRPADTEDGMSSCPQPWFVVIKEHQDLKNGGQPVAGEDGQAADGSMQPTSWRQEPQLCGMGTEQGCWIPVSSDKGSCPQVMERSFHMPSYGTQTLEGGVEKPHSLLSANPLWQQRALDPPHQMELTQ

SEQ ID NO: 122560 - DNA, 5600 bp, Artificial Sequence
  derived and/or modified sequence
aaaaagagaaactgttgggagaggaatcgtatctccatatttcttctttcagccccaatccaagggttgtagctggaactttccatcagttcttcctttctttttcctctctaagcctttgccttgctctgtcacagtgaagtcagccagagcagggctgttaaactctgtgaaatttgtcataagggtgtcaggtatttcttactggcttccaaagaaacatagataaagaaatctttcctgtggcttcccttggcaggctgcattcagaaggtctctcagttgaagaaagagcttggaggacaacagcacaacaggagagtaaaagatgccccagggctgaggcctccgctcaggcagccgcatctggggtcaatcatactcaccttgcccgggccatgctccagcaaaatcaagctgttttcttttgaaagttcaaactcatcaagattatgctgctcactcttatcattctgttgccagtagtttcaaaatttagttttgttagtctctcagcaccgcagcactggagctgtcctgaaggtactctcgcaggaaatgggaattctacttgtgtgggtcctgcacccttcttaattttctcccatggaaatagtatctttaggattgacacagaaggaaccaattatgagcaattggtggtggatgctggtgtctcagtgatcatggattttcattataatgagaaaagaatctattgggtggatttagaaagacaacttttgcaaagagtttttctgaatgggtcaaggcaagagagagtatgtaatatagagaaaaatgtttctggaatggcaataaattggataaatgaagaagttatttggtcaaatcaacaggaaggaatcattacagtaacagatatgaaaggaaataattcccacattcttttaagtgctttaaaatatcctgcaaatgtagcagttgatccagtagaaaggtttatattttggtcttcagaggtggctggaagcctttatagagcagatctcgatggtgtgggagtgaaggctctgttggagacatcagagaaaataacagctgtgtcattggatgtgcttgataagcggctgttttggattcagtacaacagagaaggaagcaattctcttatttgctcctgtgattatgatggaggttctgtccacattagtaaacatccaacacagcataatttgtttgcaatgtccctttttggtgaccgtatcttctattcaacatggaaaatgaagacaatttggatagccaacaaacacactggaaaggacatggttagaattaacctccattcatcatttgtaccacttggtgaactgaaagtagtgcatccacttgcacaacccaaggcagaagatgacacttgggagcctgagcagaaactttgcaaattgaggaaaggaaactgcagcagcactgtgtgtgggcaagacctccagtcacacttgtgcatgtgtgcagagggatacgccctaagtcgagaccggaagtactgtgaagatgttaatgaatgtgctttttggaatcatggctgtactcttgggtgtaaaaacacccctggatcctattactgcacgtgccctgtaggatttgttctgcttcctgatgggaaacgatgtcatcaacttgtttcctgtccacgcaatgtgtctgaatgcagccatgactgtgttctgacatcagaaggtcccttatgtttctgtcctgaaggctcagtgcttgagagagatgggaaaacatgtagcggttgttcctcacccgataatggtggatgtagccagctctgcgttcctcttagcccagtatcctgggaatgtgattgctttcctgggtatgacctacaactggatgaaaaaagctgtgcagcttcaggaccacaaccatttttgctgtttgccaattctcaagatattcgacacatgcattttgatggaacagactatggaactctgctcagccagcagatgggaatggtttatgccctagatcatgaccctgtggaaaataagatatactttgcccatacagccctgaagtggatagagagagctaatatggatggttcccagcgagaaaggcttattgaggaaggagtagatgtgccagaaggtcttgctgtggactggattggccgtagattctattggacagacagagggaaatctctgattggaaggagtgatttaaatgggaaacgttccaaaataatcactaaggagaacatctctcaaccacgaggaattgctgttcatccaatggccaagagattattctggactgatacagggattaatccacgaattgaaagttcttccctccaaggccttggccgtctggttatagccagctctgatctaatctggcccagtggaataacgattgacttcttaactgacaagttgtactggtgcgatgccaagcagtctgtgattgaaatggccaatctggatggttcaaaacgccgaagacttacccagaatgatgtaggtcacccatttgctgtagcagtgtttgaggattatgtgtggttctcagattgggctatgccatcagtaatgagagtaaacaagaggactggcaaagatagagtacgtctccaaggcagcatgctgaagccctcatcactggttgtggttcatccattggcaaaaccaggagcagatccctgcttatatcaaaacggaggctgtgaacatatttgcaaaaagaggcttggaactgcttggtgttcgtgtcgtgaaggttttatgaaagcctcagatgggaaaacgtgtctggctctggatggtcatcagctgttggcaggtggtgaagttgatctaaagaaccaagtaacaccattggacatcttgtccaagactagagtgtcagaagataacattacagaatctcaacacatgctagtggctgaaatcatggtgtcagatcaagatgactgtgctcctgtgggatgcagcatgtatgctcggtgtatttcagagggagaggatgccacatgtcagtgtttgaaaggatttgctggggatggaaaactatgttctgatatagatgaatgtgagatgggtgtcccagtgtgcccccctgcctcctccaagtgcatcaacaccgaaggtggttatgtctgccggtgctcagaaggctaccaaggagatgggattcactgtcttgatattgatgagtgccaactgggggagcacagctgtggagagaatgccagctgcacaaatacagagggaggctatacctgcatgtgtgctggacgcctgtctgaaccaggactgatttgccctgactctactccaccccctcacctcagggaagatgaccaccactattccgtaagaaatagtgactctgaatgtcccctgtcccacgatgggtactgcctccatgatggtgtgtgcatgtatattgaagcattggacaagtatgcatgcaactgtgttgttggctacatcggggagcgatgtcagtaccgagacctgaagtggtgggaactgcgccacgctggccacgggcagcagcagaaggtcatcgtggtggctgtctgcgtggtggtgcttgtcatgctgctcctcctgagcctgtggggggcccactactacaggactcagaagctgctatcgaaaaacccaaagaatccttatgaggagtcgagcagagatgtgaggagtcgcaggcctgctgacactgaggatgggatgtcctcttgccctcaaccttggtttgtggttataaaagaacaccaagacctcaagaatgggggtcaaccagtggctggtgaggatggccaggcagcagatgggtcaatgcaaccaacttcatggaggcaggagccccagttatgtggaatgggcacagagcaaggctgctggattccagtatccagtgataagggctcctgtccccaggtaatggagcgaagctttcatatgccctcctatgggacacagacccttgaagggggtgtcgagaagccccattctctcctatcagctaacccattatggcaacaaagggccctggacccaccacaccaaatggagctgactcagtgaaaactggaattaaaaggaaagtcaagaagaatgaactatgtcgatgcacagtatcttttctttcaaaagtagagcaaaactataggttttggttccacaatctctacgactaatcacctactcaatgcctggagacagatacgtagttgtgcttttgtttgctcttttaagcagtctcactgcagtcttatttccaagtaagagtactgggagaatcactaggtaacttattagaaacccaaattgggacaacagtgctttgtaaattgtgttgtcttcagcagtcaatacaaatagatttttgtttttgttgttcctgcagccccagaagaaattaggggttaaagcagacagtcacactggtttggtcagttacaaagtaatttctttgatctggacagaacatttatatcagtttcatgaaatgattggaatattacaataccgttaagatacagtgtaggcatttaactcctcattggcgtggtccatgctgatgattttgcaaaatgagttgtgatgaatcaatgaaaaatgtaatttagaaactgatttcttcagaattagatggcttattttttaaaatatttgaatgaaaacattttatttttaaaatattacacaggaggcttcggagtttcttagtcattactgtccttttcccctacagaattttccctcttggtgtgattgcacagaatttgtatgtattttcagttacaagattgtaagtaaattgcctgatttgttttcattatagacaacgatgaatttcttctaattatttaaataaaatcaccaaaaacataaacattttattgtatgcctgattaagtagttaattatagtctaaggcagtactagagttgaaccaaaatgatttgtcaagcttgctgatgtttctgtttttcgttttttttttttttccggagagaggataggatctcactctgttatccaggctggagtgtgcaatggcacaatcatagctcagtgcagcctcaaactcctgggctcaagcaatcctcctgcctcagcctcccgagtaactaggaccacaggcacaggccaccatgcctggctaaggtttttatttttattttttgtagacatggggatcacacaatgttgcccaggctggtcttgaactcctggcctcaagcaaggtcgtgctggtaattttgcaaaatgaattgtgattgactttcagcctcccaacgtattagattataggcattagccatggtgcccagccttgtaacttttaaaaaaattttttaatctacaactctgtagattaaaatttcacatggtgttctaattaaatatttttcttgcagccaagatattgttactacagataacacaacctgatatggtaactttaaattttgggggctttgaatcattcagtttatgcattaactagtccctttgtttatctttcatttctcaaccccttgtactttggtgataccagacatcagaataaaaagaaattgaagtaaaaaaaaaaaaaaaaaa

SEQ ID NO: 122561 - DNA, 3624 bp, Artificial Sequence
  derived and/or modified sequence
atgctgctgaccctgatcatcctgctgcccgtggtgagcaagttcagcttcgtgagcctgagcgccccccagcactggagctgccccgagggcaccctggccggcaacggcaacagcacctgcgtgggccccgcccccttcctgatcttcagccacggcaacagcatcttcagaatcgacaccgagggcaccaactacgagcagctggtggtggacgccggcgtgagcgtgatcatggacttccactacaacgagaagagaatctactgggtggacctggagagacagctgctgcagagagtgttcctgaacggcagcagacaggagagagtgtgcaacatcgagaagaacgtgagcggcatggccatcaactggatcaacgaggaggtgatctggagcaaccagcaggagggcatcatcaccgtgaccgacatgaagggcaacaacagccacatcctgctgagcgccctgaagtaccccgccaacgtggccgtggaccccgtggagagattcatcttctggagcagcgaggtggccggcagcctgtacagagccgacctggacggcgtgggcgtgaaggccctgctggagaccagcgagaagatcaccgccgtgagcctggacgtgctggacaagagactgttctggatccagtacaacagagagggcagcaacagcctgatctgcagctgcgactacgacggcggcagcgtgcacatcagcaagcaccccacccagcacaacctgttcgccatgagcctgttcggcgacagaatcttctacagcacctggaagatgaagaccatctggatcgccaacaagcacaccggcaaggacatggtgagaatcaacctgcacagcagcttcgtgcccctgggcgagctgaaggtggtgcaccccctggcccagcccaaggccgaggacgacacctgggagcccgagcagaagctgtgcaagctgagaaagggcaactgcagcagcaccgtgtgcggccaggacctgcagagccacctgtgcatgtgcgccgagggctacgccctgagcagagacagaaagtactgcgaggacgtgaacgagtgcgccttctggaaccacggctgcaccctgggctgcaagaacacccccggcagctactactgcacctgccccgtgggcttcgtgctgctgcccgacggcaagagatgccaccagctggtgagctgccccagaaacgtgagcgagtgcagccacgactgcgtgctgaccagcgagggccccctgtgcttctgccccgagggcagcgtgctggagagagacggcaagacctgcagcggctgcagcagccccgacaacggcggctgcagccagctgtgcgtgcccctgagccccgtgagctgggagtgcgactgcttccccggctacgacctgcagctggacgagaagagctgcgccgccagcggcccccagcccttcctgctgttcgccaacagccaggacatcagacacatgcacttcgacggcaccgactacggcaccctgctgagccagcagatgggcatggtgtacgccctggaccacgaccccgtggagaacaagatctacttcgcccacaccgccctgaagtggatcgagagagccaacatggacggcagccagagagagagactgatcgaggagggcgtggacgtgcccgagggcctggccgtggactggatcggcagaagattctactggaccgacagaggcaagagcctgatcggcagaagcgacctgaacggcaagagaagcaagatcatcaccaaggagaacatcagccagcccagaggcatcgccgtgcaccccatggccaagagactgttctggaccgacaccggcatcaaccccagaatcgagagcagcagcctgcagggcctgggcagactggtgatcgccagcagcgacctgatctggcccagcggcatcaccatcgacttcctgaccgacaagctgtactggtgcgacgccaagcagagcgtgatcgagatggccaacctggacggcagcaagagaagaagactgacccagaacgacgtgggccaccccttcgccgtggccgtgttcgaggactacgtgtggttcagcgactgggccatgcccagcgtgatgagagtgaacaagagaaccggcaaggacagagtgagactgcagggcagcatgctgaagcccagcagcctggtggtggtgcaccccctggccaagcccggcgccgacccctgcctgtaccagaacggcggctgcgagcacatctgcaagaagagactgggcaccgcctggtgcagctgcagagagggcttcatgaaggccagcgacggcaagacctgcctggccctggacggccaccagctgctggccggcggcgaggtggacctgaagaaccaggtgacccccctggacatcctgagcaagaccagagtgagcgaggacaacatcaccgagagccagcacatgctggtggccgagatcatggtgagcgaccaggacgactgcgcccccgtgggctgcagcatgtacgccagatgcatcagcgagggcgaggacgccacctgccagtgcctgaagggcttcgccggcgacggcaagctgtgcagcgacatcgacgagtgcgagatgggcgtgcccgtgtgcccccccgccagcagcaagtgcatcaacaccgagggcggctacgtgtgcagatgcagcgagggctaccagggcgacggcatccactgcctggacatcgacgagtgccagctgggcgagcacagctgcggcgagaacgccagctgcaccaacaccgagggcggctacacctgcatgtgcgccggcagactgagcgagcccggcctgatctgccccgacagcaccccccccccccacctgagagaggacgaccaccactacagcgtgagaaacagcgacagcgagtgccccctgagccacgacggctactgcctgcacgacggcgtgtgcatgtacatcgaggccctggacaagtacgcctgcaactgcgtggtgggctacatcggcgagagatgccagtacagagacctgaagtggtgggagctgagacacgccggccacggccagcagcagaaggtgatcgtggtggccgtgtgcgtggtggtgctggtgatgctgctgctgctgagcctgtggggcgcccactactacagaacccagaagctgctgagcaagaaccccaagaacccctacgaggagagcagcagagacgtgagaagcagaagacccgccgacaccgaggacggcatgagcagctgcccccagccctggttcgtggtgatcaaggagcaccaggacctgaagaacggcggccagcccgtggccggcgaggacggccaggccgccgacggcagcatgcagcccaccagctggagacaggagccccagctgtgcggcatgggcaccgagcagggctgctggatccccgtgagcagcgacaagggcagctgcccccaggtgatggagagaagcttccacatgcccagctacggcacccagaccctggagggcggcgtggagaagccccacagcctgctgagcgccaaccccctgtggcagcagagagccctggaccccccccaccagatggagctgacccagtag

SEQ ID NO: 122562 - DNA, 4880 bp, Artificial Sequence
  derived and/or modified sequence
gaaactgttgggagaggaatcgtatctccatatttcttctttcagccccaatccaagggttgtagctggaactttccatcagttcttcctttctttttcctctctaagcctttgccttgctctgtcacagtgaagtcagccagagcagggctgttaaactctgtgaaatttgtcataagggtgtcaggtatttcttactggcttccaaagaaacatagataaagaaatctttcctgtggcttcccttggcaggctgcattcagaaggtctctcagttgaagaaagagcttggaggacaacagcacaacaggagagtaaaagatgccccagggctgaggcctccgctcaggcagccgcatctggggtcaatcatactcaccttgcccgggccatgctccagcaaaatcaagctgttttcttttgaaagttcaaactcatcaagattatgctgctcactcttatcattctgttgccagtagtttcaaaatttagttttgttagtctctcagcaccgcagcactggagctgtcctgaaggtactctcgcaggaaatgggaattctacttgtgtgggtcctgcacccttcttaattttctcccatggaaatagtatctttaggattgacacagaaggaaccaattatgagcaattggtggtggatgctggtgtctcagtgatcatggattttcattataatgagaaaagaatctattgggtggatttagaaagacaacttttgcaaagagtttttctgaatgggtcaaggcaagagagagtatgtaatatagagaaaaatgtttctggaatggcaataaattggataaatgaagaagttatttggtcaaatcaacaggaaggaatcattacagtaacagatatgaaaggaaataattcccacattcttttaagtgctttaaaatatcctgcaaatgtagcagttgatccagtagaaaggtttatattttggtcttcagaggtggctggaagcctttatagagcagatctcgatggtgtgggagtgaaggctctgttggagacatcagagaaaataacagctgtgtcattggatgtgcttgataagcggctgttttggattcagtacaacagagaaggaagcaattctcttatttgctcctgtgattatgatggaggttctgtccacattagtaaacatccaacacagcataatttgtttgcaatgtccctttttggtgaccgtatcttctattcaacatggaaaatgaagacaatttggatagccaacaaacacactggaaaggacatggttagaattaacctccattcatcatttgtaccacttggtgaactgaaagtagtgcatccacttgcacaacccaaggcagaagatgacacttgggagcctgagcagaaactttgcaaattgaggaaaggaaactgcagcagcactgtgtgtgggcaagacctccagtcacacttgtgcatgtgtgcagagggatacgccctaagtcgagaccggaagtactgtgaagatgttaatgaatgtgctttttggaatcatggctgtactcttgggtgtaaaaacacccctggatcctattactgcacgtgccctgtaggatttgttctgcttcctgatgggaaacgatgtcatcaacttgtttcctgtccacgcaatgtgtctgaatgcagccatgactgtgttctgacatcagaaggtcccttatgtttctgtcctgaaggctcagtgcttgagagagatgggaaaacatgtagcggttgttcctcacccgataatggtggatgtagccagctctgcgttcctcttagcccagtatcctgggaatgtgattgctttcctgggtatgacctacaactggatgaaaaaagctgtgcagcttcaggaccacaaccatttttgctgtttgccaattctcaagatattcgacacatgcattttgatggaacagactatggaactctgctcagccagcagatgggaatggtttatgccctagatcatgaccctgtggaaaataagatatactttgcccatacagccctgaagtggatagagagagctaatatggatggttcccagcgagaaaggcttattgaggaaggagtagatgtgccagaaggtcttgctgtggactggattggccgtagattctattggacagacagagggaaatctctgattggaaggagtgatttaaatgggaaacgttccaaaataatcactaaggagaacatctctcaaccacgaggaattgctgttcatccaatggccaagagattattctggactgatacagggattaatccacgaattgaaagttcttccctccaaggccttggccgtctggttatagccagctctgatctaatctggcccagtggaataacgattgacttcttaactgacaagttgtactggtgcgatgccaagcagtctgtgattgaaatggccaatctggatggttcaaaacgccgaagacttacccagaatgatgtaggtcacccatttgctgtagcagtgtttgaggattatgtgtggttctcagattgggctatgccatcagtaatgagagtaaacaagaggactggcaaagatagagtacgtctccaaggcagcatgctgaagccctcatcactggttgtggttcatccattggcaaaaccaggagcagatccctgcttatatcaaaacggaggctgtgaacatatttgcaaaaagaggcttggaactgcttggtgttcgtgtcgtgaaggttttatgaaagcctcagatgggaaaacgtgtctggctctggatggtcatcagctgttggcaggtggtgaagttgatctaaagaaccaagtaacaccattggacatcttgtccaagactagagtgtcagaagataacattacagaatctcaacacatgctagtggctgaaatcatggtgtcagatcaagatgactgtgctcctgtgggatgcagcatgtatgctcggtgtatttcagagggagaggatgccacatgtcagtgtttgaaaggatttgctggggatggaaaactatgttctgatatagatgaatgtgagatgggtgtcccagtgtgcccccctgcctcctccaagtgcatcaacaccgaaggtggttatgtctgccggtgctcagaaggctaccaaggagatgggattcactgtcttgatattgatgagtgccaactgggggagcacagctgtggagagaatgccagctgcacaaatacagagggaggctatacctgcatgtgtgctggacgcctgtctgaaccaggactgatttgccctgactctactccaccccctcacctcagggaagatgaccaccactattccgtaagaaatagtgactctgaatgtcccctgtcccacgatgggtactgcctccatgatggtgtgtgcatgtatattgaagcattggacaagtatgcatgcaactgtgttgttggctacatcggggagcgatgtcagtaccgagacctgaagtggtgggaactgcgccacgctggccacgggcagcagcagaaggtcatcgtggtggctgtctgcgtggtggtgcttgtcatgctgctcctcctgagcctgtggggggcccactactacaggactcagaagctgctatcgaaaaacccaaagaatccttatgaggagtcgagcagagatgtgaggagtcgcaggcctgctgacactgaggatgggatgtcctcttgccctcaaccttggtttgtggttataaaagaacaccaagacctcaagaatgggggtcaaccagtggctggtgaggatggccaggcagcagatgggtcaatgcaaccaacttcatggaggcaggagccccagttatgtggaatgggcacagagcaaggctgctggattccagtatccagtgataagggctcctgtccccaggtaatggagcgaagctttcatatgccctcctatgggacacagacccttgaagggggtgtcgagaagccccattctctcctatcagctaacccattatggcaacaaagggccctggacccaccacaccaaatggagctgactcagtgaaaactggaattaaaaggaaagtcaagaagaatgaactatgtcgatgcacagtatcttttctttcaaaagtagagcaaaactataggttttggttccacaatctctacgactaatcacctactcaatgcctggagacagatacgtagttgtgcttttgtttgctcttttaagcagtctcactgcagtcttatttccaagtaagagtactgggagaatcactaggtaacttattagaaacccaaattgggacaacagtgctttgtaaattgtgttgtcttcagcagtcaatacaaatagatttttgtttttgttgttcctgcagccccagaagaaattaggggttaaagcagacagtcacactggtttggtcagttacaaagtaatttctttgatctggacagaacatttatatcagtttcatgaaatgattggaatattacaataccgttaagatacagtgtaggcatttaactcctcattggcgtggtccatgctgatgattttgcaaaatgagttgtgatgaatcaatgaaaaatgtaatttagaaactgatttcttcagaattagatggcttattttttaaaatatttgaatgaaaacattttatttttaaaatattacacaggaggcttcggagtttcttagtcattactgtccttttcccctacagaattttccctcttggtgtgattgcacagaatttgtatgtattttcagttacaagattgtaagtaaattgcctgatttgttttcattatagacaacgatgaatttcttctaattatttaaataaaatcaccaaaaacataaa

SEQ ID NO: 122563 - DNA, 3624 bp, Artificial Sequence
  derived and/or modified sequence
atgctgttaacccttattatcctcctgcccgtggtgtccaagttttcgtttgtgagtctgagtgctccccaacactggtcttgtcctgaggggactctcgccggtaatgggaattccacctgcgtgggcccagctccattcttgatcttttctcacgggaattcgatcttccggatagacaccgaaggcactaactacgagcagctggtggtggacgccggcgtatccgtcatcatggactttcactataacgaaaagaggatctactgggttgaccttgagaggcagctgctccagcgggtgttcctgaatggatctcgccaggagcgagtgtgcaacatcgagaagaatgtgtcggggatggccattaactggataaacgaggaagtcatatggagcaatcagcaggaaggaatcataacggttaccgacatgaaaggaaataacagccacattctgctgtcagccttgaagtaccccgccaacgtggccgtcgaccccgtggaacggtttatattctggtcgagtgaggtggctggcagcctgtaccgagcggacttggatggggtcggcgtcaaggcgttactcgaaacctcagagaaaattaccgccgtctccctggatgtgttggacaagcgattgttttggatccagtacaatcgagagggatctaatagtttaatctgttcatgcgattatgatggcggcagcgtccacatttcgaaacaccccacacagcacaacctatttgctatgtcactctttggcgatcgaatattttatagcacctggaaaatgaagactatatggattgctaacaaacacacagggaaagatatggtgcggatcaacctgcatagcagcttcgtcccattgggcgagcttaaggtcgtgcatcccctggcccagcccaaggcagaagatgatacgtgggaacctgagcagaagctctgtaagttgcgtaaagggaattgcagttctacagtgtgcggccaggatttgcagtcacatctttgcatgtgtgcggagggctatgctctaagtagggatcggaaatattgcgaagatgtgaacgaatgcgctttctggaaccacgggtgtacgctgggctgcaaaaacacaccaggtagctactactgtacatgtcccgttggctttgtcctgttaccagacggaaagcgctgccaccagttggttagttgcccacggaatgtcagtgagtgctctcacgactgcgtactcactagcgaaggtcctctctgcttttgtcctgagggaagcgtgcttgagcgagatgggaagacttgctcagggtgctcgtcccctgataacggaggatgctcccagctttgtgttcctctgagtccggtgagttgggaatgtgactgttttcctggctatgacttgcagttggacgagaaaagttgcgcagcttcaggtcctcagccattcttgctgttcgcgaattctcaggacattcgacatatgcatttcgacggtactgattacggcaccctgctatctcaacaaatgggcatggtctacgccctcgaccatgaccccgtcgaaaacaaaatctacttcgcacataccgcgttaaaatggattgaacgggctaatatggacggtagtcaaagggaaagattaattgaggagggagtcgacgtacctgagggtttggccgtggactggattgggcggcggttctattggacagaccgggggaagagtctaatcggccgatcagatctgaatgggaagcgctccaaaatcattactaaggagaatatctctcagccaagagggatcgctgtccaccctatggctaaacgcttgttctggacggacaccggtatcaaccctcgtattgagagtagctccttgcaggggctggggcggcttgtgattgctagctccgacctaatatggcccagcggaatcactattgactttctgactgataagttgtattggtgcgatgccaaacaatccgtaatcgagatggccaacctcgacggatcgaagagaaggagattgacccagaatgatgtgggccatccctttgccgtagctgtgtttgaagactatgtctggtttagcgattgggccatgccctccgtgatgcgggtcaataaacgcacagggaaggatcgagtgaggctgcagggaagcatgctgaagccctcttcgctcgtagtggtccatcccctcgccaaaccaggggctgacccttgtctgtatcagaacggaggttgtgagcatatttgcaagaagcgacttggcaccgcctggtgcagctgccgcgagggttttatgaaagccagcgatggcaaaacatgccttgctctcgacggacaccagttactggcggggggtgaagttgacctgaaaaaccaggttacaccgctcgacatcctgagcaagaccagggttagtgaggataatattaccgagtcccagcacatgctcgtcgctgaaatcatggtcagtgatcaggacgactgtgcccctgtgggctgctctatgtacgcccggtgcatctcggaaggagaggacgcgacgtgtcagtgtctgaaggggtttgccggagacggaaagttatgtagcgatatcgacgagtgtgaaatgggggtgccggtgtgtcccccagcctcatcaaagtgcatcaatacagaggggggatacgtgtgtagatgctccgaggggtaccaaggtgatggaattcactgtctcgacatcgatgagtgccaattgggcgagcactcttgcggcgagaatgctagttgcactaataccgaaggtggctacacctgcatgtgcgctggacgtctgtccgagcctgggctcatctgccctgattccactcctccacctcatctgcgggaagacgaccaccactattctgtgcggaatagcgactcagagtgccccttgagtcatgatggctattgtctgcacgacggcgtgtgcatgtacatcgaggcgctcgacaagtacgcctgcaactgtgttgttggatatatcggtgaacgttgtcagtaccgagacctgaaatggtgggaactgcgacacgccgggcatggacagcagcagaaggtgatcgtcgtcgcagtatgcgtcgtggtgcttgtgatgctgctgctgttaagcctctggggcgcacactactatagaacacaaaagctgctctctaaaaatcccaaaaatccttacgaagagagtagtcgtgatgtgaggtcgagaaggcccgccgacaccgaagacggaatgtccagctgtccacaaccttggttcgttgtaataaaggagcaccaggatctgaagaatggcggacagccggtagctggggaggatgggcaggctgcagatggatccatgcagcctacaagctggcggcaagaaccacagctttgtgggatggggaccgaacagggctgttggatccccgtgagctccgacaagggcagttgccctcaggtcatggagagatcattccatatgcccagttatggcactcaaaccttagaagggggggtggagaaaccccactctctcttgagtgccaacccactatggcaacagagggccttggatccaccccatcaaatggagctcacccaatag

SEQ ID NO: 122564 - DNA, 3624 bp, Artificial Sequence
  derived and/or modified sequence
atgctgctgaccctcatcatcctgctgcctgtggtgtccaagttctcctttgtgtccctgagcgccccccagcactggagctgcccagagggcaccctggccggaaatggaaacagcacctgtgtgggccctgcccccttcctgatcttcagccacggcaacagcatcttcagaattgacacagagggcaccaactatgagcagctggtggtggatgctggggtgtctgtcatcatggacttccactacaatgagaagaggatctactgggtggacctggagcggcagctgctgcagagggtcttcctgaatggcagccggcaggagcgggtgtgcaacatcgagaagaatgtgtctggcatggccatcaactggatcaatgaggaggtgatctggagcaaccagcaggagggcatcatcaccgtgacagacatgaagggcaacaacagccacatcctgctgagcgccctgaagtacccagccaacgtggccgtggaccctgtggagcgcttcatcttctggagcagcgaggtggccggcagcctgtacagagctgacctggatggagtgggcgtgaaggccctgctggagaccagcgagaagatcacagctgtgtccctggatgtgctggacaagaggctcttctggatccagtacaaccgggagggcagcaacagcctcatctgcagctgtgactatgatggcggctctgtgcacatcagcaagcaccccacccagcacaacctgtttgccatgagcctgtttggagaccgcatcttctacagcacctggaagatgaagaccatctggatcgccaacaagcacacaggcaaggacatggtgcgcatcaacctgcacagcagctttgtgcccctgggggagctgaaggtggtgcaccccctggcccagcccaaggcagaagatgacacctgggagcctgagcagaagctgtgcaagctgaggaagggcaactgcagcagcacagtgtgtggccaggacctgcagagccacctgtgcatgtgtgccgagggctacgccctgagccgggacaggaagtactgtgaagatgtgaatgaatgtgccttctggaaccacggctgcaccctgggctgcaagaacaccccaggcagctactactgcacctgccctgtgggctttgtgctgctgcctgatggcaagcgctgccaccagctggtgtcctgccccagaaatgtgtctgaatgttctcatgactgtgtgctgaccagcgagggccccctgtgcttctgcccagagggctctgtgctggagagagatggcaagacctgcagcggctgcagcagcccagacaatggaggctgcagccagctgtgtgtgcccctgagccctgtgtcctgggagtgtgactgcttccctggctatgacctgcagctggatgagaagagctgtgccgccagcggcccccagcccttcctgctgtttgccaacagccaggacatccgccacatgcactttgatggaacagattatggcaccctgctgagccagcagatgggcatggtgtatgccctggaccatgaccctgtggagaacaagatctactttgcccacacagccctgaagtggattgaaagagccaacatggatggcagccagcgggagcggctcatcgaggagggcgtggatgtgcctgagggcctggccgtggactggattggaagacgcttctactggacagaccggggcaagagcctgattggccgcagtgacctgaatggcaagaggagcaagatcatcaccaaggagaacatcagccagccccggggcattgctgtgcaccccatggccaagaggctcttctggacagacaccggcatcaaccccagaattgagagcagcagcctgcagggcctgggccgcctggtgattgccagcagtgacctgatctggcccagcggcatcaccatcgacttcctgacagacaagctgtactggtgtgatgccaagcagagcgtcatcgagatggccaacctggatggcagcaagagaagaaggctgacccagaatgatgtgggccacccctttgctgtggccgtgtttgaggactatgtgtggttcagtgactgggccatgcccagcgtgatgagggtgaacaagaggacaggcaaggacagagtgcggctgcagggctccatgctgaagcccagcagcctggtggtggtgcaccccctggccaagccaggagctgacccctgcctgtaccagaatggaggctgtgagcacatctgcaagaagaggctgggcacagcctggtgcagctgccgggagggcttcatgaaggccagtgatggcaagacctgcctggccctggatggccaccagctgctggccggcggggaggtggacctgaagaaccaggtgacccccctggacatcctgagcaagaccagggtgtctgaggacaacatcacagagagccagcacatgctggtggccgagatcatggtgtctgaccaggatgactgtgcccctgtgggctgcagcatgtatgcccgctgcatcagtgaaggagaagatgccacctgccagtgcctgaagggctttgctggagatggcaagctgtgcagcgacattgatgaatgtgagatgggcgtgcctgtgtgccccccagccagcagcaagtgcatcaacacagaaggaggctacgtgtgccgctgcagcgagggctaccagggagatggcatccactgcctggacattgatgagtgccagctgggggagcacagctgtggagaaaatgccagctgcaccaacacagagggcggctacacctgcatgtgtgccggccgcctgtctgagcccggcctcatctgcccagacagcaccccaccaccccacctgcgggaggatgaccaccactacagcgtgaggaacagcgacagtgaatgtcccctgagccatgatggctactgcctgcatgatggagtgtgcatgtacatcgaggccctggacaagtatgcctgcaactgtgtggtgggctacatcggggagcgctgccagtacagagacctgaagtggtgggagctgcggcatgctggccacggccagcagcagaaggtgattgtggtggccgtgtgtgtggtggtgctggtgatgctgctgctgctgagcctgtggggcgcccactactaccgcacccagaagctgctgagcaagaaccccaagaacccctatgaggagagcagcagagatgtgcgcagcagaagacctgctgacacagaagatggcatgagcagctgcccccagccctggtttgtggtgatcaaggagcaccaggacctgaagaatggaggccagcctgtggccggagaagatggccaggccgcagatggctccatgcagcccacctcctggaggcaggagccccagctgtgtggcatgggcacagagcagggctgctggatccctgtgtccagtgacaagggcagctgcccccaggtgatggagaggagcttccacatgcccagctatggcacccagaccctggagggcggcgtggagaagccccacagcctgctgagcgccaaccccctgtggcagcagagggccctggaccccccccaccagatggagctgacccagtag

SEQ ID NO: 122565 - DNA, 3624 bp, Artificial Sequence
  derived and/or modified sequence
atgctgctgaccctgatcatcctgctgcccgtggtgagcaagttcagtttcgtgagtctcagtgcccctcagcactggagctgtcctgaaggaacacttgccggtaacggaaattccacgtgcgtaggccccgcccccttcctcatcttcagtcatggaaactcgatattccgcatcgacaccgagggaaccaattacgagcaactggttgtggacgccggggtttcagtaataatggactttcactataatgagaagcgaatctactgggttgatctggagaggcagctcttacagagagtattccttaatggctcacgccaggagagagtgtgcaatatcgagaagaatgtaagcggaatggcgatcaattggattaacgaggaagtcatctggtcaaaccagcaggagggcattataacagtgacagatatgaaggggaacaattcacatatcctgctgagcgccctcaaatatcctgccaatgtcgccgttgatccagttgaacggttcatcttctggtcctctgaagtggccggttccctgtatcgcgccgaccttgatggtgtcggcgtgaaggcgctgctggagacttctgagaagattaccgccgtgtcgctagacgtcttggacaagcgcttattttggatccagtacaatagagaagggagtaacagcctcatctgtagttgtgattacgatggtggatccgtccatatttctaagcatccaacgcagcacaacctctttgcaatgtcactctttggggaccggattttttatagtacgtggaagatgaaaacaatttggatagctaacaagcacactggtaaggacatggtccggatcaacctgcacagctcctttgtgccactgggggaactgaaggtggtgcatcccttagcccagcctaaagcagaggacgacacctgggagcctgaacagaaactgtgtaagctaagaaaagggaactgcagctccaccgtttgtggccaggacctgcagagtcacctgtgcatgtgtgccgaaggctatgctctgtcaagggataggaaatactgtgaggatgtgaatgaatgcgccttctggaatcacggatgcacgctgggctgcaaaaacacacccggaagctactattgcacctgcccggtgggattcgtgctgctgccagacggaaagagatgccatcagctcgtgtcatgcccccgcaatgtctcagaatgttctcacgattgcgtgctgacatctgagggtccgttgtgcttttgcccagaaggctccgttctggagcgcgacggaaagacttgcagtggatgcagctcccctgacaacggcggctgttcccagctttgcgtgcctctgtcgccagtctcatgggagtgcgattgctttccaggatacgaccttcaactggatgagaaaagttgtgctgccagcggaccgcagcccttcctgctctttgcaaactctcaggatatccgccatatgcactttgacggtactgactatgggacactgctgtctcagcagatggggatggtctatgcactcgaccatgacccagtggagaacaaaatctattttgcccatacggctctcaagtggatcgaaagagcaaatatggatggctcacaacgagagaggctgatcgaggaaggggtggacgtacccgagggactagccgttgattggatcggccgtagattttattggacagatcgcgggaagtcactgatcggccgaagcgatctgaatgggaaacgttccaaaatcatcactaaagagaacatctcccagcctcgtggcatagcagtgcatcccatggccaagaggctgttttggacggacaccggcataaacccgcgcattgaaagttcctcactgcagggcctaggtcggctggtaatcgcaagttccgatctaatttggcctagtggcataacaatagactttctgacagataagctctattggtgtgatgctaagcagagcgtaatagagatggctaatctggatggcagcaagaggcgacgccttacccagaatgacgtggggcatccgttcgccgttgccgtgttcgaggattacgtctggttttctgactgggcaatgccctctgtgatgcgggtgaacaagcgaacggggaaagatcgagtgcgtctgcaggggtcaatgctcaaaccgtcatcactggtcgtcgttcacccacttgccaagcctggcgctgatccttgcctgtatcagaatggcggttgtgagcatatctgtaagaagcgccttggaaccgcctggtgcagctgcagagaggggttcatgaaggcttctgacggcaaaacctgcctcgccctcgatggtcaccagctgctagctgggggagaggtggacctgaagaaccaggttacgccattagacatcctgagcaaaacccgggtgtcagaagacaacataaccgagagccaacacatgcttgtagccgagattatggtttctgatcaggatgattgtgcacctgtgggatgcagcatgtatgcacgatgtatcagcgaaggtgaagacgcaacctgccagtgcctgaaggggtttgccggcgacggaaagttgtgttccgacatcgacgaatgcgagatgggcgttcccgtttgcccccccgcttccagtaagtgtattaataccgaagggggttacgtctgccggtgctctgaaggataccaaggggatggaatccattgcctggacatcgacgaatgtcagcttggtgaacactcatgcggcgagaatgcttcctgtacgaataccgaaggcggctacacctgcatgtgtgccggacgcttgagtgagcccggtcttatctgcccggacagtacaccccctccacacctgcgggaagacgatcatcactactcggttagaaactctgacagcgaatgccccttgtcacacgatggctattgccttcatgacggcgtttgcatgtatatcgaagcgctagacaaatacgcctgcaactgtgtggtaggatacattggcgagcgatgccagtaccgagacctcaagtggtgggaactcagacacgcgggccacggacagcagcaaaaggtgattgtggtagctgtgtgcgtggttgtcttggtcatgcttctgcttctcagtctatggggtgcccactactaccggacccagaaactcctatccaagaaccccaaaaatccctatgaggaatcatctcgggatgtgcggagcaggcggccggcagacaccgaagacggaatgagctcctgtccccagccttggtttgtggtgatcaaagaacatcaggatctgaagaatggcggccaacccgtggccggggaggacggacaggctgccgatggatcgatgcagcctacaagctggcggcaagaaccacagttgtgtggcatgggtaccgagcaaggctgctggatacctgtctcctctgacaagggcagttgcccgcaggttatggagagatccttccacatgccctcctacgggacgcagaccctggaaggcggagttgagaagccccacagcctgttgtcagccaatcctctgtggcagcagagggccctggatccaccacatcagatggaactaactcagtag

SEQ ID NO: 122566 - DNA, 3624 bp, Artificial Sequence
  derived and/or modified sequence
atgcttttaactttgattatcctcctccccgtagtgagcaagttctcattcgtgtccctcagtgctccacagcattggtcatgtcctgaaggaacactggcaggcaacggcaacagcacatgtgtcgggcctgccccattccttatctttagccacggcaacagcatcttcagaatagacaccgaagggaccaactacgagcagctggtcgtcgacgcaggggtgagcgtgattatggattttcactataatgaaaaacgaatttattgggtggatctcgagagacagctgctccagagggtcttcctgaatggtagtcggcaggaacgagtctgtaatatcgagaaaaatgtgtctggcatggcaattaattggattaatgaggaagtgatttggagcaatcagcaggaagggattattaccgtgactgacatgaaagggaacaacagccacattcttctgagtgccctgaagtaccctgcgaatgtagccgttgaccccgttgagcgcttcatcttttggagctccgaagttgcgggtagcttataccgggctgatctagacggcgtgggagttaaagctttgctggagacgtctgaaaaaattaccgccgtatctttggacgtgctggataagaggttgttttggattcagtacaaccgggagggcagcaacagtctgatttgtagttgcgactacgatggcggaagtgtgcatatcagcaaacatccaacacaacacaacctgtttgccatgtcactctttggtgacagaatcttttactccacgtggaagatgaaaacaatttggatcgccaacaagcataccggcaaggatatggtaagaattaatctgcactcctcctttgtgccactaggcgagctgaaagtggttcacccactggcgcagcctaaagctgaggacgatacatgggagccagagcagaagctgtgcaaactgagaaaaggtaattgttcctccacagtgtgtggccaggacctccagtcccacctttgtatgtgcgccgaaggttacgccttaagccgtgataggaagtattgtgaagatgtcaacgaatgcgctttctggaatcacggctgtacattggggtgcaagaacactcccggttcctattattgtacctgccctgttggctttgttctgttgccggatggtaagcggtgccaccagctggtgagttgccctcggaacgtctcggagtgctctcacgactgcgtgctgaccagcgaaggtcctctgtgtttttgccctgaggggagcgtgcttgagagggacggaaagacatgctccggatgtagctcccccgataacggcggttgctcacagctctgcgtgcccctgtctcctgtttcctgggaatgtgactgttttccagggtatgatctccagctggatgagaagtcgtgcgctgcctcggggcctcaaccttttttactgtttgccaattcccaggatatccgtcacatgcattttgatggaactgactacggcacactgttaagccagcaaatgggcatggtctacgccctggaccacgacccggtggaaaacaaaatctattttgcgcacacagctctcaagtggatcgagcgcgctaacatggacggctcgcaaagggaacggctgatcgaagaaggtgtggacgtgcctgaagggcttgcagtcgattggataggcaggagattctactggaccgaccggggtaaaagcctcattggtcgcagtgatctgaacggaaaacgctctaaaattattacaaaggagaatatatctcagcctagaggtattgccgtccacccaatggccaagagattgttctggacagatacggggatcaacccccgaatcgagtcctcatcactccagggtctaggcaggctggttatcgccagctcagacctgatctggcctagtggcatcactattgacttcctgacagacaagttgtattggtgtgatgctaagcagtctgttattgaaatggcaaacttggatggctctaagaggagaagattgacccagaacgatgtgggacacccatttgccgttgctgtgttcgaggattatgtctggtttagtgattgggccatgccgagtgttatgagagtgaataaaagaaccggtaaagatagggttcgcctgcaagggtccatgctcaaaccatcatccctagttgtggtacaccctctagccaagccgggagcagatccctgcttgtaccagaacggaggatgcgagcacatctgtaagaagagattggggacagcatggtgctcctgtagagagggcttcatgaaagccagcgatggtaagacttgcttagccctggacgggcaccagcttctagccggaggagaagtcgacctgaaaaaccaggttacgcccctagacatactatccaaaactcgggtgagcgaagataacataacggaatcgcaacatatgctagtggctgaaattatggtcagtgaccaggatgattgcgccccagttgggtgctcaatgtacgccaggtgcataagcgagggggaagatgccacttgccagtgcctgaaaggcttcgctggagatgggaagctgtgttctgacattgacgaatgcgagatgggtgtgcccgtttgtccacccgctagctctaagtgtattaacaccgaggggggttatgtgtgtagatgcagcgaagggtatcaaggggacggtatacactgcctggacatagacgaatgccagctaggggagcacagttgtggcgaaaatgcatcctgcacaaatacagaaggcggttacacttgcatgtgtgcaggccgattgagcgaaccaggtttgatctgccctgactcaactcccccaccccatctccgtgaggatgaccaccactattcagtgagaaatagcgattctgagtgcccgttgtcccatgatggctattgtctgcacgacggagtatgcatgtacattgaggcattagataaatatgcctgtaactgcgtcgtgggctacattggcgaacggtgccaatatagggatctgaagtggtgggaactaaggcatgccggtcatggacagcagcaaaaagtgatagttgtcgctgtgtgcgtggtggtactggtgatgctgctgctgctgagtctctggggtgcacattattaccgcacccagaaactcctctctaagaatccaaaaaatccttatgaagaaagcagtagggatgtccggtcccgccgaccggctgacaccgaggacggtatgtccagctgccctcaaccgtggttcgtcgtgataaaggagcaccaggatcttaagaatggaggacagcctgtggcaggggaggatggacaggccgcagacggttctatgcagcctactagctggcgccaagagccccaactttgtggtatgggaaccgagcagggttgttggattcctgtcagttccgacaaaggctcttgcccacaggttatggagcgcagctttcacatgccctcctacggcacccagacattagagggcggtgtggaaaaacctcactctttgctgtctgctaatccgctgtggcaacagcgagcactcgatcctcctcaccagatggagctgacccagtag

SEQ ID NO: 122567 - protein, 543 aa, Artificial Sequence
  derived and/or modified sequence
MAAAKAEMQLMSPLQISDPFGSFPHSPTMDNYPKLEEMMLLSNGAPQFLGAAGAPEGSGSNSSSSSSGGGGGGGGGSNSSSSSSTFNPQADTGEQPYEHLTAESFPDISLNNEKVLVETSYPSQTTRLPPITYTGRFSLEPAPNSGNTLWPEPLFSLVSGLVSMTNPPASSSSAPSPAASSASASQSPPLSCAVPSNDSSPIYSAAPTFPTPNTDIFPEPQSQAFPGSAGTALQYPPPAYPAAKGGFQVPMIPDYLFPQQQGDLGLGTPDQKPFQGLESRTQQPSLTPLSTIKAFATQSGSQDLKALNTSYQSQLIKPSRMRKYPNRPSKTPPHERPYACPVESCDRRFSRSDELTRHIRIHTGQKPFQCRICMRNFSRSDHLTTHIRTHTGEKPFACDICGRKFARSDERKRHTKIHLRQKDKKADKSVVASSATSSLSSYPSPVATSYPSPVTTSYPSPATTSYPSPVPTSFSSPGSSTYPSPVHSGFPSPSVATTYSSVPPAFPAQVSSFPSSAVTNSFSASTGLSDMTATFSPRTIEIC

SEQ ID NO: 122568 - protein, 200 aa, Artificial Sequence
  derived and/or modified sequence
MAAAKAEMQLMSPLQISDPFGSFPHSPTMDNYPKLEEMMLLSNGAPQFLGAAGAPEGSGSNSSSSSSGGGGGGGGGSNSSSSSSTFNPQADTGEQPYEHLTAESFPDISLNNEKVLVETSYPSQTTRLPPITYTGRFSLEPAPNSGFPSPSVATTYSSVPPAFPAQVSSFPSSAVTNSFSASTGLSDMTATFSPRTIEIC

SEQ ID NO: 122569 - protein, 232 aa, Artificial Sequence
  derived and/or modified sequence
MAAAKAEMQLMSPLQISDPFGSFPHSPTMDNYPKLEEMMLLSNGAPQFLGAAGAPEGSGSNSSSSSSGGGGGGGGGSNSSSSSSTFNPQADTGEQPYEHLTAESFPDISLNNEKVLVETSYPSQTTRLPPITYTGRFSLEPAPNSGNTLWPEPLFSLVSGLVSMTNPPASSSSAPSPAASSASASQSPPLSCAVPSNDSSPIYSAAPTFPTPNTDIFPETAMSKFFTSIQRT

SEQ ID NO: 122570 - DNA, 3136 bp, Artificial Sequence
  derived and/or modified sequence
gcgcagaacttggggagccgccgccgccatccgccgccgcagccagcttccgccgccgcaggaccggcccctgccccagcctccgcagccgcggcgcgtccacgcccgcccgcgcccagggcgagtcggggtcgccgcctgcacgcttctcagtgttccccgcgccccgcatgtaacccggccaggcccccgcaactgtgtcccctgcagctccagccccgggctgcacccccccgccccgacaccagctctccagcctgctcgtccaggatggccgcggccaaggccgagatgcagctgatgtccccgctgcagatctctgacccgttcggatcctttcctcactcgcccaccatggacaactaccctaagctggaggagatgatgctgctgagcaacggggctccccagttcctcggcgccgccggggccccagagggcagcggcagcaacagcagcagcagcagcagcgggggcggtggaggcggcgggggcggcagcaacagcagcagcagcagcagcaccttcaaccctcaggcggacacgggcgagcagccctacgagcacctgaccgcagagtcttttcctgacatctctctgaacaacgagaaggtgctggtggagaccagttaccccagccaaaccactcgactgccccccatcacctatactggccgcttttccctggagcctgcacccaacagtggcaacaccttgtggcccgagcccctcttcagcttggtcagtggcctagtgagcatgaccaacccaccggcctcctcgtcctcagcaccatctccagcggcctcctccgcctccgcctcccagagcccacccctgagctgcgcagtgccatccaacgacagcagtcccatttactcagcggcacccaccttccccacgccgaacactgacattttccctgagccacaaagccaggccttcccgggctcggcagggacagcgctccagtacccgcctcctgcctaccctgccgccaagggtggcttccaggttcccatgatccccgactacctgtttccacagcagcagggggatctgggcctgggcaccccagaccagaagcccttccagggcctggagagccgcacccagcagccttcgctaacccctctgtctactattaaggcctttgccactcagtcgggctcccaggacctgaaggccctcaataccagctaccagtcccagctcatcaaacccagccgcatgcgcaagtaccccaaccggcccagcaagacgcccccccacgaacgcccttacgcttgcccagtggagtcctgtgatcgccgcttctcccgctccgacgagctcacccgccacatccgcatccacacaggccagaagcccttccagtgccgcatctgcatgcgcaacttcagccgcagcgaccacctcaccacccacatccgcacccacacaggcgaaaagcccttcgcctgcgacatctgtggaagaaagtttgccaggagcgatgaacgcaagaggcataccaagatccacttgcggcagaaggacaagaaagcagacaaaagtgttgtggcctcttcggccacctcctctctctcttcctacccgtccccggttgctacctcttacccgtccccggttactacctcttatccatccccggccaccacctcatacccatcccctgtgcccacctccttctcctctcccggctcctcgacctacccatcccctgtgcacagtggcttcccctccccgtcggtggccaccacgtactcctctgttccccctgctttcccggcccaggtcagcagcttcccttcctcagctgtcaccaactccttcagcgcctccacagggctttcggacatgacagcaaccttttctcccaggacaattgaaatttgctaaagggaaaggggaaagaaagggaaaagggagaaaaagaaacacaagagacttaaaggacaggaggaggagatggccataggagaggagggttcctcttaggtcagatggaggttctcagagccaagtcctccctctctactggagtggaaggtctattggccaacaatcctttctgcccacttccccttccccaattactattccctttgacttcagctgcctgaaacagccatgtccaagttcttcacctctatccaaagaacttgatttgcatggattttggataaatcatttcagtatcatctccatcatatgcctgaccccttgctcccttcaatgctagaaaatcgagttggcaaaatggggtttgggcccctcagagccctgccctgcacccttgtacagtgtctgtgccatggatttcgtttttcttggggtactcttgatgtgaagataatttgcatattctattgtattatttggagttaggtcctcacttgggggaaaaaaaaaaaagaaaagccaagcaaaccaatggtgatcctctattttgtgatgatgctgtgacaataagtttgaacctttttttttgaaacagcagtcccagtattctcagagcatgtgtcagagtgttgttccgttaacctttttgtaaatactgcttgaccgtactctcacatgtggcaaaatatggtttggtttttctttttttttttttttgaaagtgttttttcttcgtccttttggtttaaaaagtttcacgtcttggtgccttttgtgtgatgcgccttgctgatggcttgacatgtgcaattgtgagggacatgctcacctctagccttaaggggggcagggagtgatgatttgggggaggctttgggagcaaaataaggaagagggctgagctgagcttcggttctccagaatgtaagaaaacaaaatctaaaacaaaatctgaactctcaaaagtctatttttttaactgaaaatgtaaatttataaatatattcaggagttggaatgttgtagttacctactgagtaggcggcgatttttgtatgttatgaacatgcagttcattattttgtggttctattttactttgtacttgtgtttgcttaaacaaagtgactgtttggcttataaacacattgaatgcgctttattgcccatgggatatgtggtgtatatccttccaaaaaattaaaacgaaaataaagtagctgcgattggg

SEQ ID NO: 122571 - DNA, 1632 bp, Artificial Sequence
  derived and/or modified sequence
atggctgccgcaaaagccgagatgcagcttatgagtcctctgcagatctccgatcccttcgggtctttcccacactctcccacaatggacaattacccaaaactcgaggaaatgatgctccttagcaatggcgcaccccagttcttgggcgctgctggcgcaccagaaggcagcggctccaatagttcttccagctcatctgggggtgggggcggcggaggcggcgggtccaatagcagtagtagcagctcaacattcaatccccaagcggacaccggggagcagccctacgaacacttgacagctgagtccttcccagatataagcctgaacaacgagaaagtccttgtggaaactagctacccatcccagacgacacgactgccgcccatcacctatacgggcagattctctctagagcccgctcctaacagtggtaataccctctggcctgaaccacttttctcactcgtgagcgggctcgtgagcatgacaaatcctcctgcttccagcagctccgcccctagtcccgccgcctcttccgcttcagcttcgcaaagtccaccattaagttgtgcagttccgagcaatgattctagcccaatttattcagcggcccctacgttccctactcctaacacagacatcttcccggagccccagtcacaagctttccctggttcagcaggaaccgctctgcagtatcctccacccgcttatcctgccgctaaagggggatttcaggtgcctatgatcccagattatctgttccctcaacaacaaggcgacttaggcttgggaacacccgatcaaaaaccgttccagggtctggagagccgcacccagcagccctctcttactcctttgagtactataaaagctttcgccacccagagtgggagtcaggatttgaaagccctgaacacgagttatcagtctcagctgatcaagccgtctcgtatgcggaagtacccgaataggcctagtaaaacacctccgcatgagagaccatacgcttgccccgtggaatcctgtgaccggcggtttagcaggagcgacgagcttactagacacatccggatccatacggggcagaagccctttcaatgtagaatttgtatgcggaattttagccgcagcgatcatctgaccacacacattcggacccacaccggagagaagcctttcgcctgtgatatttgcgggcggaaattcgcccgtagtgatgagagaaaaagacacaccaagatccatctaaggcagaaggataaaaaggcagacaaatcagtggtcgcgtcatcggctacgtccagtctctcaagctatccaagccccgtggcgacctcatatccaagtcccgtgaccacttcctatccaagtccagccaccacctcttatcccagccccgtacctacttcattctcctcccctggatcaagtacgtaccccagccccgtccactccggttttccctccccatctgttgcaaccacatatagttccgtgcccccagccttcccggcacaagtgagttcttttccttccagtgctgttacaaatagcttttctgcaagtaccggcctgtccgacatgactgccacatttagccctcggacaatcgaaatatgttag

SEQ ID NO: 122572 - DNA, 603 bp, Artificial Sequence
  derived and/or modified sequence
atggcggccgcaaaggcagagatgcaactgatgagccccttacagatcagtgacccattcggctcctttccccactctcccaccatggacaactatcctaagttagaggagatgatgttactgtctaatggcgcaccgcagttcctcggcgccgcaggagccccggaaggtagtggcagtaattctagctcttctagttccggaggtggtggtggcggggggggagggagcaactcatcttcttcctcatctacgtttaaccctcaggctgacaccggggaacagccttacgaacatctcacagccgagtcctttcccgacattagtctgaacaacgaaaaggtgctcgtggaaaccagttatcccagtcagacgacccgacttcctcctatcacgtacaccggacggttcagcctcgaaccagcgcccaattcaggcttcccctctccatcagtggccactacctattctagcgtgcccccagcgttcccagcacaggtttccagcttcccttcgagcgccgtgaccaactccttcagtgcatctactggcctatcagatatgacggcaacattttctccccggacaatagagatttgctag

SEQ ID NO: 122573 - DNA, 699 bp, Artificial Sequence
  derived and/or modified sequence
atggctgctgctaaggccgagatgcaactgatgtctcccctgcagatctctgacccattcggatctttcccgcacagcccaacgatggacaactacccaaaacttgaagagatgatgctgttgagtaacggggcgccccagtttcttggtgcggccggtgcaccagagggcagcggctccaactcttccagtagtagttccggtggcggtggaggcggcggaggcgggtcgaactcctccagtagctccagtacttttaacccccaggccgacaccggcgaacagccttacgaacacctaaccgcggaaagcttccctgacatctccctcaacaacgaaaaggtcttagtggagacatcataccctagccagaccactcgactgccgccgatcacatacacaggaagattttcgctcgaaccggctcccaattcgggcaacacactctggcctgagccactgttttctctcgtttctgggctggtaagtatgaccaaccctcctgcgtcttcctcctctgcaccctcaccagccgctagttctgcctccgcatcccagtcccctcccttgtcttgcgccgtccccagcaatgacagcagtccaatctactccgctgcccccacttttccaacccctaacacagacatctttcccgagactgctatgtcaaaattctttacatcgattcagcgcacgtag

SEQ ID NO: 122574 - DNA, 1632 bp, Artificial Sequence
  derived and/or modified sequence
atggctgctgccaaggccgagatgcagctgatgagccccctgcagatcagtgaccccttcggcagcttcccccacagccccaccatggacaactaccccaagctggaggagatgatgctgctgagcaatggagccccccagttcctgggcgccgccggggcccctgagggcagcggcagcaacagcagcagcagcagcagcggcggcggcggcggcggcggcggcggcagcaacagcagcagcagcagcagcaccttcaacccccaggccgacaccggggagcagccctatgagcacctgacagctgagagcttcccagacatcagcctgaacaatgagaaggtgctggtggagaccagctaccccagccagaccacccggctgccccccatcacctacacaggccgcttcagcctggagcccgcccccaacagcggcaacaccctgtggccagagcccctcttcagcctggtgtctggcctggtgtccatgaccaaccccccagccagcagcagcagcgcccccagccctgctgccagcagcgccagcgccagccagagcccccccctgagctgtgctgtgcccagcaatgacagcagccccatctacagcgctgcccccaccttccccacccccaacacagacatcttccctgagccccagagccaggccttccctggcagcgctggaacagccctgcagtacccacctccagcctacccagctgccaagggcggcttccaggtgcccatgatcccagactacctgttcccccagcagcagggcgacctgggcctgggcaccccagaccagaagcccttccagggcctggagagcaggacccagcagcccagcctgacccccctgagcaccatcaaggcctttgccacccagagcggcagccaggacctgaaggccctgaacaccagctaccagagccagctgatcaagcccagcaggatgaggaagtaccccaaccggcccagcaagaccccacctcatgagcggccctatgcctgccctgtggagagctgtgaccggcgcttcagcagaagtgatgagctgaccaggcacatccgcatccacacaggccagaagcccttccagtgccgcatctgcatgaggaacttcagcagaagtgaccacctgaccacccacatccgcacccacactggagagaagccctttgcctgtgacatctgtggcaggaagtttgcccggagtgatgagaggaagaggcacaccaagatccacctgcggcagaaggacaagaaggctgacaagtctgtggtggccagcagcgccaccagcagcctgagcagctaccccagccctgtggccaccagctaccccagccctgtgaccaccagctaccccagccctgccaccaccagctaccccagccctgtgcccaccagcttcagcagccctggcagcagcacctaccccagccctgtgcacagcggcttccccagccccagcgtggccaccacctacagctctgtgcccccagccttccctgcccaggtgagcagcttccccagcagcgctgtgaccaacagcttcagcgccagcacaggcctgagtgacatgacagccaccttcagccccaggaccatcgagatctgctag

SEQ ID NO: 122575 - DNA, 603 bp, Artificial Sequence
  derived and/or modified sequence
atggctgctgccaaggccgagatgcagctgatgagccccctgcagatcagtgaccccttcggcagcttcccccacagccccaccatggacaactaccccaagctggaggagatgatgctgctgagcaatggagccccccagttcctgggcgccgccggggcccctgagggcagcggcagcaacagcagcagcagcagcagcggcggcggcggcggcggcggcggcggcagcaacagcagcagcagcagcagcaccttcaacccccaggccgacaccggggagcagccctatgagcacctgacagctgagagcttcccagacatcagcctgaacaatgagaaggtgctggtggagaccagctaccccagccagaccacccggctgccccccatcacctacacaggccgcttcagcctggagcccgcccccaacagcggcttccccagccccagcgtggccaccacctacagctctgtgcccccagccttccctgcccaggtgtcctccttccccagcagcgctgtgaccaacagcttcagcgccagcacaggcctgagtgacatgacagccaccttcagccccaggaccatcgagatctgctag

SEQ ID NO: 122576 - DNA, 699 bp, Artificial Sequence
  derived and/or modified sequence
atggctgctgccaaggccgagatgcagctgatgagccccctgcagatcagtgaccccttcggcagcttcccccacagccccaccatggacaactaccccaagctggaggagatgatgctgctgagcaatggagccccccagttcctgggcgccgccggggcccctgagggcagcggcagcaacagcagcagcagcagcagcggcggcggcggcggcggcggcggcggcagcaacagcagcagcagcagcagcaccttcaacccccaggccgacaccggggagcagccctatgagcacctgacagctgagagcttcccagacatcagcctgaacaatgagaaggtgctggtggagaccagctaccccagccagaccacccggctgccccccatcacctacacaggccgcttcagcctggagcccgcccccaacagcggcaacaccctgtggccagagcccctcttcagcctggtgtctggcctggtgtccatgaccaaccccccagccagcagcagcagcgcccccagccctgctgccagcagcgccagcgccagccagagcccccccctgagctgtgctgtgcccagcaatgacagcagccccatctacagcgctgcccccaccttccccacccccaacacagacatcttccctgagacagccatgagcaagttcttcaccagcatccagaggacatag

SEQ ID NO: 122577 - DNA, 1632 bp, Artificial Sequence
  derived and/or modified sequence
atggccgccgccaaggccgagatgcagctgatgagccccctgcagatcagcgaccccttcggaagctttccccattcaccaaccatggataattaccccaaactcgaggaaatgatgctcctaagcaacggggccccccagttcttgggggctgctggagccccagaaggatccggaagcaattccagctctagcagcagcggagggggtggcggcggaggcggcgggagcaactcttcaagctctagtagcacattcaacccccaggctgacacgggcgagcaaccatatgagcatttgacagccgaaagcttcccagatataagcctcaataacgagaaagttctcgtggagacatcgtatccgtctcaaaccacgaggcttcccccgatcacatatactggcaggttttcattagagcccgctccaaatagcgggaacacgctttggccagaacctctattcagcttggtttctgggctggtgtcaatgacgaatccgcctgccagctcttccagcgcgccgtcacctgccgcttcatcggcttctgcctcccaatcacctcccttatcttgtgctgtgccatctaatgactcctctccgatttactccgccgctccgacgttccctaccccaaatactgatattttccccgagccacaaagtcaagcatttcctggcagcgcgggcaccgcactacagtatcccccccccgcgtacccagcagcgaagggcggctttcaagtgccaatgatccccgactatctgttcccgcagcagcagggggaccttggcctgggtacacccgatcagaagccattccaggggttggaatcaaggactcagcagcctagcctgacccccctgtctacaatcaaagcgttcgccactcagagcggttctcaagatttaaaggctctgaacacttcatatcaatctcagctgatcaagccctcaaggatgaggaagtatccaaatcggccaagcaagactcctccccacgaacgaccctatgcctgtcctgttgagtcctgtgaccggcgttttagtcgttccgatgaactaacgagacatatcaggattcataccggacaaaagcctttccaatgcagaatttgcatgcggaatttctctcgatctgatcatcttacaacgcacataagaactcatactggagagaagcctttcgcgtgcgacatctgcgggcgcaaattcgcccggtctgatgagagaaagcggcacaccaagatccatctgcggcagaaggataagaaggccgacaagtcagttgttgctagttccgctacttcttcactatccagttacccctctcccgtcgccacaagctatccatcccccgttaccacctcttatccaagtcccgccacaacatcttaccctagtcccgtccctacctcgtttagtagccctgggtctagcacatacccatctccagttcactccggattcccatcaccgtcagtggccactacatactcctctgtcccgcccgcctttcccgctcaagttagttcctttccaagcagtgctgtcaccaatagcttcagcgcttctactggactgagcgacatgacagccacatttagcccgagaacaatcgaaatctgctag

SEQ ID NO: 122578 - DNA, 603 bp, Artificial Sequence
  derived and/or modified sequence
atggccgccgccaaggccgagatgcagctgatgagccccctgcagatttccgacccattcggaagtttcccccactcccccaccatggataactatcctaagctggaagagatgatgctactctccaatggcgccccacagtttcttggggcagcaggcgcccccgaaggaagcggatcaaattcaagttcatcctccagcggaggcgggggaggtggaggcggagggtcaaattcctcctccagctcatcaactttcaacccccaggctgacacgggcgagcagccttacgaacacctgacagccgagagcttccccgacattagcctcaataatgagaaggtgctagttgaaaccagttatcctagccagacaacgcgtctgccacctattacctataccgggcggttttcactagagcccgcgcctaatagtgggtttcctagtccaagtgtcgccacaacttatagttccgtgcctcccgccttccctgcacaggtgagcagctttccctctagcgctgtgaccaactccttttcggcatcaaccggtctgagtgacatgactgccacattcagtcccaggaccattgagatttgctag

SEQ ID NO: 122579 - DNA, 699 bp, Artificial Sequence
  derived and/or modified sequence
atggccgccgccaaggccgagatgcagctgatgagccccctgcagatctcagatcctttcgggagctttcctcactcacccactatggacaactacccgaaattggaagaaatgatgttactaagcaacggcgccccccagtttctgggcgctgccggggcccccgagggtagcggatctaactcctcatcatcaagctcaggaggaggcggaggggggggcggaggctctaattcctcttcatcctcttcaacctttaaccctcaggccgatacaggtgagcagccttatgaacacctcaccgctgagtcattcccggacatcagcctgaataatgaaaaggttttggtcgagacctcctatcctagccagaccacgcggcttccgcccattacctatacaggaagatttagcctggagccggctcctaattccggcaacacactgtggccagaacctttgttctccctcgttagtggcttggtgagcatgaccaacccacccgctagcagttcgagcgctccaagtccagcagcctcttcggcctctgcatcccagtctccgcctctgagctgtgctgtgcccagtaatgattcttctcccatctactcagccgctccgacctttccaacccccaatacggatatctttcctgagactgcaatgagtaagttctttacttccatccagcggacctag

SEQ ID NO: 122580 - DNA, 1632 bp, Artificial Sequence
  derived and/or modified sequence
atggcagccgctaaagccgagatgcagcttatgtccccccttcagatctctgatccattcggatctttcccccactccccaacaatggacaattacccaaagctcgaggaaatgatgctgctgagtaatggcgctccccagtttctgggcgcagcgggtgccccagagggtagcggaagtaactcaagttccagttcttctggcggaggcggaggaggaggcggagggagtaatagtagttcctcttcgagcacatttaaccctcaggcagacaccggagaacagccttacgaacatctgactgcagagagttttcctgacatctccctgaacaatgagaaggtgctagttgagacgtcctacccctcccagacaacgaggctcccccctatcacctataccggaaggttctcgcttgagccggcacctaactcgggtaacactctgtggcctgaacccttattctcactggtttctggacttgtaagcatgacgaaccccccagcaagcagtagttccgctccctccccagcagcctcatcggcatccgcatctcagtcccctcctctcagctgcgcagttccctcgaatgatagcagccctatttatagcgcagccccaacgttcccaacacccaacacagatatctttcctgaaccccagagtcaggcatttcctgggagcgccggtaccgcattgcagtacccgccacctgcttaccccgctgctaagggaggcttccaggttcctatgatccccgattatctttttcctcagcagcagggggatctggggctgggcacgccggatcagaagccgttccagggtctggaatcaagaacccagcagcccagcctaacaccattatcgaccatcaaggcctttgcaacccaatctggttcccaagacctcaaagccctgaatacctcttatcagtcccagctgattaagccatcccggatgcgtaagtaccccaatcgcccatccaaaacgccgcctcacgaaagaccttacgcctgtcccgtcgagtcatgtgatcgtaggttttcccgatccgatgaactgaccagacatatccgaattcacacaggccagaaaccctttcagtgccgcatttgtatgcgaaacttctctaggtccgatcacctgacaacacacatacgcacacacaccggggaaaaaccattcgcatgtgatatttgtggcagaaaatttgcaagatccgacgagcgcaagcgccacaccaagatccatctgcgtcaaaaggacaagaaggctgacaaaagcgtggttgcctcaagcgccacctccagcctgtcctcatacccctcccctgtggcaaccagctacccatcacccgtgacaacttcctatccaagccccgctactacaagctaccccagccccgttcctacttcgttttcatccccaggctccagcacatatcccagccctgtccatagtggcttcccaagcccctcggtcgctaccacgtattcttctgtgcccccagctttccccgcacaggtgagcagctttccttcctcagccgtcactaattccttttcagcctccactggtttaagtgatatgactgctacatttagcccaaggacaatcgagatctgctag

SEQ ID NO: 122581 - DNA, 603 bp, Artificial Sequence
  derived and/or modified sequence
atggctgccgcaaaggccgagatgcagttgatgtctcctctgcaaatctcagatcccttcggctcttttcctcattcccccactatggacaattaccccaagctcgaagaaatgatgctgctgtccaatggagcgcctcagttcctgggagctgcaggcgctcccgaaggctcaggctccaattcttcttctagctcgtctggcggtgggggtgggggaggaggcggatccaacagttcctccagctcctcaacgtttaatcctcaggctgacaccggcgaacagccctacgagcacctcaccgccgaatcctttccagacatctcactgaataacgagaaagttctggtggagactagttatccgtctcagactacaaggctgcctccaatcacctacactgggagattttcgctggaaccagcacctaattccgggttcccttctccatctgtcgctaccacttattcctctgtgccaccagcctttcccgctcaggtttctagcttcccctcatctgccgtgaccaactccttcagcgccagcaccgggctctccgatatgaccgctacattttcccctaggacgattgaaatatgttag

SEQ ID NO: 122582 - DNA, 699 bp, Artificial Sequence
  derived and/or modified sequence
atggcagcggcaaaagcggagatgcagttaatgtctccactccagattagcgacccattcggatcatttcctcacagtcctacaatggacaactacccgaaactcgaggaaatgatgcttctgtcgaatggggcaccacagtttctgggggcagccggagcccctgaggggtcaggcagtaacagctcctcttcaagttccggcggtggtggaggagggggtggaggcagcaactcatcctcgagtagcagcaccttcaatcctcaggctgatacaggagaacaaccatatgagcatctgaccgccgaaagcttccccgatatttctctgaacaacgagaaagtcctcgtcgaaacgtcgtatccgtctcagaccactaggctccctccgattacgtatacaggtcggttctccctggaaccagctccgaattctggaaacactctgtggcccgaacctctgtttagccttgtgagtggactagtatcaatgacaaatcctccagccagctcctctagcgccccatctcctgccgcttcatccgcttctgcttcccagagccccccactcagctgcgcagtccccagcaacgacagctcccccatttatagcgcagcccctacttttcctacacccaataccgatatcttccccgaaacagccatgagcaagttctttacaagtatccaaaggacatag

SEQ ID NO: 122583 - DNA, 1632 bp, Artificial Sequence
  derived and/or modified sequence
atggccgccgccaaggccgagatgcagctgatgagccccctgcagatcagcgaccccttcggcagcttcccccacagccccaccatggacaactaccccaagctggaggagatgatgctgctgagcaacggcgccccccagttcctgggcgccgccggcgcccccgagggcagcggcagcaacagcagcagcagcagcagcggcggcggcggcggcggcggcggcggcagcaacagcagcagcagcagcagcaccttcaacccccaggccgacaccggcgagcagccctacgagcacctgaccgccgagagcttccccgacatcagcctgaacaacgagaaggtgctggtggagaccagctaccccagccagaccaccagactgccccccatcacctacaccggcagattcagcctggagcccgcccccaacagcggcaacaccctgtggcccgagcccctgttcagcctggtgagcggcctggtgagcatgaccaacccccccgccagcagcagcagcgcccccagccccgccgccagcagcgccagcgccagccagagcccccccctgagctgcgccgtgcccagcaacgacagcagccccatctacagcgccgcccccaccttccccacccccaacaccgacatcttccccgagccccagagccaggccttccccggcagcgccggcaccgccctgcagtaccccccccccgcctaccccgccgccaagggcggcttccaggtgcccatgatccccgactacctgttcccccagcagcagggcgacctgggcctgggcacccccgaccagaagcccttccagggcctggagagcagaacccagcagcccagcctgacccccctgagcaccatcaaggccttcgccacccagagcggcagccaggacctgaaggccctgaacaccagctaccagagccagctgatcaagcccagcagaatgagaaagtaccccaacagacccagcaagacccccccccacgagagaccctacgcctgccccgtggagagctgcgacagaagattcagcagaagcgacgagctgaccagacacatcagaatccacaccggccagaagcccttccagtgcagaatctgcatgagaaacttcagcagaagcgaccacctgaccacccacatcagaacccacaccggcgagaagcccttcgcctgcgacatctgcggcagaaagttcgccagaagcgacgagagaaagagacacaccaagatccacctgagacagaaggacaagaaggccgacaagagcgtggtggccagcagcgccaccagcagcctgagcagctaccccagccccgtggccaccagctaccccagccccgtgaccaccagctaccccagccccgccaccaccagctaccccagccccgtgcccaccagcttcagcagccccggcagcagcacctaccccagccccgtgcacagcggcttccccagccccagcgtggccaccacctacagcagcgtgccccccgccttccccgcccaggtgagcagcttccccagcagcgccgtgaccaacagcttcagcgccagcaccggcctgagcgacatgaccgccaccttcagccccagaaccatcgagatctgctag

SEQ ID NO: 122584 - DNA, 603 bp, Artificial Sequence
  derived and/or modified sequence
atggccgccgccaaggccgagatgcagctgatgagccccctgcagatcagcgaccccttcggcagcttcccccacagccccaccatggacaactaccccaagctggaggagatgatgctgctgagcaacggcgccccccagttcctgggcgccgccggcgcccccgagggcagcggcagcaacagcagcagcagcagcagcggcggcggcggcggcggcggcggcggcagcaacagcagcagcagcagcagcaccttcaacccccaggccgacaccggcgagcagccctacgagcacctgaccgccgagagcttccccgacatcagcctgaacaacgagaaggtgctggtggagaccagctaccccagccagaccaccagactgccccccatcacctacaccggcagattcagcctggagcccgcccccaacagcggcttccccagccccagcgtggccaccacctacagcagcgtgccccccgccttccccgcccaggtgagcagcttccccagcagcgccgtgaccaacagcttcagcgccagcaccggcctgagcgacatgaccgccaccttcagccccagaaccatcgagatctgctag

SEQ ID NO: 122585 - DNA, 699 bp, Artificial Sequence
  derived and/or modified sequence
atggccgccgccaaggccgagatgcagctgatgagccccctgcagatcagcgaccccttcggcagcttcccccacagccccaccatggacaactaccccaagctggaggagatgatgctgctgagcaacggcgccccccagttcctgggcgccgccggcgcccccgagggcagcggcagcaacagcagcagcagcagcagcggcggcggcggcggcggcggcggcggcagcaacagcagcagcagcagcagcaccttcaacccccaggccgacaccggcgagcagccctacgagcacctgaccgccgagagcttccccgacatcagcctgaacaacgagaaggtgctggtggagaccagctaccccagccagaccaccagactgccccccatcacctacaccggcagattcagcctggagcccgcccccaacagcggcaacaccctgtggcccgagcccctgttcagcctggtgagcggcctggtgagcatgaccaacccccccgccagcagcagcagcgcccccagccccgccgccagcagcgccagcgccagccagagcccccccctgagctgcgccgtgcccagcaacgacagcagccccatctacagcgccgcccccaccttccccacccccaacaccgacatcttccccgagaccgccatgagcaagttcttcaccagcatccagagaacctag

SEQ ID NO: 122586 - DNA, 3138 bp, Artificial Sequence
  derived and/or modified sequence
gcgcgcagaacttggggagccgccgccgccatccgccgccgcagccagcttccgccgccgcaggaccggcccctgccccagcctccgcagccgcggcgcgtccacgcccgcccgcgcccagggcgagtcggggtcgccgcctgcacgcttctcagtgttccccgcgccccgcatgtaacccggccaggcccccgcaactgtgtcccctgcagctccagccccgggctgcacccccccgccccgacaccagctctccagcctgctcgtccaggatggccgcggccaaggccgagatgcagctgatgtccccgctgcagatctctgacccgttcggatcctttcctcactcgcccaccatggacaactaccctaagctggaggagatgatgctgctgagcaacggggctccccagttcctcggcgccgccggggccccagagggcagcggcagcaacagcagcagcagcagcagcgggggcggtggaggcggcgggggcggcagcaacagcagcagcagcagcagcaccttcaaccctcaggcggacacgggcgagcagccctacgagcacctgaccgcagagtcttttcctgacatctctctgaacaacgagaaggtgctggtggagaccagttaccccagccaaaccactcgactgccccccatcacctatactggccgcttttccctggagcctgcacccaacagtggcaacaccttgtggcccgagcccctcttcagcttggtcagtggcctagtgagcatgaccaacccaccggcctcctcgtcctcagcaccatctccagcggcctcctccgcctccgcctcccagagcccacccctgagctgcgcagtgccatccaacgacagcagtcccatttactcagcggcacccaccttccccacgccgaacactgacattttccctgagccacaaagccaggccttcccgggctcggcagggacagcgctccagtacccgcctcctgcctaccctgccgccaagggtggcttccaggttcccatgatccccgactacctgtttccacagcagcagggggatctgggcctgggcaccccagaccagaagcccttccagggcctggagagccgcacccagcagccttcgctaacccctctgtctactattaaggcctttgccactcagtcgggctcccaggacctgaaggccctcaataccagctaccagtcccagctcatcaaacccagccgcatgcgcaagtaccccaaccggcccagcaagacgcccccccacgaacgcccttacgcttgcccagtggagtcctgtgatcgccgcttctcccgctccgacgagctcacccgccacatccgcatccacacaggccagaagcccttccagtgccgcatctgcatgcgcaacttcagccgcagcgaccacctcaccacccacatccgcacccacacaggcgaaaagcccttcgcctgcgacatctgtggaagaaagtttgccaggagcgatgaacgcaagaggcataccaagatccacttgcggcagaaggacaagaaagcagacaaaagtgttgtggcctcttcggccacctcctctctctcttcctacccgtccccggttgctacctcttacccgtccccggttactacctcttatccatccccggccaccacctcatacccatcccctgtgcccacctccttctcctctcccggctcctcgacctacccatcccctgtgcacagtggcttcccctccccgtcggtggccaccacgtactcctctgttccccctgctttcccggcccaggtcagcagcttcccttcctcagctgtcaccaactccttcagcgcctccacagggctttcggacatgacagcaaccttttctcccaggacaattgaaatttgctaaagggaaaggggaaagaaagggaaaagggagaaaaagaaacacaagagacttaaaggacaggaggaggagatggccataggagaggagggttcctcttaggtcagatggaggttctcagagccaagtcctccctctctactggagtggaaggtctattggccaacaatcctttctgcccacttccccttccccaattactattccctttgacttcagctgcctgaaacagccatgtccaagttcttcacctctatccaaagaacttgatttgcatggattttggataaatcatttcagtatcatctccatcatatgcctgaccccttgctcccttcaatgctagaaaatcgagttggcaaaatggggtttgggcccctcagagccctgccctgcacccttgtacagtgtctgtgccatggatttcgtttttcttggggtactcttgatgtgaagataatttgcatattctattgtattatttggagttaggtcctcacttgggggaaaaaaaaaaaagaaaagccaagcaaaccaatggtgatcctctattttgtgatgatgctgtgacaataagtttgaacctttttttttgaaacagcagtcccagtattctcagagcatgtgtcagagtgttgttccgttaacctttttgtaaatactgcttgaccgtactctcacatgtggcaaaatatggtttggtttttctttttttttttttttgaaagtgttttttcttcgtccttttggtttaaaaagtttcacgtcttggtgccttttgtgtgatgcgccttgctgatggcttgacatgtgcaattgtgagggacatgctcacctctagccttaaggggggcagggagtgatgatttgggggaggctttgggagcaaaataaggaagagggctgagctgagcttcggttctccagaatgtaagaaaacaaaatctaaaacaaaatctgaactctcaaaagtctatttttttaactgaaaatgtaaatttataaatatattcaggagttggaatgttgtagttacctactgagtaggcggcgatttttgtatgttatgaacatgcagttcattattttgtggttctattttactttgtacttgtgtttgcttaaacaaagtgactgtttggcttataaacacattgaatgcgctttattgcccatgggatatgtggtgtatatccttccaaaaaattaaaacgaaaataaagtagctgcgattggg

SEQ ID NO: 122587 - DNA, 1005 bp, Artificial Sequence
  derived and/or modified sequence
agagatcccagcgcgcagaacttggggagccgccgccgccatccgccgccgcagccagcttccgccgccgcaggaccggcccctgccccagcctccgcagccgcggcgcgtccacgcccgcccgcgcccagggcgagtcggggtcgccgcctgcacgcttctcagtgttccccgcgccccgcatgtaacccggccaggcccccgcaactgtgtcccctgcagctccagccccgggctgcacccccccgccccgacaccagctctccagcctgctcgtccaggatggccgcggccaaggccgagatgcagctgatgtccccgctgcagatctctgacccgttcggatcctttcctcactcgcccaccatggacaactaccctaagctggaggagatgatgctgctgagcaacggggctccccagttcctcggcgccgccggggccccagagggcagcggcagcaacagcagcagcagcagcagcgggggcggtggaggcggcgggggcggcagcaacagcagcagcagcagcagcaccttcaaccctcaggcggacacgggcgagcagccctacgagcacctgaccgcagagtcttttcctgacatctctctgaacaacgagaaggtgctggtggagaccagttaccccagccaaaccactcgactgccccccatcacctatactggccgcttttccctggagcctgcacccaacagtggcttcccctccccgtcggtggccaccacgtactcctctgttccccctgctttcccggcccaggtcagcagcttcccttcctcagctgtcaccaactccttcagcgcctccacagggctttcggacatgacagcaaccttttctcccaggacaattgaaatttgctaaagggaaaggggaaagaaagggaaaagggagaaaaagaaacacaagagacttaaaggacaggaggaggagatggccataggagaggagggttcctcttaggtcagatggaggttctcagag

SEQ ID NO: 122588 - DNA, 1406 bp, Artificial Sequence
  derived and/or modified sequence
agagatcccagcgcgcagaacttggggagccgccgccgccatccgccgccgcagccagcttccgccgccgcaggaccggcccctgccccagcctccgcagccgcggcgcgtccacgcccgcccgcgcccagggcgagtcggggtcgccgcctgcacgcttctcagtgttccccgcgccccgcatgtaacccggccaggcccccgcaactgtgtcccctgcagctccagccccgggctgcacccccccgccccgacaccagctctccagcctgctcgtccaggatggccgcggccaaggccgagatgcagctgatgtccccgctgcagatctctgacccgttcggatcctttcctcactcgcccaccatggacaactaccctaagctggaggagatgatgctgctgagcaacggggctccccagttcctcggcgccgccggggccccagagggcagcggcagcaacagcagcagcagcagcagcgggggcggtggaggcggcgggggcggcagcaacagcagcagcagcagcagcaccttcaaccctcaggcggacacgggcgagcagccctacgagcacctgaccgcagagtcttttcctgacatctctctgaacaacgagaaggtgctggtggagaccagttaccccagccaaaccactcgactgccccccatcacctatactggccgcttttccctggagcctgcacccaacagtggcaacaccttgtggcccgagcccctcttcagcttggtcagtggcctagtgagcatgaccaacccaccggcctcctcgtcctcagcaccatctccagcggcctcctccgcctccgcctcccagagcccacccctgagctgcgcagtgccatccaacgacagcagtcccatttactcagcggcacccaccttccccacgccgaacactgacattttccctgaaacagccatgtccaagttcttcacctctatccaaagaacttgatttgcatggattttggataaatcatttcagtatcatctccatcatatgcctgaccccttgctcccttcaatgctagaaaatcgagttggcaaaatggggtttgggcccctcagagccctgccctgcacccttgtacagtgtctgtgccatggatttcgtttttcttggggtactcttgatgtgaagataatttgcatattctattgtattatttggagttaggtcctcacttgggggaaaaaaaaaaaagaaaagccaagcaaaccaatggtgatcctctattttgtgatgatgctgtgacaataagtttgaacctttttttttgaaacagcagtcccagtattctcagagcatgtgtcagagtgttgttccgttaacctttttgtaaatactgcttgaccgtactctcacatgtggcaaaatat

SEQ ID NO: 122589 - protein, 486 aa, Artificial Sequence
  derived and/or modified sequence
MLHLSEFSEPDALLVKSTEGCCAEPSAELPRLPARDAPAATGYPGAGDFLSWALNSCGASGDLADSCFLEGPAPTPPPGLSYSGSFFIQAVPEHPHDPEALFNLMSGILGLAPFPGPEAAASRSPLDAPFPAGSDALLPGPPDLYSPDLGAAPFPEAFWEASPCAGAPSQCLYEPQLSPPDVKPGLRAPPASPALDAVSAFKGPYAPWELLSVGAPGNCGSQGDYQAAPEARFPVIGTKIEDLLSISCPAELPAVPANRLYPSGAYDAFPLAPGDLGEGAEGLPGLLTPPSGEGGSSGDGGEFLASTQPQLSPLGLRSAAAADFPKPLVADIPGSSGVAAPPVPPPPPTPFPQAKARRKGRRGGKCSTRCFCPRPHAKAFACPVESCVRSFARSDELNRHLRIHTGHKPFQCRICLRNFSRSDHLTTHVRTHTGEKPFACDVCGRRFARSDEKKRHSKVHLKQKARAEERLKGLGFYSLGLSFASL

SEQ ID NO: 122590 - protein, 589 aa, Artificial Sequence
  derived and/or modified sequence
MAVARGVGSPEPAPPQLYKWGGCGLGEPGSALERRGAAARGRCGRARAPRLPDSFPRGECPKPGARAPRSVRCGEPLPPASPPPARPQAQRARPRAPHSRRRAMLHLSEFSEPDALLVKSTEGCCAEPSAELPRLPARDAPAATGYPGAGDFLSWALNSCGASGDLADSCFLEGPAPTPPPGLSYSGSFFIQAVPEHPHDPEALFNLMSGILGLAPFPGPEAAASRSPLDAPFPAGSDALLPGPPDLYSPDLGAAPFPEAFWEASPCAGAPSQCLYEPQLSPPDVKPGLRAPPASPALDAVSAFKGPYAPWELLSVGAPGNCGSQGDYQAAPEARFPVIGTKIEDLLSISCPAELPAVPANRLYPSGAYDAFPLAPGDLGEGAEGLPGLLTPPSGEGGSSGDGGEFLASTQPQLSPLGLRSAAAADFPKPLVADIPGSSGVAAPPVPPPPPTPFPQAKARRKGRRGGKCSTRCFCPRPHAKAFACPVESCVRSFARSDELNRHLRIHTGHKPFQCRICLRNFSRSDHLTTHVRTHTGEKPFACDVCGRRFARSDEKKRHSKVHLKQKARAEERLKGLGFYSLGLSFASL

SEQ ID NO: 122591 - DNA, 2379 bp, Artificial Sequence
  derived and/or modified sequence
cgggagtccccggcacacatcctgtgtccatgtttgggcatttacgtcacggcggcagggccggggcctcccaaaatggcagtggcccggggagtcggaagcccggagccagcgccgccgcagctatataagtgggggggctgtgggctgggggagcccggcagcgctttggagaggcgaggagccgccgcccgaggccggtgcgggcgagcgagggcgccgcggctccccgactcctttcccagaggtgagtgcccgaagccaggagcccgggcgcctaggtctgtgcgctgcggggaacccctaccgccagcctccccgccacccgcgcgcccccaagcccagcgggcgaggccccgggcgccccacagccggcgccgcgccatgctccaccttagcgagttttccgaacccgacgcgctcctcgtcaagtccactgaaggctgttgcgccgaacccagcgctgaattgccccggctgcctgccagggacgctcccgcggccaccggctaccctggagcaggcgacttcttgagctgggctttgaacagctgcggcgcaagtggggacttagccgactcctgcttcctggaggggcctgcgcccacaccccctcccggcctcagctacagcggtagcttcttcattcaggcagtgcccgaacacccgcacgacccggaggcactcttcaacctcatgtcgggcatcttaggcctggcacccttccccggtccagaggcagcagcgtccagatccccgctggatgccccttttcctgcggggtccgatgccttgctgccgggtccgccggacctttactccccggatctgggcgctgcccctttcccagaggcgttctgggaggcctcgccttgcgcgggtgccccctcgcagtgcctgtatgagcctcagctctccccgcccgacgtcaagcccggcctccgggcgcctcccgcctcgccagcgctggacgctgtctctgccttcaagggtccctacgcgccctgggagctgctttctgtgggggccccagggaactgtgggtcacagggagactaccaggccgccccggaggctcgttttcccgtaatagggaccaagattgaggacttgctgtccatcagctgccctgcggaactgccggccgtcccagccaacagactctatcccagcggggcctatgacgctttcccgctggccccgggtgacttaggggagggggctgagggcctccctgggctcctgacccctcctagtggggagggagggagtagcggcgacggcggagagtttctggccagtacgcagcctcagctttccccgctgggccttcgcagcgccgccgcggcggacttccctaaacctctggtggcggacatccctggaagcagtggcgtggctgcaccacccgtgccgccgccgccgcccacccctttcccccaggccaaggcgcgacgcaaggggcgccgcggcggcaaatgcagcacgcgctgcttctgcccgcggccgcacgccaaggccttcgcttgcccggtggagagttgtgtgcggagctttgcgcgctccgacgagctcaatcgccacctgcgcatccacacgggccacaaacccttccagtgccgcatctgcctccgcaacttcagccgcagcgaccacctcaccacgcacgtgcgcacccacaccggcgagaagccttttgcttgcgacgtgtgcggccgccgcttcgcgcgcagcgatgagaagaaacggcacagcaaggtgcacctcaagcagaaggcgcgcgccgaggagcggctcaagggcctcggcttttactcgctgggcctctccttcgcttctctctgagcaagagatgggtttatgggttggggcgccgccgttcggcgcgcacgagttccgggccgttcccctccccgctcttcttccaactcctcctcgcacgcccgagggccggcctccggtcccgcttccagtttccttgaagcgcccgccgcacacgccctattcagcaccagctccgcggacagttcccgcggtccaggcgctgtcacccttgtcagccgcgctttgggggaagtcttctgagaccacccagtgaataggcactaccctgggattcaagacagtcttttgtaactggcacacgccccacgccttcctctataacccccagagacaggctggggcagcgccaaggcggtctcgcgcgggactttgtacagcagtgtcttatccagcagccattggatgtaacgttttgctttgggttttttttccttttgttgttgttaatttttgtaaagcagacgctactctcaagcagttgacaaaactgtttatttttgcaattaaaattattgtgctaaaagcttaaaaaaa

SEQ ID NO: 122592 - DNA, 1461 bp, Artificial Sequence
  derived and/or modified sequence
atgctccatctgtccgaattctctgagccagatgccttgctagtcaaaagcacggaagggtgttgtgctgagccgtccgctgagctccccagactccctgccagggatgcaccagcagcaactggatacccaggtgctggcgatttcctcagctgggccctcaactcttgtggtgcatcgggagatctggcagactcatgcttcctggagggtccagcacctacgccaccccctgggttgtcttactcaggttccttcttcatccaggcggtcccagaacaccctcatgacccggaagccctgtttaatctcatgtccggaatcctcggattggcccctttcccaggaccagaagcagccgcctctagatctcctctagacgccccctttcccgctgggtctgatgcactgttgccagggccccccgatctctatagtcccgacctgggggctgcccctttccccgaggcattctgggaggcctccccttgtgcgggagccccttcacagtgtctgtacgaacctcagctatccccaccagacgttaaaccaggcctgagggcgcctcctgcatcaccagccctggacgccgtctctgcgttcaaagggccttacgccccatgggaactgttgtcagtgggggctcccgggaactgtggcagccaaggtgactaccaggccgcccctgaagcccgcttccccgtgattgggaccaaaatcgaggatttgcttagtattagctgccctgcagagttgccagcggtccccgccaatcgcctgtacccctcaggagcatacgatgcctttcccctggcccccggcgatctgggtgagggtgctgaaggacttccgggtttgctgactccacccagtggggaaggggggtcaagcggcgatggaggcgagttcctggcctccacccagcctcaattaagtccactcggactacggagcgcagccgctgccgacttcccaaagcccttagtggctgatatccctgggagctcaggcgtggccgcacccccagtacctccccctccacccaccccttttccccaagcaaaggcccgacgaaaaggcagaagaggagggaaatgctccactaggtgtttttgtccacggcctcatgccaaagcattcgcctgcccagtggaatcatgcgtgagatcatttgcccgcagcgacgaacttaataggcacctgcggattcacaccggacacaagcccttccagtgtagaatttgcttaagaaatttctcaaggtccgaccatctcaccacccatgtgcggacacatacaggagagaaaccctttgcttgcgacgtgtgtgggcggaggttcgcacggtctgatgagaaaaaacggcactcgaaggtgcaccttaaacagaaggccagagctgaggaacgactcaagggcctgggcttttactcactcgggttatcattcgcaagcctgtag

SEQ ID NO: 122593 - DNA, 1770 bp, Artificial Sequence
  derived and/or modified sequence
atggcggtggcgcgaggagtgggctcaccagaacccgcccctcctcagctgtataagtgggggggttgtgggctgggagagccgggaagcgctttggagcgtcgtggcgctgctgctcggggacggtgcggtcgagcccgcgcccctcgactaccagatagttttcctaggggcgaatgcccaaagcctggggctagggcacctaggtctgtgagatgtggggaacccctgccgccagcgtccccaccaccagcacggccccaagcacagcgcgctcgccccagggctccccacagccgtcgcagagccatgttgcatttgtcagagttcagtgagcctgacgcccttctcgtcaaatccacagaaggatgttgcgccgagccctctgcagaactgcctaggctgcccgcccgggacgctccagccgcaaccggctatccaggcgctggtgattttcttagttgggcactcaactcatgtggagctagtggagatcttgccgacagctgttttcttgagggacctgcgcctacgcctcctcctggcctgagctattccggttctttctttatccaggccgttcccgaacatccgcatgacccagaagcactttttaacttgatgtctggcatcctagggcttgccccctttcctggcccagaagctgcggcgtccagatcaccgctggacgccccatttccagcaggctctgatgcactgcttcccggtccacccgacttgtactcccctgacctgggagccgccccgttccccgaggccttttgggaagcctcaccttgtgccggggctcccagccagtgtctctatgagccccagctcagcccacctgacgttaagcccggcttgagagctccccccgcgtcccctgctctggacgccgtgtctgcctttaaggggccttatgctccttgggagctcctgtcggtgggggcccccggcaattgcgggtcacagggggactatcaggcggcccctgaggcccgctttcccgtgataggtaccaagattgaagacctactctctattagttgccctgcagagcttccagccgtgccagcaaacagactgtacccctcaggggcatatgatgccttcccacttgcaccaggcgatctcggcgaaggagctgagggtcttcccggccttctgaccccaccgagtggcgaaggaggcagcagcggtgatgggggagagttcctcgcctcgacacagccgcagctgagccctttagggctccgcagtgccgccgccgccgactttcctaagccactggttgctgatatccctggctcttcgggagtggctgccccgccagtgcccccacctcctcctaccccattccctcaggcgaaagctcgacgcaagggcaggagaggaggaaagtgcagtactcgctgtttttgtccccgacctcatgctaaagcctttgcttgtcctgttgagtcttgtgttaggtccttcgcacgttcagacgaattgaataggcacctccgaatccacacagggcataagccctttcagtgcaggatctgcctacggaactttagtcgtagtgatcacctaaccactcatgtgcggacacatactggtgagaaaccgttcgcctgcgatgtttgtggaaggcggtttgcacgttctgatgagaagaaacgacacagtaaggtgcacctgaagcagaaagctcgcgccgaagagaggctcaaggggctgggcttctattccctggggctgagtttcgcctccctgtag

SEQ ID NO: 122594 - DNA, 1461 bp, Artificial Sequence
  derived and/or modified sequence
atgctgcacctgtctgagttcagcgagccagatgccctgctggtgaagagcacagagggctgctgtgccgagcccagcgctgagctgccccggctgcctgccagagatgccccagctgccaccggctacccaggggccggggacttcctgtcctgggccctgaacagctgtggggccagcggggacctggccgacagctgcttcctggagggccctgcccccaccccacctcctggcctgagctacagcggcagcttcttcatccaggccgtgcctgagcacccccatgaccctgaggccctcttcaacctgatgagcggcatcctgggcctggcccccttccctggccctgaggccgccgccagccgcagccccctggatgcccccttccctgctggcagtgatgccctgctgcccggccccccagacctgtacagcccagacctgggcgccgcccccttccctgaggccttctgggaggccagcccctgtgccggggcccccagccagtgcctgtatgagccccagctgagccccccagatgtgaagccaggcctgcgggcccccccagccagccctgccctggatgctgtgtctgccttcaagggcccctatgccccctgggagctgctgtctgtgggcgcccctggcaactgtggcagccagggcgactaccaggccgcccctgaggcccgcttccctgtgattggcaccaagattgaggacctgctgagcatcagctgcccagctgagctgcctgctgtgcctgccaaccggctgtaccccagcggggcctatgatgccttccccctggcccctggggacctgggggagggcgctgagggcctgcccggcctgctgaccccaccttctggagagggcggcagcagtggagatggaggagagttcctggccagcacccagccccagctgagccccctgggcctgcggtctgctgctgctgctgacttccccaagcccctggtggccgacatccctggcagcagcggcgtggccgcccctcctgtgcccccacctccacccacccccttcccccaggccaaggcccggaggaaaggaagaagaggaggcaagtgcagcacccgctgcttctgcccccggccccacgccaaggcctttgcctgccctgtggagagctgtgtgcgcagctttgcccggagtgatgagctgaacagacacctgcgcatccacacaggccacaagcccttccagtgccgcatctgcctgaggaacttcagcagaagtgaccacctgaccacccacgtgaggacccacactggagagaagccctttgcctgtgatgtgtgtggcagaagatttgcccggagtgatgagaagaagaggcacagcaaggtgcacctgaagcagaaggcccgggcagaggagcggctgaagggcctgggcttctacagcctgggcctgagctttgccagcctgtag

SEQ ID NO: 122595 - DNA, 1770 bp, Artificial Sequence
  derived and/or modified sequence
atggctgtggcccggggcgtgggcagccctgagcccgccccaccccagctgtacaagtggggcggctgcggcctgggggagcccggcagcgccctggagaggagaggagctgctgcccggggccgctgtggccgggcccgggccccccggctgcctgacagcttccccagaggagaatgtcccaagccaggggcccgggcccccaggtctgtgcgctgtggggagcccctgcccccagccagccccccaccagcccggccccaggcccagagggcccggccccgggccccccacagcagaagaagagccatgctgcacctgtctgagttcagcgagccagatgccctgctggtgaagagcacagagggctgctgtgccgagcccagcgctgagctgccccggctgcctgccagagatgccccagctgccaccggctacccaggagctggggacttcctgtcctgggccctgaacagctgtggggccagcggggacctggccgacagctgcttcctggagggccctgcccccaccccacctcctggcctgagctacagcggcagcttcttcatccaggccgtgcctgagcacccccatgaccctgaggccctcttcaacctgatgagcggcatcctgggcctggcccccttccctggccctgaggccgccgccagccgcagccccctggatgcccccttccctgctggcagtgatgccctgctgcccggccccccagacctgtacagcccagacctgggcgccgcccccttccctgaggccttctgggaggccagcccctgtgccggggcccccagccagtgcctgtatgagccccagctgagccccccagatgtgaagccaggcctgcgggcccccccagccagccctgccctggatgctgtgtctgccttcaagggcccctatgccccctgggagctgctgtctgtgggcgcccctggcaactgtggcagccagggcgactaccaggccgcccctgaggcccgcttccctgtgattggcaccaagattgaggacctgctgagcatcagctgcccagctgagctgcctgctgtgcctgccaacagactctaccccagcggggcctatgatgccttccccctggcccctggggacctgggggagggcgctgagggcctgcccggcctgctgaccccacccagcggggagggcggcagcagtggagatggaggagagttcctggccagcacccagccccagctgagccccctgggcctgcggtctgctgctgctgctgacttccccaagcccctggtggccgacatccctggcagcagtggagtggccgcccctcctgtgcccccacctccacccacccccttcccccaggccaaggcccggaggaagggccggcggggcggcaagtgcagcacccgctgcttctgcccccggccccacgccaaggcctttgcctgccctgtggagagctgtgtgcgcagctttgcccggagtgatgagctgaacagacacctgcgcatccacacaggccacaagcccttccagtgccgcatctgcctgaggaacttcagcagaagtgaccacctgaccacccacgtgaggacccacactggagagaagccctttgcctgtgatgtgtgtggccgccgctttgcccggagtgatgagaagaagaggcacagcaaggtgcacctgaagcagaaggcccgggcagaggagcggctgaagggcctgggcttctacagcctgggcctgagctttgccagcctgtag

SEQ ID NO: 122596 - DNA, 1461 bp, Artificial Sequence
  derived and/or modified sequence
atgctgcacctgagcgagttcagcgagcccgacgccctgctggtgaaatcaactgagggttgttgtgccgaaccaagcgctgaactcccaagactacctgctcgcgatgcacccgctgccacgggatatcctggggctggcgacttcctttcttgggctcttaacagttgcggggcctccggtgacctggctgacagttgctttctggagggcccagccccgacacccccgcctggcttgtcatattccggctcattcttcatccaagccgtacctgaacatcctcacgaccccgaagctttgttcaatctgatgagtgggatcttgggtttggctccgttcccaggccctgaggctgcagcctccaggtctcctctagacgccccattccctgccgggagtgacgctctgctgcccggcccacccgacctgtacagtcccgatcttggagcagcacctttccctgaagctttttgggaggcctccccttgtgcgggcgctccaagccagtgcctgtacgagcctcagctgagtccacctgacgtaaaacctggcttgcgcgccccgcccgcatcacccgcccttgacgcggtctcggcatttaagggcccctatgcaccatgggaactgctctccgtcggcgcccctggaaattgtggtagccaaggcgactaccaggctgcccccgaagctagatttcctgtgatcgggacgaagatagaggacctgctatcaatatcttgtcccgccgagcttcccgccgtgccagccaacagactttatccgtcgggtgcctatgatgctttccctctcgcaccaggtgacctgggagaaggagccgaagggctgcccggcctgctgacgccaccatctggcgagggtgggtcctctggcgacggcggggagtttctggcaagtacacaacctcaactaagtcctttgggactgcgttcggctgcggccgccgattttcccaagcccttggtcgcagatatccctggcagcagcggcgtggctgctccacctgtgcctcccccaccccccacacccttcccccaagccaaagcacgccgtaagggaagaaggggcggaaaatgcagcaccaggtgtttctgtccaagacctcacgccaaggcatttgcttgccccgtggagagttgtgttaggtcattcgcacggtctgatgaactcaacaggcatctgaggatccatactggccacaagccatttcaatgccgtatctgtctgcggaactttagtaggtcagaccacctcactacccacgtgcggacacatacaggtgagaagcccttcgcgtgcgatgtgtgcggcaggaggtttgcacggtctgatgaaaaaaaaaggcatagtaaggtccacctgaagcagaaagctagggccgaggagagactgaagggcttaggcttctactccctcgggctttccttcgccagtttgtag

SEQ ID NO: 122597 - DNA, 1770 bp, Artificial Sequence
  derived and/or modified sequence
atggccgtggcccggggcgtgggcagccccgagcccgcccccccccaactctataagtggggaggctgtggtctcggagaacctggttcagcactcgagcggcgtggcgctgcagccagagggagatgcggacgggcacgagctcctaggctgcccgattcatttcccagaggggagtgtcctaaaccgggcgcccgagcaccaagaagtgtccggtgcggtgagcctctgccgccagcatcacccccaccagctagaccgcaggcccagcgcgcccggcctcgggcacctcatagccgacgcagagctatgctgcacctctcggaattttctgaacccgatgctctcttagtgaaaagcacagaaggctgttgcgctgagccatccgcggagcttccccgtttgccagctagagatgcccctgccgctaccggatatcctggcgctggcgattttctcagctgggctctgaactcctgcggagcttccggcgatctagccgattcatgtttcttggagggacccgcgcccacgcctccacctggcctgtcatatagtggcagctttttcatccaggccgttcctgagcatcctcatgatcctgaggctctcttcaatttgatgagcggcatcctggggctggcccccttccccggccctgaagctgccgcttccagatcccccctggatgccccattccctgccggatcagacgccttactgccaggtccccccgacctgtactccccagacctgggtgcggctcccttccctgaggcattttgggaggcaagcccgtgtgccggggctccctcccagtgcctgtatgagccccagttaagtccacctgatgtgaagccgggattacgcgcccccccagcctcccctgccctggacgccgtttccgcctttaaaggcccctacgcgccttgggagcttctgtccgttggcgccccaggaaactgcgggagtcagggagactaccaagctgcaccagaggcacgctttccagtgattggcacgaaaatcgaggacctcctgtccataagttgcccagcagaactgcccgccgtgccggccaatcgcctttatccatctggggcctatgatgcctttcccctggctccgggggacttgggggagggtgccgaagggctcccgggactcctcaccccccccagcggagagggcgggtcctccggggatggcggcgagtttctagccagtacacaaccccagctatcaccattaggcttacggagcgctgctgctgccgatttccctaagccactcgtggctgacattcctggctcatccggcgttgcggccccacccgtgcccccaccgcctccaactccttttcctcaggccaaggccagacggaaagggcgacgcggcggtaagtgtagtacacgatgtttctgtccacggccccacgccaaagcctttgcttgtcctgtcgaatcctgcgtaagatcctttgccaggagcgacgagttaaaccggcacctaaggatccacaccgggcacaaaccatttcagtgccgcatatgccttagaaacttttcgcggtctgatcatctgaccacccatgttaggactcataccggggagaaaccctttgcctgtgatgtgtgtggacgccggtttgcacgcagcgacgagaaaaaacgccattctaaagtgcatcttaaacagaaggctcgggccgaggaacgcctcaaaggcctcggcttctattctctcgggctgtccttcgcgagcctatag

SEQ ID NO: 122598 - DNA, 1461 bp, Artificial Sequence
  derived and/or modified sequence
atgctgcacctaagcgaattttctgagcccgacgccctgctagtcaagtcaaccgaagggtgctgcgccgagcccagcgcagaactccctagattgcccgcacgcgacgccccagccgcaaccggctacccaggcgctggggatttcctgagttgggccttgaatagctgcggagcaagtggtgacttggccgacagttgtttcctagagggtccagcccctaccccaccacctggtttgagctactcaggcagcttttttatccaggcagtcccagaacatccccatgacccagaagcgctttttaatttaatgtctggaattctgggtctggcccctttccccggaccggaagccgctgcttccagatcacccctcgatgcacctttccccgcaggatctgatgccctgttgcccggacccccagatctctatagcccggatttaggagctgcgccttttccggaggccttctgggaggcttcaccgtgtgccggtgccccttcccaatgcttgtatgagccccagttgtcacctccagatgtgaagccaggcctaagagccccacccgctagcccggctcttgacgccgtgtccgcatttaaaggaccctatgctccttgggagttgctgtccgtaggtgcccctggaaactgtgggagccagggcgattatcaagccgcacctgaggccagatttcccgtaatcgggacaaaaatcgaagatctgctctccatctcgtgccctgccgagttaccagccgtccccgctaaccgattgtatccatccggtgcatacgacgcttttcctctagccccaggggacctgggagagggggctgaagggctcccgggactgctgacaccaccctccggtgaagggggatcaagtggtgatggaggggaattccttgctagcactcagcctcaactatcgcccctgggactgagaagtgccgctgccgcagacttccctaaacctctcgtggctgatatccccggaagctctggagttgcagctcccccagttccacctccacctcccacccctttccctcaggcaaaagccaggcggaagggacgccgaggcggaaaatgctctacgagatgtttctgccctcgccctcatgcaaaggcttttgcctgcccagtggaaagctgcgtgaggtcttttgcacggagcgatgaacttaaccgccaccttcggatccacaccgggcataaacctttccagtgcaggatctgcctgcggaatttcagcagaagtgatcacctcacaacacatgtgaggacccatacaggcgaaaagcccttcgcctgcgatgtttgtgggagacgctttgccagatctgacgagaagaaacggcacagtaaagtccacttgaagcagaaagctcgtgcagaagagcggctcaaagggctggggttctactccttgggcttgtcctttgcatccctctag

SEQ ID NO: 122599 - DNA, 1770 bp, Artificial Sequence
  derived and/or modified sequence
atggccgttgccaggggggttgggtcccctgagcccgcacccccacaactgtataagtggggcggatgtggcctaggagagcctggatctgccctagaaaggaggggagcagcagctcggggacgctgcggccgagctcgagcgcctaggctgcccgacagttttccccgaggagaatgccctaaacctggagcacgcgctccacgctcagtgcgctgtggtgagcccctgcccccagccagtcccccacccgcaagaccccaggcacagcgtgctcggcctagggctccacactcacgaaggcgagccatgcttcacctcagcgaattttccgaaccggatgcgcttttggtgaaatcaactgaagggtgctgcgcagaaccttccgcagaactccctcgcctgccagccagggatgccccagctgcaactggttatcccggtgcaggcgacttcctatcttgggctttaaacagctgcggtgccagcggagacttggcagactcttgctttctggaaggaccggcacctacaccaccacccggtctctcttacagtggatccttctttattcaggccgtcccagagcacccacacgaccccgaggctctttttaatctcatgtcgggaattcttggtctggcaccctttcccggacctgaagccgcagcgtccaggagcccgctcgacgctccttttccggctggatcggatgctttactccctggacctccagatctgtactcccccgatttgggagcggcaccattccctgaggccttctgggaagcaagtccctgtgctggggctccttcacagtgtctctatgaaccccagctcagcccacctgatgtcaaacccggactccgcgcaccaccagcgagccctgcgctcgatgctgttagcgcattcaagggcccttatgctccttgggaactgctttctgtcggcgcaccaggaaactgcggttctcaaggcgattaccaggctgctcccgaggccagattccccgtgataggcaccaagattgaagacttgctgtccatctcctgcccagctgaattgcccgcagtgccagctaatcgtctatacccctctggagcctacgacgccttccctctggcccctggcgacctgggggagggcgctgagggactgcccggactgctgacccccccatcaggcgagggcggatcctcaggtgatggcggagaatttttggcatccacgcaaccacagctttcccccctgggcctccgttctgcagccgcagcagattttcctaagccactggtggcagatatccccggaagcagtggggttgcggctccacctgtgcctcctcctcctcccactccttttcctcaggctaaggctagaaggaaaggccgtcggggtggaaagtgcagcactcgctgtttttgtccccgacctcatgctaaagcattcgcatgccccgtggagagttgtgtgaggtccttcgcaaggtcagatgaactgaaccgacatctccgcatccatacagggcataagcccttccagtgcaggatttgtcttagaaatttttcaaggtccgatcacctcaccactcatgttcggacacacacaggtgagaagccctttgcgtgcgacgtctgcgggcgtcgattcgctcgctctgatgagaaaaaacgccacagcaaagtgcacctgaagcagaaggcccgtgcggaggaaagactgaaaggactcggcttttactccctgggactctcctttgcctccctctag

SEQ ID NO: 122600 - DNA, 1461 bp, Artificial Sequence
  derived and/or modified sequence
atgctgcacctgagcgagttcagcgagcccgacgccctgctggtgaagagcaccgagggctgctgcgccgagcccagcgccgagctgcccagactgcccgccagagacgcccccgccgccaccggctaccccggcgccggcgacttcctgagctgggccctgaacagctgcggcgccagcggcgacctggccgacagctgcttcctggagggccccgcccccacccccccccccggcctgagctacagcggcagcttcttcatccaggccgtgcccgagcacccccacgaccccgaggccctgttcaacctgatgagcggcatcctgggcctggcccccttccccggccccgaggccgccgccagcagaagccccctggacgcccccttccccgccggcagcgacgccctgctgcccggcccccccgacctgtacagccccgacctgggcgccgcccccttccccgaggccttctgggaggccagcccctgcgccggcgcccccagccagtgcctgtacgagccccagctgagcccccccgacgtgaagcccggcctgagagccccccccgccagccccgccctggacgccgtgagcgccttcaagggcccctacgccccctgggagctgctgagcgtgggcgcccccggcaactgcggcagccagggcgactaccaggccgcccccgaggccagattccccgtgatcggcaccaagatcgaggacctgctgagcatcagctgccccgccgagctgcccgccgtgcccgccaacagactgtaccccagcggcgcctacgacgccttccccctggcccccggcgacctgggcgagggcgccgagggcctgcccggcctgctgaccccccccagcggcgagggcggcagcagcggcgacggcggcgagttcctggccagcacccagccccagctgagccccctgggcctgagaagcgccgccgccgccgacttccccaagcccctggtggccgacatccccggcagcagcggcgtggccgccccccccgtgcccccccccccccccacccccttcccccaggccaaggccagaagaaagggcagaagaggcggcaagtgcagcaccagatgcttctgccccagaccccacgccaaggccttcgcctgccccgtggagagctgcgtgagaagcttcgccagaagcgacgagctgaacagacacctgagaatccacaccggccacaagcccttccagtgcagaatctgcctgagaaacttcagcagaagcgaccacctgaccacccacgtgagaacccacaccggcgagaagcccttcgcctgcgacgtgtgcggcagaagattcgccagaagcgacgagaagaagagacacagcaaggtgcacctgaagcagaaggccagagccgaggagagactgaagggcctgggcttctacagcctgggcctgagcttcgccagcctgtag

SEQ ID NO: 122601 - DNA, 1770 bp, Artificial Sequence
  derived and/or modified sequence
atggccgtggccagaggcgtgggcagccccgagcccgcccccccccagctgtacaagtggggcggctgcggcctgggcgagcccggcagcgccctggagagaagaggcgccgccgccagaggcagatgcggcagagccagagcccccagactgcccgacagcttccccagaggcgagtgccccaagcccggcgccagagcccccagaagcgtgagatgcggcgagcccctgccccccgccagccccccccccgccagaccccaggcccagagagccagacccagagccccccacagcagaagaagagccatgctgcacctgagcgagttcagcgagcccgacgccctgctggtgaagagcaccgagggctgctgcgccgagcccagcgccgagctgcccagactgcccgccagagacgcccccgccgccaccggctaccccggcgccggcgacttcctgagctgggccctgaacagctgcggcgccagcggcgacctggccgacagctgcttcctggagggccccgcccccacccccccccccggcctgagctacagcggcagcttcttcatccaggccgtgcccgagcacccccacgaccccgaggccctgttcaacctgatgagcggcatcctgggcctggcccccttccccggccccgaggccgccgccagcagaagccccctggacgcccccttccccgccggcagcgacgccctgctgcccggcccccccgacctgtacagccccgacctgggcgccgcccccttccccgaggccttctgggaggccagcccctgcgccggcgcccccagccagtgcctgtacgagccccagctgagcccccccgacgtgaagcccggcctgagagccccccccgccagccccgccctggacgccgtgagcgccttcaagggcccctacgccccctgggagctgctgagcgtgggcgcccccggcaactgcggcagccagggcgactaccaggccgcccccgaggccagattccccgtgatcggcaccaagatcgaggacctgctgagcatcagctgccccgccgagctgcccgccgtgcccgccaacagactgtaccccagcggcgcctacgacgccttccccctggcccccggcgacctgggcgagggcgccgagggcctgcccggcctgctgaccccccccagcggcgagggcggcagcagcggcgacggcggcgagttcctggccagcacccagccccagctgagccccctgggcctgagaagcgccgccgccgccgacttccccaagcccctggtggccgacatccccggcagcagcggcgtggccgccccccccgtgcccccccccccccccacccccttcccccaggccaaggccagaagaaagggcagaagaggcggcaagtgcagcaccagatgcttctgccccagaccccacgccaaggccttcgcctgccccgtggagagctgcgtgagaagcttcgccagaagcgacgagctgaacagacacctgagaatccacaccggccacaagcccttccagtgcagaatctgcctgagaaacttcagcagaagcgaccacctgaccacccacgtgagaacccacaccggcgagaagcccttcgcctgcgacgtgtgcggcagaagattcgccagaagcgacgagaagaagagacacagcaaggtgcacctgaagcagaaggccagagccgaggagagactgaagggcctgggcttctacagcctgggcctgagcttcgccagcctgtag

SEQ ID NO: 122602 - DNA, 2372 bp, Artificial Sequence
  derived and/or modified sequence
ttttcgggagtccccggcacacatcctgtgtccatgtttgggcatttacgtcacggcggcagggccggggcctcccaaaatggcagtggcccggggagtcggaagcccggagccagcgccgccgcagctatataagtgggggggctgtgggctgggggagcccggcagcgctttggagaggcgaggagccgccgcccgaggccggtgcgggcgagcgagggcgccgcggctccccgactcctttcccagaggtgagtgcccgaagccaggagcccgggcgcctaggtctgtgcgctgcggggaacccctaccgccagcctccccgccacccgcgcgcccccaagcccagcgggcgaggccccgggcgccccacagccggcgccgcgccatgctccaccttagcgagttttccgaacccgacgcgctcctcgtcaagtccactgaaggctgttgcgccgaacccagcgctgaattgccccggctgcctgccagggacgctcccgcggccaccggctaccctggagcaggcgacttcttgagctgggctttgaacagctgcggcgcaagtggggacttagccgactcctgcttcctggaggggcctgcgcccacaccccctcccggcctcagctacagcggtagcttcttcattcaggcagtgcccgaacacccgcacgacccggaggcactcttcaacctcatgtcgggcatcttaggcctggcacccttccccggtccagaggcagcagcgtccagatccccgctggatgccccttttcctgcggggtccgatgccttgctgccgggtccgccggacctttactccccggatctgggcgctgcccctttcccagaggcgttctgggaggcctcgccttgcgcgggtgccccctcgcagtgcctgtatgagcctcagctctccccgcccgacgtcaagcccggcctccgggcgcctcccgcctcgccagcgctggacgctgtctctgccttcaagggtccctacgcgccctgggagctgctttctgtgggggccccagggaactgtgggtcacagggagactaccaggccgccccggaggctcgttttcccgtaatagggaccaagattgaggacttgctgtccatcagctgccctgcggaactgccggccgtcccagccaacagactctatcccagcggggcctatgacgctttcccgctggccccgggtgacttaggggagggggctgagggcctccctgggctcctgacccctcctagtggggagggagggagtagcggcgacggcggagagtttctggccagtacgcagcctcagctttccccgctgggccttcgcagcgccgccgcggcggacttccctaaacctctggtggcggacatccctggaagcagtggcgtggctgcaccacccgtgccgccgccgccgcccacccctttcccccaggccaaggcgcgacgcaaggggcgccgcggcggcaaatgcagcacgcgctgcttctgcccgcggccgcacgccaaggccttcgcttgcccggtggagagttgtgtgcggagctttgcgcgctccgacgagctcaatcgccacctgcgcatccacacgggccacaaacccttccagtgccgcatctgcctccgcaacttcagccgcagcgaccacctcaccacgcacgtgcgcacccacaccggcgagaagccttttgcttgcgacgtgtgcggccgccgcttcgcgcgcagcgatgagaagaaacggcacagcaaggtgcacctcaagcagaaggcgcgcgccgaggagcggctcaagggcctcggcttttactcgctgggcctctccttcgcttctctctgagcaagagatgggtttatgggttggggcgccgccgttcggcgcgcacgagttccgggccgttcccctccccgctcttcttccaactcctcctcgcacgcccgagggccggcctccggtcccgcttccagtttccttgaagcgcccgccgcacacgccctattcagcaccagctccgcggacagttcccgcggtccaggcgctgtcacccttgtcagccgcgctttgggggaagtcttctgagaccacccagtgaataggcactaccctgggattcaagacagtcttttgtaactggcacacgccccacgccttcctctataacccccagagacaggctggggcagcgccaaggcggtctcgcgcgggactttgtacagcagtgtcttatccagcagccattggatgtaacgttttgctttgggttttttttccttttgttgttgttaatttttgtaaagcagacgctactctcaagcagttgacaaaactgtttatttttgcaattaaaattattgtgctaaaa

SEQ ID NO: 122603 - DNA, 2372 bp, Artificial Sequence
  derived and/or modified sequence
cgggagtccccggcacacatcctgtgtccatgtttgggcatttacgtcacggcggcagggccggggcctcccaaaatggcagtggcccggggagtcggaagcccggagccagcgccgccgcagctatataagtgggggggctgtgggctgggggagcccggcagcgctttggagaggcgaggagccgccgcccgaggccggtgcgggcgagcgagggcgccgcggctccccgactcctttcccagaggtgagtgcccgaagccaggagcccgggcgcctaggtctgtgcgctgcggggaacccctaccgccagcctccccgccacccgcgcgcccccaagcccagcgggcgaggccccgggcgccccacagccggcgccgcgccatgctccaccttagcgagttttccgaacccgacgcgctcctcgtcaagtccactgaaggctgttgcgccgaacccagcgctgaattgccccggctgcctgccagggacgctcccgcggccaccggctaccctggagcaggcgacttcttgagctgggctttgaacagctgcggcgcaagtggggacttagccgactcctgcttcctggaggggcctgcgcccacaccccctcccggcctcagctacagcggtagcttcttcattcaggcagtgcccgaacacccgcacgacccggaggcactcttcaacctcatgtcgggcatcttaggcctggcacccttccccggtccagaggcagcagcgtccagatccccgctggatgccccttttcctgcggggtccgatgccttgctgccgggtccgccggacctttactccccggatctgggcgctgcccctttcccagaggcgttctgggaggcctcgccttgcgcgggtgccccctcgcagtgcctgtatgagcctcagctctccccgcccgacgtcaagcccggcctccgggcgcctcccgcctcgccagcgctggacgctgtctctgccttcaagggtccctacgcgccctgggagctgctttctgtgggggccccagggaactgtgggtcacagggagactaccaggccgccccggaggctcgttttcccgtaatagggaccaagattgaggacttgctgtccatcagctgccctgcggaactgccggccgtcccagccaacagactctatcccagcggggcctatgacgctttcccgctggccccgggtgacttaggggagggggctgagggcctccctgggctcctgacccctcctagtggggagggagggagtagcggcgacggcggagagtttctggccagtacgcagcctcagctttccccgctgggccttcgcagcgccgccgcggcggacttccctaaacctctggtggcggacatccctggaagcagtggcgtggctgcaccacccgtgccgccgccgccgcccacccctttcccccaggccaaggcgcgacgcaaggggcgccgcggcggcaaatgcagcacgcgctgcttctgcccgcggccgcacgccaaggccttcgcttgcccggtggagagttgtgtgcggagctttgcgcgctccgacgagctcaatcgccacctgcgcatccacacgggccacaaacccttccagtgccgcatctgcctccgcaacttcagccgcagcgaccacctcaccacgcacgtgcgcacccacaccggcgagaagccttttgcttgcgacgtgtgcggccgccgcttcgcgcgcagcgatgagaagaaacggcacagcaaggtgcacctcaagcagaaggcgcgcgccgaggagcggctcaagggcctcggcttttactcgctgggcctctccttcgcttctctctgagcaagagatgggtttatgggttggggcgccgccgttcggcgcgcacgagttccgggccgttcccctccccgctcttcttccaactcctcctcgcacgcccgagggccggcctccggtcccgcttccagtttccttgaagcgcccgccgcacacgccctattcagcaccagctccgcggacagttcccgcggtccaggcgctgtcacccttgtcagccgcgctttgggggaagtcttctgagaccacccagtgaataggcactaccctgggattcaagacagtcttttgtaactggcacacgccccacgccttcctctataacccccagagacaggctggggcagcgccaaggcggtctcgcgcgggactttgtacagcagtgtcttatccagcagccattggatgtaacgttttgctttgggttttttttccttttgttgttgttaatttttgtaaagcagacgctactctcaagcagttgacaaaactgtttatttttgcaattaaaattattgtgctaaaagctt

SEQ ID NO: 122604 - protein, 723 aa, Artificial Sequence
  derived and/or modified sequence
MAEYTRLHNALALIRLRNPPVNAISTTLLRDIKEGLQKAVIDHTIKAIVICGAEGKFSAGADIRGFSAPRTFGLTLGHVVDEIQRNEKPVVAAIQGMAFGGGLELALGCHYRIAHAEAQVGLPEVTLGLLPGARGTQLLPRLTGVPAALDLITSGRRILADEALKLGILDKVVNSDPVEEAIRFAQRVSDQPLESRRLCNKPIQSLPNMDSIFSEALLKMRRQHPGCLAQEACVRAVQAAVQYPYEVGIKKEEELFLYLLQSGQARALQYAFFAERKANKWSTPSGASWKTASARPVSSVGVVGLGTMGRGIVISFARARIPVIAVDSDKNQLATANKMITSVLEKEASKMQQSGHPWSGPKPRLTSSVKELGGVDLVIEAVFEEMSLKKQVFAELSAVCKPEAFLCTNTSALDVDEIASSTDRPHLVIGTHFFSPAHVMKLLEVIPSQYSSPTTIATVMNLSKKIKKIGVVVGNCFGFVGNRMLNPYYNQAYFLLEEGSKPEEVDQVLEEFGFKMGPFRVSDLAGLDVGWKSRKGQGLTGPTLLPGTPARKRGNRRYCPIPDVLCELGRFGQKTGKGWYQYDKPLGRIHKPDPWLSKFLSRYRKTHHIEPRTISQDEILERCLYSLINEAFRILGEGIAASPEHIDVVYLHGYGWPRHKGGPMFYASTVGLPTVLEKLQKYYRQNPDIPQLEPSDYLKKLASQGNPPLKEWQSLAGSPSSKL

SEQ ID NO: 122605 - protein, 627 aa, Artificial Sequence
  derived and/or modified sequence
MAFGGGLELALGCHYRIAHAEAQVGLPEVTLGLLPGARGTQLLPRLTGVPAALDLITSGRRILADEALKLGILDKVVNSDPVEEAIRFAQRVSDQPLESRRLCNKPIQSLPNMDSIFSEALLKMRRQHPGCLAQEACVRAVQAAVQYPYEVGIKKEEELFLYLLQSGQARALQYAFFAERKANKWSTPSGASWKTASARPVSSVGVVGLGTMGRGIVISFARARIPVIAVDSDKNQLATANKMITSVLEKEASKMQQSGHPWSGPKPRLTSSVKELGGVDLVIEAVFEEMSLKKQVFAELSAVCKPEAFLCTNTSALDVDEIASSTDRPHLVIGTHFFSPAHVMKLLEVIPSQYSSPTTIATVMNLSKKIKKIGVVVGNCFGFVGNRMLNPYYNQAYFLLEEGSKPEEVDQVLEEFGFKMGPFRVSDLAGLDVGWKSRKGQGLTGPTLLPGTPARKRGNRRYCPIPDVLCELGRFGQKTGKGWYQYDKPLGRIHKPDPWLSKFLSRYRKTHHIEPRTISQDEILERCLYSLINEAFRILGEGIAASPEHIDVVYLHGYGWPRHKGGPMFYASTVGLPTVLEKLQKYYRQNPDIPQLEPSDYLKKLASQGNPPLKEWQSLAGSPSSKL

SEQ ID NO: 122606 - protein, 487 aa, Artificial Sequence
  derived and/or modified sequence
MAEYTRLHNALALIRLRNPPVNAISTTLLRDIKEGLQKAVIDHTIKAIVICGAEGKFSAGADIRGFSAPRTFGLTLGHVVDEIQRNEKPVVAAIQGMAFGGGLELALGCHYRIAHAEAQVGLPEVTLGLLPGARGTQLLPRLTGVPAALDLITSGRRILADEALKLGILDKVVNSDPVEEAIRFAQRVSDQPLESRRLCNKPIQSLPNMDSIFSEALLKMRRQHPGCLAQEACVRAVQAAVQYPYEVGIKKEEELFLYLLQSGQARALQYAFFAERKANKWSTPSGASWKTASARPVSSVGVVGLGTMGRGIVISFARARIPVIAVDSDKNQLATANKMITSVLEKEASKMQQSGHPWSGPKPRLTSSVKELGGVDLVIEAVFEEMSLKKQVFAELSAVCKPEAFLCTNTSALDVDEIASSTDRPHLVIGTHFFSPAHVMKLLEVIPSQYSSPTTIATVMNLSKKIKKIGVVVGNYSVSKKKKKKKK

SEQ ID NO: 122607 - DNA, 2172 bp, Artificial Sequence
  derived and/or modified sequence
atggcagagtacaccaggttgcataatgccctggcgctgatcaggttaagaaatcctcctgtgaacgcaattagcactactctgctgagggacattaaggaggggcttcagaaggccgtgatcgaccacacgatcaaagctatagtcatttgtggcgcagaagggaagttctctgcaggagccgacatacggggtttctcagcaccccggacatttggccttacacttgggcacgtcgttgatgagatccagaggaacgaaaagcctgtagttgccgcaattcaggggatggcattcggcggtgggctcgagctggctttggggtgccactatcggatcgctcatgccgaggcccaggtgggactgcccgaggtcaccctgggacttctgcccggagcgcgtggcacccaactcctgcccaggctgactggcgttcccgccgcattggatctcataaccagcggtagacggatacttgctgacgaggcgctgaagttaggcatccttgacaaagttgtcaactcagaccccgtcgaggaggccattagatttgcccaacgggtaagtgaccagcctctggagtctagacgtctgtgcaacaagccaatccagagcctgcccaatatggattccatcttctccgaagctctgctgaaaatgcgtcgacagcatcctggctgtttagcacaggaagcatgtgtccgagcggtgcaggcggctgttcaatacccatatgaagtgggcatcaagaaggaggaagagctgtttctgtaccttctgcagtcggggcaggctagagccctgcaatacgcattctttgcggagaggaaggcgaacaaatggagtactccatccggagcttcatggaaaacggccagcgctcgtccggtgtccagcgtgggcgttgtgggcctaggaacgatggggagaggcattgtgatttcattcgcaagagcacgcattcccgttatcgcagtcgactccgataagaatcaactggctactgcaaacaaaatgattacctctgtgcttgaaaaggaagccagcaaaatgcaacagtccggccacccttggagcgggcccaagcctaggctcacgtccagcgtgaaggagctcggcggcgttgacctggtgatcgaagctgtatttgaagaaatgtctttgaagaagcaggtttttgctgaactgagcgcagtctgcaagccggaggctttcctgtgcacaaatacatctgcacttgatgtggatgagattgcctcttcaacagaccggccccacctggtaatcggaacccacttcttcagtcctgcgcacgtcatgaaactcctggaagtgatccccagtcagtactctagcccaaccaccattgcaacggtgatgaatttatctaaaaaaatcaagaagattggggtagtggtggggaactgttttggattcgtcggaaaccggatgctgaatccatactataaccaggcgtacttcttgttggaggagggatctaagccggaggaggtggaccaagtgttggaggaatttggttttaagatgggacccttcagggtgtccgacctcgccgggcttgatgttgggtggaaaagtcggaagggccagggcctgacaggacccactctgctgccgggcacacctgcccgcaagagaggcaaccgccgctactgtccaatacctgatgtgctatgcgaacttggacgattcggccagaaaacaggcaagggatggtatcaatacgataagcccctgggccgcattcacaaacctgatccgtggttgagtaagtttctttcgcgctacaggaaaacccaccatatagagcctcgcacaatctcccaggatgagatactggaaaggtgcttgtactcgctgattaacgaggccttcagaatcctcggcgaaggaatcgcggcatctcctgaacatattgatgtggtttacttgcacggatatggctggccacgccataaaggcggtccaatgttttacgcaagtactgtgggcttacctaccgtgctcgaaaagctgcagaaatactacaggcaaaatcccgatatcccacagctcgaaccaagtgattacctgaaaaaattggcctctcaggggaacccacctctgaaggaatggcagtctctggctggctctccctccagcaagctgtag

SEQ ID NO: 122608 - DNA, 2172 bp, Artificial Sequence
  derived and/or modified sequence
atggccgagtacacccggctgcacaatgccctggccctgatccggctgagaaatcctcctgtgaatgccatcagcaccaccctgctgcgggacatcaaggagggcctgcagaaggctgtgattgaccacaccatcaaggccatcgtcatctgtggggctgagggcaagttctctgctggagctgacatccggggcttcagcgcccccaggaccttcggcctgaccctgggccacgtggtggatgagatccagagaaatgagaagcctgtggtggccgccatccagggcatggcctttggaggcggcctggagctggccctgggctgccactacagaattgcccacgccgaggcccaggtgggcctgcctgaggtgaccctgggcctgctgcccggggcccggggcacccagctgctgccccggctgactggagtgcctgctgccctggacctgatcaccagcggccgccgcatcctggctgatgaggccctgaagctgggcatcctggacaaggtggtgaacagcgaccctgtggaggaggccatccgctttgcccagagggtgtctgaccagcccctggagagccggcggctgtgcaacaagcccatccagagcctgcccaacatggacagcatcttcagcgaggccctgctgaagatgaggcggcagcaccctggctgcctggcccaggaggcctgtgtgcgggctgtgcaggccgctgtgcagtacccctatgaggtgggcatcaagaaggaggaggagctgttcctgtacctgctgcagagcggccaggcccgggccctgcagtatgccttctttgctgagaggaaggccaacaagtggagcaccccatctggggcctcctggaagacagccagcgcccggcctgtgtcctctgtgggcgtggtgggcctgggcaccatgggccggggcatcgtcatcagctttgcccgggcccgcatccctgtgattgctgtggacagcgacaagaaccagctggccacagccaacaagatgatcacctctgtgctggagaaggaggccagcaagatgcagcagagcggccacccctggagcggccccaagccccggctgaccagctctgtgaaggagctgggcggcgtggacctggtgattgaagctgtgtttgaggagatgagcctgaagaagcaggtgtttgctgagctgtctgctgtgtgcaagccagaggccttcctgtgcaccaacaccagcgccctggatgtggatgagatcgccagcagcacagaccggccccacctggtgattggcacccacttcttcagccctgcccacgtgatgaagctgctggaggtgatccccagccagtacagcagccccaccaccatcgccaccgtgatgaacctgagcaagaagatcaagaagattggagtggtggtgggcaactgctttggatttgtgggcaacaggatgctgaacccctactacaaccaggcctacttcctgctggaggagggcagcaagccagaggaggtggaccaggtgctggaggagtttggcttcaagatgggccccttccgggtgtctgacctggccggcctggatgtgggctggaagagcaggaagggccagggcctgaccggccccaccctgctgcccggcaccccagccaggaagaggggcaacagacgctactgccccatcccagatgtgctgtgtgagctgggccgcttcggccagaagacaggcaagggctggtaccagtatgacaagcccctgggccgcatccacaagccagacccctggctgagcaagttcctgagccgctacaggaagacccaccacatcgagcccaggaccatcagccaggatgagatcctggagcgctgcctgtacagcctcatcaatgaggccttccgcatcctgggggagggcattgctgccagccctgagcacattgatgtggtgtacctgcacggctacggctggcccaggcacaagggcggccccatgttctacgccagcacagtgggcctgcccaccgtgctggagaagctgcagaagtactaccggcagaacccagacatcccccagctggagcccagcgactacctgaagaagctggccagccagggcaacccccccctgaaggagtggcagagcctggccggcagccccagcagcaagctgtag

SEQ ID NO: 122609 - DNA, 2172 bp, Artificial Sequence
  derived and/or modified sequence
atggccgagtacacccggctgcacaacgccctggccctgatccggctacgaaatcctcccgtgaacgctatatctacaacactgctccgcgatataaaagaaggtctgcaaaaggctgttatcgatcatacaattaaggccattgtcatctgtggcgccgagggaaagttttctgcaggtgccgatattagaggcttctccgcaccgagaacctttggcttgacactgggccacgtagttgatgagattcagcgaaatgaaaaacccgttgttgccgccatccagggaatggcttttggaggcggcctagagctagccctcggttgccactacagaatcgcccatgcggaggcgcaagttggcttgcctgaagttactcttggtctacttcctggggcacgaggcacccagctgcttccacgcctcactggcgtccctgccgccctagatcttattacatccggtaggaggatcttagcagacgaagccctcaaactgggcatcctggataaagtggttaactccgatcccgtggaggaagccattcgcttcgctcagagggtatctgatcagcccctcgaaagccgacggctgtgtaacaaacccatccagtctctgcctaatatggatagtatattcagcgaagctctcttgaagatgaggagacagcaccccggctgcctggctcaggaggcttgtgtgagagccgtccaggccgctgtgcagtatccctacgaagtgggcatcaagaaggaagaggagcttttcctatacttactgcagtccggacaggctcgggccttgcagtacgcgttttttgccgaaagaaaggctaataagtggtccacaccttccggggcctcatggaaaaccgcatctgctcgtcccgtgagctcagttggagtcgtcgggcttgggaccatggggcgcggcatcgtgatttcgtttgcacgcgccagaatccccgtgatcgcggtggactccgacaagaatcagctggcaaccgccaacaagatgattacgtcggtgctggaaaaggaggcctccaagatgcaacagtccgggcatccttggtccggcccgaagcctcgtcttacatcctctgtaaaggaattaggaggcgtggacctcgtgatcgaggcggtattcgaggagatgtccctgaaaaaacaggtattcgccgaactgtctgccgtgtgcaagcctgaggccttcctgtgcaccaacacctcagccctagacgtggatgagatagcgagcagtaccgaccgcccacaccttgtgataggtactcacttctttagtccagcccacgttatgaagctcctggaggtcattccttctcaatatagctctcctactacgattgcaaccgtgatgaaccttagtaaaaagattaagaaaatcggggtggtggtgggaaactgtttcgggtttgttggtaatcgaatgttgaatccctattataaccaagcatatttcctactagaggagggttctaagccagaagaggtagaccaggttctggaagagttcggctttaagatgggtccattccgagtctctgatctcgccggcctggacgtcggctggaaaagtcgaaaaggtcagggtctcacaggacctacattgctgccaggcacccctgcaaggaaaagaggaaatagacgatattgtcctatacccgacgttttgtgtgagctggggcgatttgggcagaagacaggaaaggggtggtatcaatatgacaagcctctcggtaggatccataagcccgatccgtggctctccaaattcttaagtcggtacagaaaaactcatcacatcgagccccggaccatttctcaagatgagatattagagcgatgcctgtactcactgatcaacgaggccttccgcatcctcggcgaaggcatcgctgcatcccctgagcacattgacgtcgtgtaccttcacggctatggctggccgaggcacaaaggcgggcctatgttctacgcgagcaccgtcggactgccaacagtgctggagaaacttcaaaaatattataggcagaacccagacattcctcaactggagccatcagactacctgaagaagctggcatctcagggtaacccacctctaaaggaatggcagagtttagctgggtcaccatcatctaagctgtag

SEQ ID NO: 122610 - DNA, 2172 bp, Artificial Sequence
  derived and/or modified sequence
atggctgagtatacccggcttcataatgctctagctttgatcaggctgcgaaaccctcctgtcaatgccatttctaccactttgctgagggacatcaaggaggggttacagaaagctgtgattgaccacactattaaagcaatcgtaatttgtggagccgaaggaaagttcagcgctggcgctgacatcagagggttctctgccccacggacttttggtctgacactgggccacgtggtggacgaaatccagcggaatgagaagcccgtcgtggcggcaatccagggaatggcgtttggagggggtttggaactggctcttggttgtcattatcgcattgcacacgcagaagcgcaagtggggctgccagaggtgacgctcgggttgctgcctggcgctagaggcacccagcttctgcccagactcacaggagtgccagcagcactggacctaattacttcagggaggagaattctcgccgatgaagccctcaagcttggtatcctggataaggtcgttaacagcgatcctgtggaagaagccattaggttcgcccaacgcgtatctgatcaaccacttgagtccagacgcttgtgcaacaaacccattcagtctctgccaaatatggacagtattttctctgaggcactgcttaagatgcgcaggcagcacccgggttgcctggcgcaggaagcatgtgtgagggctgtgcaggctgcggtccagtacccttatgaggtaggcatcaaaaaagaggaggagcttttcctctatttacttcaatcaggacaagcacgcgctctgcagtacgcattctttgccgagcgcaaggcgaacaaatggtctacaccgtctggcgcatcctggaaaactgcttcagccaggcctgtgtcaagtgtgggcgtcgtgggattgggtactatgggaagggggatcgtgatttcctttgccagggcaagaatacccgtcatcgctgtggactccgacaagaaccagttggccacggcgaacaaaatgattaccagtgttctcgaaaaggaggccagcaaaatgcagcaaagcggccacccctggagcggtccgaagccacgactgaccagctcagtgaaggagctgggtggggtggacctggtgatcgaggcagtttttgaggaaatgagtctcaaaaaacaagtattcgccgaactctcggcggtctgtaaaccagaagccttcctgtgtactaacacctccgcgctggatgtggatgagattgcctcttctactgaccggccacatctggtgatcggcacccattttttcagtcctgcacacgtcatgaagttgctggaagtgattccatcgcagtacagctctcctacaacaattgctaccgtgatgaacctctcaaagaagatcaaaaagatcggtgtcgtggttggaaactgcttcggcttcgtaggtaacagaatgctgaacccctattataatcaggcctactttttgttagaagaaggttcaaagcccgaggaggtcgaccaagtgctggaggagtttggatttaagatgggcccattccgcgtgagcgatctcgccggactagacgttggctggaagtccagaaaagggcagggcctgaccggacccacactgctacctggaacccccgctcggaagcggggaaatagacggtactgtcctatcccggacgtgctttgcgaactaggtaggttcggccagaaaaccggcaagggctggtaccagtacgacaaacctctcggacgcattcacaagcctgatccatggctctcaaaattcctgagtcgataccggaaaacgcatcatattgagccacgcacaatttcgcaagacgaaattctggaacggtgtctatacagcctcatcaacgaggcttttagaatcttaggcgaggggatagccgcatccccagagcacattgatgttgtgtatctgcacgggtatggatggcctagacacaagggtggacccatgttctacgcctctaccgtggggctacccactgttcttgagaaactccagaaatactacagacagaaccccgacatccctcaactagagcctagcgattacctcaaaaaattagcctcccagggcaacccaccactgaaagagtggcaaagtctggcaggtagcccctcttctaagctgtag

SEQ ID NO: 122611 - DNA, 2172 bp, Artificial Sequence
  derived and/or modified sequence
atggccgagtacaccagactgcacaacgccctggccctgatcagactgagaaacccccccgtgaacgccatcagcaccaccctgctgagagacatcaaggagggcctgcagaaggccgtgatcgaccacaccatcaaggccatcgtgatctgcggcgccgagggcaagttcagcgccggcgccgacatcagaggcttcagcgcccccagaaccttcggcctgaccctgggccacgtggtggacgagatccagagaaacgagaagcccgtggtggccgccatccagggcatggccttcggcggcggcctggagctggccctgggctgccactacagaatcgcccacgccgaggcccaggtgggcctgcccgaggtgaccctgggcctgctgcccggcgccagaggcacccagctgctgcccagactgaccggcgtgcccgccgccctggacctgatcaccagcggcagaagaatcctggccgacgaggccctgaagctgggcatcctggacaaggtggtgaacagcgaccccgtggaggaggccatcagattcgcccagagagtgagcgaccagcccctggagagcagaagactgtgcaacaagcccatccagagcctgcccaacatggacagcatcttcagcgaggccctgctgaagatgagaagacagcaccccggctgcctggcccaggaggcctgcgtgagagccgtgcaggccgccgtgcagtacccctacgaggtgggcatcaagaaggaggaggagctgttcctgtacctgctgcagagcggccaggccagagccctgcagtacgccttcttcgccgagagaaaggccaacaagtggagcacccccagcggcgccagctggaagaccgccagcgccagacccgtgagcagcgtgggcgtggtgggcctgggcaccatgggcagaggcatcgtgatcagcttcgccagagccagaatccccgtgatcgccgtggacagcgacaagaaccagctggccaccgccaacaagatgatcaccagcgtgctggagaaggaggccagcaagatgcagcagagcggccacccctggagcggccccaagcccagactgaccagcagcgtgaaggagctgggcggcgtggacctggtgatcgaggccgtgttcgaggagatgagcctgaagaagcaggtgttcgccgagctgagcgccgtgtgcaagcccgaggccttcctgtgcaccaacaccagcgccctggacgtggacgagatcgccagcagcaccgacagaccccacctggtgatcggcacccacttcttcagccccgcccacgtgatgaagctgctggaggtgatccccagccagtacagcagccccaccaccatcgccaccgtgatgaacctgagcaagaagatcaagaagatcggcgtggtggtgggcaactgcttcggcttcgtgggcaacagaatgctgaacccctactacaaccaggcctacttcctgctggaggagggcagcaagcccgaggaggtggaccaggtgctggaggagttcggcttcaagatgggccccttcagagtgagcgacctggccggcctggacgtgggctggaagagcagaaagggccagggcctgaccggccccaccctgctgcccggcacccccgccagaaagagaggcaacagaagatactgccccatccccgacgtgctgtgcgagctgggcagattcggccagaagaccggcaagggctggtaccagtacgacaagcccctgggcagaatccacaagcccgacccctggctgagcaagttcctgagcagatacagaaagacccaccacatcgagcccagaaccatcagccaggacgagatcctggagagatgcctgtacagcctgatcaacgaggccttcagaatcctgggcgagggcatcgccgccagccccgagcacatcgacgtggtgtacctgcacggctacggctggcccagacacaagggcggccccatgttctacgccagcaccgtgggcctgcccaccgtgctggagaagctgcagaagtactacagacagaaccccgacatcccccagctggagcccagcgactacctgaagaagctggccagccagggcaacccccccctgaaggagtggcagagcctggccggcagccccagcagcaagctgtag

SEQ ID NO: 122612 - DNA, 1464 bp, Artificial Sequence
  derived and/or modified sequence
atggcagaatacacaagacttcataatgccttggctctgattcgccttcgcaaccccccggtgaacgctatcagtacgaccctgctaagggacatcaaagaggggctccagaaagcggtaatagaccacacaatcaaggccatcgtgatctgcggggccgaaggaaagttctctgctggggcagacatcaggggcttctccgcccccagaacatttggtctcacattgggccatgtggtcgatgagattcagcggaacgagaaacccgtcgtcgccgccattcaaggcatggcctttgggggggggctcgagctggcgttaggatgtcactacagaatcgctcatgcggaggcccaagttggactgccggaagtgacgttgggactgctgcccggcgcccggggcactcagctcctgcccagactgaccggggtgcctgctgccttagacctgatcacttcaggtcggcggatcctggctgatgaggccctcaaactcggaatcctcgacaaagtggtgaacagtgacccagttgaggaggcaattagatttgctcagcgtgtgtctgaccagccccttgagagcaggaggctgtgtaacaaacccatccagtccttgcccaatatggatagcatctttagcgaagcattgctgaagatgaggagacaacatcctggctgtctagcccaggaggcttgtgtaagggccgtgcaagccgcagttcagtatccctacgaggtcggaatcaagaaagaagaggaactcttcctgtacttactgcagagtggtcaggctcgagctctacagtatgccttctttgccgagcgtaaggcaaataagtggagcactccctcgggagccagctggaaaacagcctctgcgcgcccagtctcttcagtgggagtcgtggggctgggaacaatggggagaggcatcgtcatttcgttcgcacgcgcccgcattcctgtgattgccgtggacagcgacaaaaatcagttagctaccgcaaacaagatgatcaccagtgtcttggaaaaggaagcctcaaagatgcaacagtctggacacccttggagcgggccaaagccccgcctgactagcagcgtaaaagaattaggaggggtcgacctagtgattgaagccgtgtttgaagagatgtcacttaaaaagcaggtttttgccgagctcagtgccgtgtgtaaaccggaggccttcctgtgcacaaatacgtctgctttagatgtggatgagattgcctcgagtacagacagacctcacctggtgatcgggacccacttcttctcaccggctcacgtgatgaagctcctcgaagttattccatctcagtattcttcaccaaccaccatagcaaccgtcatgaatttatcgaagaagattaagaaaatcggtgtggtggtggggaactatagcgtttcaaaaaaaaagaaaaagaagaaaaagtag

SEQ ID NO: 122613 - DNA, 1464 bp, Artificial Sequence
  derived and/or modified sequence
atggccgagtacacccggctgcacaatgccctggccctgatccggctgagaaatcctcctgtgaatgccatcagcaccaccctgctgcgggacatcaaggagggcctgcagaaggctgtgattgaccacaccatcaaggccatcgtcatctgtggggctgagggcaagttctctgctggagctgacatccggggcttcagcgcccccaggaccttcggcctgaccctgggccacgtggtggatgagatccagagaaatgagaagcctgtggtggccgccatccagggcatggcctttggaggcggcctggagctggccctgggctgccactacagaattgcccacgccgaggcccaggtgggcctgcctgaggtgaccctgggcctgctgcccggggcccggggcacccagctgctgccccggctgactggagtgcctgctgccctggacctgatcaccagcggccgccgcatcctggctgatgaggccctgaagctgggcatcctggacaaggtggtgaacagcgaccctgtggaggaggccatccgctttgcccagagggtgtctgaccagcccctggagagccggcggctgtgcaacaagcccatccagagcctgcccaacatggacagcatcttcagcgaggccctgctgaagatgaggcggcagcaccctggctgcctggcccaggaggcctgtgtgcgggctgtgcaggccgctgtgcagtacccctatgaggtgggcatcaagaaggaggaggagctgttcctgtacctgctgcagagcggccaggcccgggccctgcagtatgccttctttgctgagaggaaggccaacaagtggagcaccccatctggggcctcctggaagacagccagcgcccggcctgtgtcctctgtgggcgtggtgggcctgggcaccatgggccggggcatcgtcatcagctttgcccgggcccgcatccctgtgattgctgtggacagcgacaagaaccagctggccacagccaacaagatgatcacctctgtgctggagaaggaggccagcaagatgcagcagagcggccacccctggagcggccccaagccccggctgaccagctctgtgaaggagctgggcggcgtggacctggtgattgaagctgtgtttgaggagatgagcctgaagaagcaggtgtttgctgagctgtctgctgtgtgcaagccagaggccttcctgtgcaccaacaccagcgccctggatgtggatgagatcgccagcagcacagaccggccccacctggtgattggcacccacttcttcagccctgcccacgtgatgaagctgctggaggtgatccccagccagtacagcagccccaccaccatcgccaccgtgatgaacctgagcaagaagatcaagaagattggagtggtggtgggcaactacagcgtgtccaagaagaagaagaagaagaagaagtag

SEQ ID NO: 122614 - DNA, 1464 bp, Artificial Sequence
  derived and/or modified sequence
atggccgagtacacccggctgcacaacgccctggccctgatccggctgcgcaatccccccgtcaacgccatcagcacgaccctcctgagggacattaaggaaggcctgcagaaagccgtcattgaccacacgatcaaggccatcgtaatctgtggggccgaaggcaagttttccgccggtgcagacatccgaggattttctgctccacgcaccttcgggctgacattaggtcatgtggtggacgagattcagcggaatgagaagcccgtggtggccgctattcaaggtatggccttcgggggcggcctggaattggcccttgggtgtcattaccggatagctcacgccgaggctcaggttggactgcccgaggtcactttaggactcctccccggcgctcgtggaacgcagctcttaccccgactcacaggggtccctgccgctctcgacctgatcacctcgggcagacggattctcgctgatgaagctctgaagctgggaatactggataaagtcgtgaactccgatccagttgaggaagctattaggtttgcgcagagagtgagcgaccaacccctggaatcccgaaggctgtgtaataagcccatacaatccctgcctaacatggacagcatcttcagtgaagctctgctaaaaatgcgacgccagcatcccggatgcctggctcaagaggcctgcgtccgcgccgtgcaggctgctgtccagtacccctacgaggtcgggatcaaaaaggaggaagagctgtttctgtacctgctgcagtcagggcaagcacgggccctgcaatacgccttctttgccgagcgcaaggccaataaatggtcaactccatctggggccagttggaagactgcttctgcaaggcctgtctcgtcggttggggtggtgggccttgggacaatgggaagggggatcgtgatctctttcgcaagagctaggatcccagtgatcgccgttgatagtgataaaaaccagcttgccactgcaaataagatgattactagcgtcctcgagaaagaggcttccaagatgcagcagagtggtcacccctggagtggacccaagccacggctaactagtagcgtgaaggagctcggcggggtggacctggttatcgaggcggtgtttgaggagatgtctctaaaaaagcaggtgttcgctgagctctccgccgtttgtaagcccgaggcatttttatgtacaaatacaagcgctctggatgtggacgaaattgcttcttcaactgatagaccccacctcgtaattgggacacattttttctcccctgcccatgtcatgaagttgctggaggtgatccctagccagtactccagtcctaccacaatcgccaccgttatgaacttgtctaagaagatcaaaaaaataggagtcgtggtaggcaactactctgtgagtaaaaaaaaaaagaaaaaaaaaaaatag

SEQ ID NO: 122615 - DNA, 1464 bp, Artificial Sequence
  derived and/or modified sequence
atggccgagtatacaaggctgcataacgctttagcccttataaggctacgcaaccccccagttaatgcaatttctacaacacttctgagggacataaaagaaggactacagaaggccgtaatcgaccacacaatcaaggctattgtgatctgtggcgcagaaggcaagttctcagcgggagcagacattaggggattcagcgctccccgtacatttggcctgactcttgggcacgtggtggacgaaatccagcgcaatgagaagcctgtcgttgcggcaatacagggtatggcctttgggggaggtctggaactggccctgggatgccattacagaatcgcacatgcggaggcccaggtgggtctgcccgaagtgaccctcggattactgcccggagcccgaggcacccagcttctgccaaggttgacgggcgtgccagcagctctggatttgattacctctggtcgccgaattctggctgatgaagccctgaaactaggtatactggataaggtggtaaactccgatccggttgaggaggcaatcagatttgctcagcgcgtgtctgatcaaccactggagagtagaagactttgcaataagccgatccagagcctgcccaatatggatagcatcttctccgaggccctcctcaaaatgaggaggcaacatcctggatgtctcgcccaggaggcatgtgtacgtgctgtgcaggctgccgtccagtacccatatgaggtaggaatcaagaaggaagaggagctgtttctctacctactccagtctggccaggctcgcgcactgcaatacgccttcttcgcggagaggaaggccaacaaatggtcgacaccatctggtgcgtcttggaagaccgcctcggccagacccgtgagttccgtgggcgtcgttggacttggcaccatgggaagaggaatcgtgatttcctttgctagggcccgaatcccagttatcgcagtggatagcgataaaaaccagctggccaccgcaaataaaatgattaccagtgttctggagaaagaggcaagtaaaatgcaacaaagcggccatccgtggagcggacccaaacctaggctgacatcctcggtgaaggaactcggcggagtcgacctcgtgatcgaggctgtttttgaggaaatgtctctaaaaaagcaggtttttgctgagctgagcgcagtctgcaagccagaggcctttttgtgcaccaacaccagcgcactggatgtggacgagattgcgagcagcacagacagaccgcacctggttattggcacacacttcttttcgccagcacacgtcatgaaactcctggaagtcatccccagtcaatattcctctcccaccactatcgcaacagtgatgaacctgtctaagaagataaaaaagatcggcgtagttgtgggaaattattcagtctccaagaaaaagaagaagaaaaaaaaatag

SEQ ID NO: 122616 - DNA, 1464 bp, Artificial Sequence
  derived and/or modified sequence
atggccgagtacaccagactgcacaacgccctggccctgatcagactgagaaacccccccgtgaacgccatcagcaccaccctgctgagagacatcaaggagggcctgcagaaggccgtgatcgaccacaccatcaaggccatcgtgatctgcggcgccgagggcaagttcagcgccggcgccgacatcagaggcttcagcgcccccagaaccttcggcctgaccctgggccacgtggtggacgagatccagagaaacgagaagcccgtggtggccgccatccagggcatggccttcggcggcggcctggagctggccctgggctgccactacagaatcgcccacgccgaggcccaggtgggcctgcccgaggtgaccctgggcctgctgcccggcgccagaggcacccagctgctgcccagactgaccggcgtgcccgccgccctggacctgatcaccagcggcagaagaatcctggccgacgaggccctgaagctgggcatcctggacaaggtggtgaacagcgaccccgtggaggaggccatcagattcgcccagagagtgagcgaccagcccctggagagcagaagactgtgcaacaagcccatccagagcctgcccaacatggacagcatcttcagcgaggccctgctgaagatgagaagacagcaccccggctgcctggcccaggaggcctgcgtgagagccgtgcaggccgccgtgcagtacccctacgaggtgggcatcaagaaggaggaggagctgttcctgtacctgctgcagagcggccaggccagagccctgcagtacgccttcttcgccgagagaaaggccaacaagtggagcacccccagcggcgccagctggaagaccgccagcgccagacccgtgagcagcgtgggcgtggtgggcctgggcaccatgggcagaggcatcgtgatcagcttcgccagagccagaatccccgtgatcgccgtggacagcgacaagaaccagctggccaccgccaacaagatgatcaccagcgtgctggagaaggaggccagcaagatgcagcagagcggccacccctggagcggccccaagcccagactgaccagcagcgtgaaggagctgggcggcgtggacctggtgatcgaggccgtgttcgaggagatgagcctgaagaagcaggtgttcgccgagctgagcgccgtgtgcaagcccgaggccttcctgtgcaccaacaccagcgccctggacgtggacgagatcgccagcagcaccgacagaccccacctggtgatcggcacccacttcttcagccccgcccacgtgatgaagctgctggaggtgatccccagccagtacagcagccccaccaccatcgccaccgtgatgaacctgagcaagaagatcaagaagatcggcgtggtggtgggcaactacagcgtgagcaagaagaagaagaagaagaagaagtag

SEQ ID NO: 122617 - DNA, 3850 bp, Artificial Sequence
  derived and/or modified sequence
gaggaggccgggcgcgcccggaaaagtggtttgcctgacggcgagaggcagaggtgccctcggtgatagaggaaacatggccgagtatacgcggctgcacaacgccttggcgctaatccgcctccgaaacccgccggtcaacgcgatcagtacgactttactccgtgacataaaagaaggactacagaaagctgtaatagaccatacaataaaagccattgtgatttgtggagcagagggcaaattttctgcaggtgctgatattcgtggcttcagtgctcctaggacatttggccttacactgggacatgtagtagatgaaatacagagaaatgagaagcccgtggtggcagcaatccaaggcatggctttcggagggggactagagctggccctgggctgtcactataggattgcccacgcagaggctcaagttggcttaccagaagttacactgggacttctccctggtgcaagaggaacccagcttctccccagactcactggagttcctgctgcacttgacttaattacctcaggaagacgtattttagcagatgaagcactcaagctgggcattctagataaagttgtaaactcagacccggttgaagaagcaatcagatttgctcagagagtttcagatcaacctctagaatcccgtagactctgcaacaagccaattcagagcttgcccaacatggacagcatttttagtgaggccctcttgaagatgcggaggcagcaccctgggtgtcttgcacaggaggcttgtgtccgtgcagtccaggctgctgtgcagtatccctatgaagtgggcatcaagaaggaggaggagctgtttctatatcttttgcaatcagggcaggctagagccctgcaatatgctttcttcgctgaaaggaaagcaaataagtggtcaactccctccggagcatcgtggaaaacagcatcagcgcggcctgtctcctcagttggtgttgttggcttgggaacaatgggccgaggcattgtcatttcttttgcaagggccaggattcctgtgattgctgtagactcggacaaaaaccagctagcaactgcaaacaagatgataacctctgtcttggaaaaagaagcctccaaaatgcaacagagcggccacccttggtcaggaccaaaacccaggttaacttcatctgtgaaggagcttggtggtgtagatttagtcattgaagcagtatttgaggaaatgagcctgaagaagcaggtctttgctgaactctcagctgtgtgcaaaccagaagcatttttgtgcactaatacttcagccctggatgttgatgagattgcttcttccactgatcgtcctcacttggtcattggcacccacttcttttcgccagctcatgtcatgaagttgttagaggttattcccagccaatactcttcccccactaccattgccactgttatgaacttatcaaaaaagattaaaaagattggagtcgttgtaggcaactgttttggatttgtggggaatcgaatgttgaatccttactacaatcaggcatatttcttgttagaagaaggcagcaaaccagaggaggtagatcaggtgctggaagagtttggttttaaaatgggaccttttagagtgtctgatcttgctgggttggatgtgggctggaaatctagaaaggggcaaggtcttactggacctacattgcttccaggaactcctgcccgaaaaaggggtaataggaggtactgcccaattcctgatgtgctctgtgaattaggacgatttggccagaagacaggtaagggttggtatcaatatgacaagccattgggtaggattcacaaacctgatccctggctttccaaattcctatcacggtatagaaaaacccatcacattgaaccacgtaccattagccaggatgagatccttgaacgctgcttatattcacttatcaatgaagcattccgtatcttgggagaagggatagctgctagcccagagcacattgatgttgtctatttacatggatatggatggccaaggcacaagggcgggcccatgttctatgcttccacagttgggttgcccacagttctagagaaattgcagaaatattacaggcagaaccctgatattccccaactggagccaagtgactatctaaaaaaactggcttctcagggaaaccctcccctgaaagaatggcaaagcttggcaggctcccctagcagtaaattgtgattcagtcttccagattatgcctcacatgctagcatcaggtaatgctgactgaatttcagtgaaattaaatcaaaaatccaaagtaagattgttctgaaatacaaagcaaaataaataatcattagaatcttctgtgtaacgactctaatggtcaaatctttaggaatgtgcttcctatgcctctgaatctgtccttatcagataaattcaatgcatgaacttgtgtgaatataataccataatagctaatgaaagaggctcaggcataagttgagattctcaaatgcttttatcattggataaatgtgtcatcaattaataaatgataaatgcagctaagtcatacattcattttgactcctttcaatgtcacacacatagtattgatcagaaatcttatgaatcatacatacactcaacaaacattaaagttgtaggaaaaagacagttggaaattggtaagggaactgagtacttcaaaccagcacagggaacttaggttagtgtggcaagcctttcctcttctggtctttcctcttctgtttatggagaaataatagaaagtagtaagtcgttaacttagtgtaagaagggtcttagagaacatctaaccttctaggatttcccaattctgtgatagagtaatgacaccagttttcctgtcatgacaagcctctgtgatgttacatatggaaatggttgaatcttgaaaaatctaaaattgttgcaaaacatattttgtatgattttgttgtaagagttcttctctttttactttttgccttgtgtagttaaaaattaaggggctggtcaatacaaaaacttgtacacaaatatttatagcagaattattcataatggccaaaagctgaatacaacccaaatgtctatgaactaatgaatagataaaccaaatctggtatatccatacaatggactatattattcagccataaaaagaaataaagggccaggcacagtggctcacacctgtaatcccagcactttgggaggctgaggcaggaggattgtttgaggccagaaatttgagaccagcctgggcaacatagcaaaaccctgtctctacaaaaaatactttccgtacattagtggttgcctaaggctagaattgggggtgatgaatggggagtacaggattcatctaatgggtacaggatttctttatggttcatgaaaatggtctaaacttattgtggtaatggtcacataacaatatattaaaaaccattgagttgtatattttaagtgggtgaattatatggtatgtgaattatatctcaataaagttgttagtaaataaatggggctgaagatgttatccttcattgtggtgtaaatgaactttcacaatattttcacctgtgaacccaaataaaatgattaaagttctgatggaaaaatcttgaatggagtataagttttccgttgttaaaaagcaaacaaaaaaccaacaaaaaatccaagtgtgccttgaattgtacagagcacaattattatgtttgaaatgtgtactacttaattttatataatttggtttgtgaaattaaagacatcaataaaaatgattcctgaaagtagtaa

SEQ ID NO: 122618 - DNA, 2577 bp, Artificial Sequence
  derived and/or modified sequence
gaggtgccctcggtgatagaggaaacatggccgagtatacgcggctgcacaacgccttggcgctaatccgcctccgaaacccgccggtcaacgcgatcaggtaacgggctcggtcgcctccagcccggggaccgtgcgggccttagccgccctctggctccggaggctttgactctcccccgtcggtttaaaccgagaaggacactcaagagttgagcaactgtacgactttactccgtgacataaaagaaggactacagaaagctgtaatagaccatacaataaaagccattgtgatttgtggagcagagggcaaattttctgcaggtgctgatattcgtggcttcagtgctcctaggacatttggccttacactgggacatgtagtagatgaaatacagagaaatgagaagcccgtggtggcagcaatccaaggcatggctttcggagggggactagagctggccctgggctgtcactataggattgcccacgcagaggctcaagttggcttaccagaagttacactgggacttctccctggtgcaagaggaacccagcttctccccagactcactggagttcctgctgcacttgacttaattacctcaggaagacgtattttagcagatgaagcactcaagctgggcattctagataaagttgtaaactcagacccggttgaagaagcaatcagatttgctcagagagtttcagatcaacctctagaatcccgtagactctgcaacaagccaattcagagcttgcccaacatggacagcatttttagtgaggccctcttgaagatgcggaggcagcaccctgggtgtcttgcacaggaggcttgtgtccgtgcagtccaggctgctgtgcagtatccctatgaagtgggcatcaagaaggaggaggagctgtttctatatcttttgcaatcagggcaggctagagccctgcaatatgctttcttcgctgaaaggaaagcaaataagtggtcaactccctccggagcatcgtggaaaacagcatcagcgcggcctgtctcctcagttggtgttgttggcttgggaacaatgggccgaggcattgtcatttcttttgcaagggccaggattcctgtgattgctgtagactcggacaaaaaccagctagcaactgcaaacaagatgataacctctgtcttggaaaaagaagcctccaaaatgcaacagagcggccacccttggtcaggaccaaaacccaggttaacttcatctgtgaaggagcttggtggtgtagatttagtcattgaagcagtatttgaggaaatgagcctgaagaagcaggtctttgctgaactctcagctgtgtgcaaaccagaagcatttttgtgcactaatacttcagccctggatgttgatgagattgcttcttccactgatcgtcctcacttggtcattggcacccacttcttttcgccagctcatgtcatgaagttgttagaggttattcccagccaatactcttcccccactaccattgccactgttatgaacttatcaaaaaagattaaaaagattggagtcgttgtaggcaactgttttggatttgtggggaatcgaatgttgaatccttactacaatcaggcatatttcttgttagaagaaggcagcaaaccagaggaggtagatcaggtgctggaagagtttggttttaaaatgggaccttttagagtgtctgatcttgctgggttggatgtgggctggaaatctagaaaggggcaaggtcttactggacctacattgcttccaggaactcctgcccgaaaaaggggtaataggaggtactgcccaattcctgatgtgctctgtgaattaggacgatttggccagaagacaggtaagggttggtatcaatatgacaagccattgggtaggattcacaaacctgatccctggctttccaaattcctatcacggtatagaaaaacccatcacattgaaccacgtaccattagccaggatgagatccttgaacgctgcttatattcacttatcaatgaagcattccgtatcttgggagaagggatagctgctagcccagagcacattgatgttgtctatttacatggatatggatggccaaggcacaagggcgggcccatgttctatgcttccacagttgggttgcccacagttctagagaaattgcagaaatattacaggcagaaccctgatattccccaactggagccaagtgactatctaaaaaaactggcttctcagggaaaccctcccctgaaagaatggcaaagcttggcaggctcccctagcagtaaattgtgattcagtcttccagattatgcctcacatgctagcatcaggtaatgctgactgaatttcagtgaaattaaatcaaaaatccaaagtaagattgttctgaaatacaaagcaaaataaataatcattagaatcttctgtgtaacgactctaatggtcaaatctttaggaatgtgcttcctatgcctctgaatctgtccttatcagataaattcaatgcatgaacttgtgtgaatataataccataatagctaatgaaaga

SEQ ID NO: 122619 - DNA, 1537 bp, Artificial Sequence
  derived and/or modified sequence
gaggaggccgggcgcgcccggaaaagtggtttgcctgacggcgagaggcagaggtgccctcggtgatagaggaaacatggccgagtatacgcggctgcacaacgccttggcgctaatccgcctccgaaacccgccggtcaacgcgatcagtacgactttactccgtgacataaaagaaggactacagaaagctgtaatagaccatacaataaaagccattgtgatttgtggagcagagggcaaattttctgcaggtgctgatattcgtggcttcagtgctcctaggacatttggccttacactgggacatgtagtagatgaaatacagagaaatgagaagcccgtggtggcagcaatccaaggcatggctttcggagggggactagagctggccctgggctgtcactataggattgcccacgcagaggctcaagttggcttaccagaagttacactgggacttctccctggtgcaagaggaacccagcttctccccagactcactggagttcctgctgcacttgacttaattacctcaggaagacgtattttagcagatgaagcactcaagctgggcattctagataaagttgtaaactcagacccggttgaagaagcaatcagatttgctcagagagtttcagatcaacctctagaatcccgtagactctgcaacaagccaattcagagcttgcccaacatggacagcatttttagtgaggccctcttgaagatgcggaggcagcaccctgggtgtcttgcacaggaggcttgtgtccgtgcagtccaggctgctgtgcagtatccctatgaagtgggcatcaagaaggaggaggagctgtttctatatcttttgcaatcagggcaggctagagccctgcaatatgctttcttcgctgaaaggaaagcaaataagtggtcaactccctccggagcatcgtggaaaacagcatcagcgcggcctgtctcctcagttggtgttgttggcttgggaacaatgggccgaggcattgtcatttcttttgcaagggccaggattcctgtgattgctgtagactcggacaaaaaccagctagcaactgcaaacaagatgataacctctgtcttggaaaaagaagcctccaaaatgcaacagagcggccacccttggtcaggaccaaaacccaggttaacttcatctgtgaaggagcttggtggtgtagatttagtcattgaagcagtatttgaggaaatgagcctgaagaagcaggtctttgctgaactctcagctgtgtgcaaaccagaagcatttttgtgcactaatacttcagccctggatgttgatgagattgcttcttccactgatcgtcctcacttggtcattggcacccacttcttttcgccagctcatgtcatgaagttgttagaggttattcccagccaatactcttcccccactaccattgccactgttatgaacttatcaaaaaagattaaaaagattggagtcgttgtaggcaactactctgtctcaaaaaaaaaaaaaaaaaaaaaaaag

SEQ ID NO: 122620 - protein, 407 aa, Artificial Sequence
  derived and/or modified sequence
MSGGSADYNREHGGPEGMDPDGVIESNWNEIVDNFDDMNLKESLLRGIYAYGFEKPSAIQQRAIIPCIKGYDVIAQAQSGTGKTATFAISILQQLEIEFKETQALVLAPTRELAQQIQKVILALGDYMGATCHACIGGTNVRNEMQKLQAEAPHIVVGTPGRVFDMLNRRYLSPKWIKMFVLDEADEMLSRGFKDQIYEIFQKLNTSIQVVLLSATMPTDVLEVTKKFMRDPIRILVKKEELTLEGIKQFYINVEREEWKLDTLCDLYETLTITQAVIFLNTRRKVDWLTEKMHARDFTVSALHGDMDQKERDVIMREFRSGSSRVLITTDLLARGIDVQQVSLVINYDLPTNRENYIHRIGRGGRFGRKGVAINFVTEEDKRILRDIETFYNTTVEEMPMNVADLI

SEQ ID NO: 122621 - protein, 312 aa, Artificial Sequence
  derived and/or modified sequence
MLTVLRSLPLFSRELLFPVLKIQKVILALGDYMGATCHACIGGTNVRNEMQKLQAEAPHIVVGTPGRVFDMLNRRYLSPKWIKMFVLDEADEMLSRGFKDQIYEIFQKLNTSIQVVLLSATMPTDVLEVTKKFMRDPIRILVKKEELTLEGIKQFYINVEREEWKLDTLCDLYETLTITQAVIFLNTRRKVDWLTEKMHARDFTVSALHGDMDQKERDVIMREFRSGSSRVLITTDLLARGIDVQQVSLVINYDLPTNRENYIHRIGRGGRFGRKGVAINFVTEEDKRILRDIETFYNTTVEEMPMNVADLI

SEQ ID NO: 122622 - protein, 408 aa, Artificial Sequence
  derived and/or modified sequence
MSGGSADYNSREHGGPEGMDPDGVIESNWNEIVDNFDDMNLKESLLRGIYAYGFEKPSAIQQRAIIPCIKGYDVIAQAQSGTGKTATFAISILQQLEIEFKETQALVLAPTRELAQQIQKVILALGDYMGATCHACIGGTNVRNEMQKLQAEAPHIVVGTPGRVFDMLNRRYLSPKWIKMFVLDEADEMLSRGFKDQIYEIFQKLNTSIQVVLLSATMPTDVLEVTKKFMRDPIRILVKKEELTLEGIKQFYINVEREEWKLDTLCDLYETLTITQAVIFLNTRRKVDWLTEKMHARDFTVSALHGDMDQKERDVIMREFRSGSSRVLITTDLLARGIDVQQVSLVINYDLPTNRENYIHRIGRGGRFGRKGVAINFVTEEDKRILRDIETFYNTTVEEMPMNVADLI

SEQ ID NO: 122623 - protein, 57 aa, Artificial Sequence
  derived and/or modified sequence
MSGGSADYNREHGGPEGMDPDGVIESNWNEIVDNFDDMNLKESLLRGIYAYGFEKPS

SEQ ID NO: 122624 - protein, 98 aa, Artificial Sequence
  derived and/or modified sequence
MSGGSADYNREHGGPEGMDPDGVIESNWNEIVDNFDDMNLKESLLRGIYAYGFEKPSAIQQRAIIPCIKGYDVIAQAQSGTGKTATFAISILQQLEIE

SEQ ID NO: 122625 - DNA, 1919 bp, Artificial Sequence
  derived and/or modified sequence
tataaaaaacgggtggttgggcgccgctgtcttttcagtcgggcgctgagtggtttttcggatcatgtctggtggctccgcggattataacagagaacatggcggcccagagggaatggaccccgatggtgtcatcgagagcaactggaatgagattgttgataactttgatgatatgaatttaaaggagtctctccttcgtggcatctatgcttacggttttgagaagccttccgctattcagcagagagctattattccctgtattaaagggtatgatgtgattgctcaagctcagtcaggtactggcaagacagccacatttgctatttccatcctgcaacagttggagattgagttcaaggagacccaagcactagtattggcccccaccagagaactggctcaacagatccaaaaggtaattctggcacttggagactatatgggagccacttgtcatgcctgcattggtggaacaaatgttcgaaatgaaatgcaaaaactgcaggctgaagcaccacatattgttgttggtacacccgggagagtgtttgatatgttaaacagaagatacctttctccaaaatggatcaaaatgtttgttttggatgaagcagatgaaatgttgagccgtggttttaaggatcaaatctatgagattttccaaaaactaaacacaagtattcaggttgtgttgctttctgccacaatgccaactgatgtgttggaagtgaccaaaaaattcatgagagatccaattcgaattctggtgaaaaaggaagaattgacccttgaaggaatcaaacagttttatattaatgttgagagagaggaatggaagttggatacactttgtgacttgtacgagacactgaccattacacaggctgttatttttctcaatacgaggcgcaaggtggactggctgactgagaagatgcatgccagagacttcacagtttctgctctgcatggtgacatggaccagaaggagagagatgttatcatgagggaattccggtcagggtcaagtcgtgttctgatcactactgacttgttggctcgcgggattgatgtgcaacaagtgtctttggttataaattatgatctacctaccaatcgtgaaaactatattcacagaattggcagagggggtcgatttgggaggaaaggtgtggctataaactttgttactgaagaagacaagaggattcttcgtgacattgagactttctacaatactacagtggaggagatgcccatgaatgtggctgaccttatttaattcctgggatgagagttttggatgcagtgctcgctgttgctgaataggcgatcacaacgtgcattgtgcttctttctttgggaatatttgaatcttgtctcaatgctcataacggatcagaaatacagattttgatagcaaagcgacgttagtcgtgagctcttgtgaggaaagtcattggctttatcctctttagagttagactgttggggtgggtataaaagatggggtctgtaaaatctttctttcttagaaatttatttcctagttctgtagaaatggttgtattagatgttctctatcatttaataatatacttgtggactaaaagatataagtgctgtataaaatcagccaattatgttaaactagcatatctgcctttattgtgtttgtcattagcctgagtagaaaggcctttaaaatttttttagaaagcatttgaatgcattttgtttggtattgtatttattcaataaagtatttaattagtgctaagtgtgaactggaccctgttgctaagccccagcaagcaatcctaggtagggtttaatccccagtaaaattgccatattgcacatgtcttaatgaagtttgaatgttaaataaattgtatattcactttaaaggt

SEQ ID NO: 122626 - DNA, 1726 bp, Artificial Sequence
  derived and/or modified sequence
tggtttttcggatcatgtctggtggctccgcggattataacagcagagaacatggcggcccagagggaatggaccccgatggtgtcatcgagagcaactggaatgagattgttgataactttgatgatatgaatttaaaggagtctctccttcgtggcatctatgcttacggttttgagaagccttccgctattcagcagagagctattattccctgtattaaagatccaaaaggtaattctggcacttggagactatatgggagccacttgtcatgcctgcattggtggaacaaatgttcgaaatgaaatgcaaaaactgcaggctgaagcaccacatattgttgttggtacacccgggagagtgtttgatatgttaaacagaagatacctttctccaaaatggatcaaaatgtttgttttggatgaagcagatgaaatgttgagccgtggttttaaggatcaaatctatgagattttccaaaaactaaacacaagtattcaggttgtgttgctttctgccacaatgccaactgatgtgttggaagtgaccaaaaaattcatgagagatccaattcgaattctggtgaaaaaggaagaattgacccttgaaggaatcaaacagttttatattaatgttgagagagaggaatggaagttggatacactttgtgacttgtacgagacactgaccattacacaggctgttatttttctcaatacgaggcgcaaggtggactggctgactgagaagatgcatgccagagacttcacagtttctgctctgcatggtgacatggaccagaaggagagagatgttatcatgagggaattccggtcagggtcaagtcgtgttctgatcactactgacttgttggctcgcgggattgatgtgcaacaagtgtctttggttataaattatgatctacctaccaatcgtgaaaactatattcacagaattggcagagggggtcgatttgggaggaaaggtgtggctataaactttgttactgaagaagacaagaggattcttcgtgacattgagactttctacaatactacagtggaggagatgcccatgaatgtggctgaccttatttaattcctgggatgagagttttggatgcagtgctcgctgttgctgaataggcgatcacaacgtgcattgtgcttctttctttgggaatatttgaatcttgtctcaatgctcataacggatcagaaatacagattttgatagcaaagcgacgttagtcgtgagctcttgtgaggaaagtcattggctttatcctctttagagttagactgttggggtgggtataaaagatggggtctgtaaaatctttctttcttagaaatttatttcctagttctgtagaaatggttgtattagatgttctctatcatttaataatatacttgtggactaaaagatataagtgctgtataaaatcagccaattatgttaaactagcatatctgcctttattgtgtttgtcattagcctgagtagaaaggcctttaaaatttttttagaaagcatttgaatgcattttgtttggtattgtatttattcaataaagtatttaattagtgctaagtgtgaactggaccctgttgctaagccccagcaagcaatcctaggtagggtttaatccccagtaaaattgccatattgcacatgtcttaatgaagtttgaatgttaaataaattgtatattcacttt

SEQ ID NO: 122627 - DNA, 1889 bp, Artificial Sequence
  derived and/or modified sequence
cttttcagtcgggcgctgagtggtttttcggatcatgtctggtggctccgcggattataacagcagagaacatggcggcccagagggaatggaccccgatggtgtcatcgagagcaactggaatgagattgttgataactttgatgatatgaatttaaaggagtctctccttcgtggcatctatgcttacggttttgagaagccttccgctattcagcagagagctattattccctgtattaaagggtatgatgtgattgctcaagctcagtcaggtactggcaagacagccacatttgctatttccatcctgcaacagttggagattgagttcaaggagacccaagcactagtattggcccccaccagagaactggctcaacagatccaaaaggtaattctggcacttggagactatatgggagccacttgtcatgcctgcattggtggaacaaatgttcgaaatgaaatgcaaaaactgcaggctgaagcaccacatattgttgttggtacacccgggagagtgtttgatatgttaaacagaagatacctttctccaaaatggatcaaaatgtttgttttggatgaagcagatgaaatgttgagccgtggttttaaggatcaaatctatgagattttccaaaaactaaacacaagtattcaggttgtgttgctttctgccacaatgccaactgatgtgttggaagtgaccaaaaaattcatgagagatccaattcgaattctggtgaaaaaggaagaattgacccttgaaggaatcaaacagttttatattaatgttgagagagaggaatggaagttggatacactttgtgacttgtacgagacactgaccattacacaggctgttatttttctcaatacgaggcgcaaggtggactggctgactgagaagatgcatgccagagacttcacagtttctgctctgcatggtgacatggaccagaaggagagagatgttatcatgagggaattccggtcagggtcaagtcgtgttctgatcactactgacttgttggctcgcgggattgatgtgcaacaagtgtctttggttataaattatgatctacctaccaatcgtgaaaactatattcacagaattggcagagggggtcgatttgggaggaaaggtgtggctataaactttgttactgaagaagacaagaggattcttcgtgacattgagactttctacaatactacagtggaggagatgcccatgaatgtggctgaccttatttaattcctgggatgagagttttggatgcagtgctcgctgttgctgaataggcgatcacaacgtgcattgtgcttctttctttgggaatatttgaatcttgtctcaatgctcataacggatcagaaatacagattttgatagcaaagcgacgttagtcgtgagctcttgtgaggaaagtcattggctttatcctctttagagttagactgttggggtgggtataaaagatggggtctgtaaaatctttctttcttagaaatttatttcctagttctgtagaaatggttgtattagatgttctctatcatttaataatatacttgtggactaaaagatataagtgctgtataaaatcagccaattatgttaaactagcatatctgcctttattgtgtttgtcattagcctgagtagaaaggcctttaaaatttttttagaaagcatttgaatgcattttgtttggtattgtatttattcaataaagtatttaattagtgctaagtgtgaactggaccctgttgctaagccccagcaagcaatcctaggtagggtttaatccccagtaaaattgccatattgcacatgtcttaatgaagtttgaatgttaaataaattgtatattcactttaaa

SEQ ID NO: 122628 - DNA, 480 bp, Artificial Sequence
  derived and/or modified sequence
gaacagcatctccggtttccgcctccggctccggcgcggctcccccggcccgcctctgcgtcagggacgcggaaaccccgtaggagcagggcgggcggggaaagcgaggtttaactaactccgcagctatattcttccgccgcgaggattttatccgaggtaacgaccccaggatcacaattttgtagctgaccgaagcacggcgagaaaattcctccgcaagaaacgggttccggccacgagcctataaaaaacgggtggttgggcgccgctgtcttttcagtcgggcgctgagtggtttttcggatcatgtctggtggctccgcggattataacagagaacatggcggcccagagggaatggaccccgatggtgtcatcgagagcaactggaatgagattgttgataactttgatgatatgaatttaaaggagtctctccttcgtggcatctatgcttacggttttgagaagccttcc

SEQ ID NO: 122629 - DNA, 600 bp, Artificial Sequence
  derived and/or modified sequence
aaagcgaggtttaactaactccgcagctatattcttccgccgcgaggtaaagagtcccaacccaaccccgggccctaggatttccagcgaccctgtaatatcgagaaattaccacatttgggtttttctaccaacttgcttaggattttatccgaggtaacgaccccaggatcacaattttgtagctgaccgaagcacggcgagaaaattcctccgcaagaaacgggttccggccacgagcctataaaaaacgggtggttgggcgccgctgtcttttcagtcgggcgctgagtggtttttcggatcatgtctggtggctccgcggattataacagagaacatggcggcccagagggaatggaccccgatggtgtcatcgagagcaactggaatgagattgttgataactttgatgatatgaatttaaaggagtctctccttcgtggcatctatgcttacggttttgagaagccttccgctattcagcagagagctattattccctgtattaaagggtatgatgtgattgctcaagctcagtcaggtactggcaagacagccacatttgctatttccatcctgcaacagttggagattgag

SEQ ID NO: 122630 - DNA, 1224 bp, Artificial Sequence
  derived and/or modified sequence
atgtcaggaggtagcgccgactataatcgggaacatggcggaccagaggggatggaccccgacggtgtcatcgaatctaattggaatgagatcgttgataactttgatgatatgaaccttaaggagtcccttctgcgcggaatatatgcatacggatttgaaaagcctagtgctatccagcaaagagctatcatcccttgtatcaaaggctatgatgtgattgctcaggctcagagcggcacaggcaagaccgcaacgtttgctatcagcatcctgcagcagctggaaatagaattcaaagagacccaggccctggtgctggcgccaactcgagaactagcccagcaaatccagaaagtcattctggcactgggagactacatgggtgcaacgtgtcatgcctgcatcggaggcacgaacgttcgtaatgagatgcaaaagctgcaggccgaggccccacatattgttgtcggaaccccgggacgggttttcgatatgctcaaccgccgatatctgtcgccaaagtggattaagatgttcgttctggacgaggcagatgaaatgttgagcaggggctttaaagatcagatttacgaaatatttcagaaactgaacaccagcattcaggtggttcttctgtccgccactatgccgaccgatgtcctggaggttacgaaaaaatttatgcgtgatcctatacggatcctggtgaagaaggaagagttaacactggagggcattaagcagttttacattaatgttgagagggaagagtggaagctcgacaccctgtgtgatttgtacgagaccctgacaataactcaggctgtgatatttctaaataccagacggaaggttgattggttaaccgagaaaatgcacgcacgagattttactgtttccgcgcttcatggagacatggaccagaaggaaagagatgtaataatgcgcgagttccgctccggatcaagtagggtgctgatcaccaccgatctgctagccagaggcatcgatgtgcagcaagtaagccttgtgatcaactacgatctccctactaatagggaaaattacatacatcggattgggaggggaggcaggtttggtcgcaagggagtcgccataaatttcgtgacagaggaagataagcgcattttgagagacatcgaaactttctacaataccacagtggaagagatgcccatgaatgtagccgacttgatttag

SEQ ID NO: 122631 - DNA, 939 bp, Artificial Sequence
  derived and/or modified sequence
atgctaactgtgctgcgcagtcttccattgttttcccgggaacttctgtttcctgtgcttaagatacagaaagtgattttggcgctgggggattacatgggggcgacctgtcacgcctgcattggcggcactaacgttaggaacgaaatgcagaaactgcaagcagaagccccgcacatcgtagtcggaacccccggacgagtgttcgatatgctaaaccggagatatctgtcccctaagtggattaaaatgttcgttctggatgaagctgatgagatgctctctagaggatttaaggatcaaatctacgaaattttccagaaactcaacaccagtatccaagttgtgttgctttccgccacaatgcccacagacgttcttgaagttacaaaaaagtttatgcgagatccaataagaattcttgtcaagaaagaggaactgactctcgaagggatcaagcagttttacattaatgtagaaagagaggagtggaagctcgacaccctttgtgatctgtatgaaaccctgacgatcacgcaggcagtcatctttttaaataccagacggaaagtggactggctgacagagaagatgcatgctcgcgatttcacggtgtccgcattgcatggcgacatggaccagaaggagcgggacgttattatgcgcgaattccggtccggcagctctcgggtgttaattactacagatctgctcgctaggggcatcgacgtgcagcaagtgtcactagtgatcaattatgatttgcccacgaatagagaaaattacatacaccgcattgggcgcgggggccggttcgggcggaagggtgtggctattaactttgtcaccgaggaggataaacgtattctgagggacatcgagaccttctacaacaccactgtggaggaaatgcctatgaacgttgcggacctaatttag

SEQ ID NO: 122632 - DNA, 1227 bp, Artificial Sequence
  derived and/or modified sequence
atgagcggaggctcagccgattataacagccgtgagcacggaggcccggaagggatggaccccgatggggtgattgaatcaaactggaatgaaatcgtggataacttcgacgatatgaatttaaaagagtccctgctccggggcatttatgcatacggattcgagaaaccaagcgctatccaacaaagagccatcatcccttgcattaaagggtatgatgtgatcgcacaggcccagagtggaacgggcaaaacagcaacctttgctatcagcatcctccagcagctcgagatcgaatttaaggaaacacaagcactcgtgttagcgcccacgagggagcttgcacagcagatacagaaggtcatcctagcactcggggactatatgggggccacctgccacgcctgtattggcggcaccaatgtccgcaacgaaatgcagaagctgcaggctgaggctccacacattgtagtgggcaccccaggccgggtgtttgatatgcttaaccggcgatacctgtcaccaaagtggatcaaaatgtttgtgttggacgaggccgatgagatgctgagtcgcggtttcaaggatcaaatttacgaaattttccagaagcttaatacgtcaatccaggtggtcttactaagcgccacaatgcccactgacgtgttagaggtgactaagaaatttatgagagaccctattcgcatcctagtgaaaaaagaagaactcacactagaaggcatcaaacaattttatatcaacgtcgagcgcgaggagtggaagctggataccctctgcgacctgtacgagaccctgacaatcactcaagcagtgatctttttgaacacccggaggaaggtcgactggctgaccgaaaagatgcacgcacgagacttcacggtgagtgcgctccatggtgatatggaccaaaaagagcgtgatgtgattatgcgggaatttcggagcggctcatcacgcgtgctgattaccacggatcttctggctcgcggcattgacgttcaacaggttagcttagttataaattacgatttgcccacgaatagagagaattatatccaccggattggtaggggtggaaggttcgggcgcaagggggtggccatcaatttcgtaacggaggaggacaagagaattctcagagatatagagaccttctataataccaccgtcgaagagatgccaatgaacgtggctgatctaatctag

SEQ ID NO: 122633 - DNA, 174 bp, Artificial Sequence
  derived and/or modified sequence
atgtctggagggtccgccgattacaatagggaacacggcggtcctgaaggcatggatcctgatggggtcattgagtccaattggaatgagatcgttgacaatttcgacgatatgaatcttaaggagagcctcctgcgggggatatatgcttacgggttcgagaagccttcttag

SEQ ID NO: 122634 - DNA, 297 bp, Artificial Sequence
  derived and/or modified sequence
atgagcggcggaagtgctgactataatagagagcatggagggcctgagggaatggatcctgacggcgtcattgagagtaactggaatgaaattgttgacaacttcgatgacatgaatctgaaagaatctctgctgcgaggcatatacgcctatgggttcgagaaacccagcgcaatccagcagagggcaattatcccctgcattaaaggttacgacgtgatagctcaggcccaaagtgggacagggaagactgcgacattcgcaatctcaatcctgcaacagctggagattgagtag

SEQ ID NO: 122635 - DNA, 1224 bp, Artificial Sequence
  derived and/or modified sequence
atgtctgggggcagcgctgactacaaccgggagcacggcggccctgagggcatggaccctgatggagtcatcgagagcaactggaatgaaattgtggacaactttgatgacatgaacctgaaggagagcctgctgcggggcatctatgcctacggctttgagaagcccagcgccatccagcagagggccatcatcccctgcatcaagggctatgatgtgattgcccaggcccagagcggcaccgggaagacagccacctttgccatcagcatcctgcagcagctggagattgagttcaaggagacccaggccctggtgctggcccccacccgggagctggcccagcagatccagaaggtgatcctggccctgggggactacatgggcgccacctgccacgcctgcatcggcggcaccaacgtgagaaatgagatgcagaagctgcaggccgaggccccccacatcgtggtgggcaccccaggccgggtgtttgacatgctgaacagacgctacctgagccccaagtggatcaagatgtttgtgctggatgaagcagatgagatgctgagccggggcttcaaggaccagatctatgagatcttccagaagctgaacaccagcatccaggtggtgctgctgagcgccaccatgcccacagatgtgctggaggtgaccaagaagttcatgagggaccccatccgcatcctggtgaagaaggaggagctgaccctggagggcatcaagcagttctacatcaacgtggagcgggaggagtggaagctggacaccctgtgtgacctgtatgagaccctgaccatcacccaggccgtcatcttcctgaacaccaggaggaaggtggactggctgacagagaagatgcacgcccgggacttcaccgtgtctgccctgcacggggacatggaccagaaggagagagatgtgatcatgagggagttccgcagcggcagcagccgggtgctgatcaccacagacctgctggcccggggcattgatgtgcagcaggtgtccctggtgatcaactatgacctgcccaccaaccgggagaactacatccacagaattggccggggcggccgctttggaaggaagggcgtggccatcaactttgtgacagaggaggacaagaggatcctgcgggacatcgagaccttctacaacaccaccgtggaggagatgcccatgaatgtggccgacctgatctag

SEQ ID NO: 122636 - DNA, 939 bp, Artificial Sequence
  derived and/or modified sequence
atgctgactgtgctgcggagcctgcccctcttcagccgggagctgctcttccctgtgctgaagatccagaaggtgatcctggccctgggggactacatgggcgccacctgccacgcctgcattggaggcaccaacgtgagaaatgagatgcagaagctgcaggccgaggccccccacatcgtggtgggcaccccaggccgggtgtttgacatgctgaacagacgctacctgagccccaagtggatcaagatgtttgtgctggatgaagcagatgagatgctgagccggggcttcaaggaccagatctatgagatcttccagaagctgaacaccagcatccaggtggtgctgctgagcgccaccatgcccacagatgtgctggaggtgaccaagaagttcatgagggaccccatccgcatcctggtgaagaaggaggagctgaccctggagggcatcaagcagttctacatcaacgtggagcgggaggagtggaagctggacaccctgtgtgacctgtatgagaccctgaccatcacccaggccgtcatcttcctgaacaccaggaggaaggtggactggctgacagagaagatgcacgcccgggacttcaccgtgtctgccctgcatggagacatggaccagaaggagagagatgtgatcatgagggagttccgcagcggcagcagccgggtgctgatcaccacagacctgctggcccggggcattgatgtgcagcaggtgtccctggtgatcaactatgacctgcccaccaaccgggagaactacatccaccgcatcggccggggcggccgcttcggcaggaaaggagtggccatcaactttgtgacagaggaggacaagaggatcctgcgggacatcgagaccttctacaacaccaccgtggaggagatgcccatgaatgtggccgacctgatctag

SEQ ID NO: 122637 - DNA, 1227 bp, Artificial Sequence
  derived and/or modified sequence
atgtctgggggcagcgctgactacaacagccgggagcacggcggccctgagggcatggaccctgatggagtgattgagagcaactggaatgagatcgtggacaactttgatgacatgaacctgaaggagagcctgctgcggggcatctatgcctacggctttgagaagcccagcgccatccagcagagggccatcatcccctgcatcaagggctatgatgtgattgcccaggcccagagcggcaccgggaagacagccacctttgccatcagcatcctgcagcagctggagattgagttcaaggagacccaggccctggtgctggcccccacccgggagctggcccagcagatccagaaggtgatcctggccctgggggactacatgggcgccacctgccacgcctgcattggaggcaccaacgtgagaaatgagatgcagaagctgcaggccgaggccccccacatcgtggtgggcaccccaggccgggtgtttgacatgctgaacagacgctacctgagccccaagtggatcaagatgtttgtgctggatgaagcagatgagatgctgagccggggcttcaaggaccagatctatgagatcttccagaagctgaacaccagcatccaggtggtgctgctgagcgccaccatgcccacagatgtgctggaggtgaccaagaagttcatgagggaccccatccgcatcctggtgaagaaggaggagctgaccctggagggcatcaagcagttctacatcaacgtggagcgggaggagtggaagctggacaccctgtgtgacctgtatgagaccctgaccatcacccaggccgtcatcttcctgaacaccaggaggaaggtggactggctgacagagaagatgcacgcccgggacttcaccgtgtctgccctgcatggagacatggaccagaaggagagagatgtgatcatgagggagttccgcagcggcagcagccgggtgctgatcaccacagacctgctggcccggggcattgatgtgcagcaggtgtccctggtgatcaactatgacctgcccaccaaccgggagaactacatccaccgcatcggccggggcggccgcttcggcaggaaaggagtggccatcaactttgtgacagaggaggacaagaggatcctgcgggacatcgagaccttctacaacaccaccgtggaggagatgcccatgaatgtggccgacctgatctag

SEQ ID NO: 122638 - DNA, 174 bp, Artificial Sequence
  derived and/or modified sequence
atgtctgggggcagcgctgactacaaccgggagcacggcggccctgagggcatggaccctgatggagtcatcgagagcaactggaatgaaattgtggacaactttgatgacatgaacctgaaggagagcctgctgcggggcatctatgcctacggctttgagaagcccagctag

SEQ ID NO: 122639 - DNA, 297 bp, Artificial Sequence
  derived and/or modified sequence
atgtctgggggcagcgctgactacaaccgggagcacggcggccctgagggcatggaccctgatggagtcatcgagagcaactggaatgaaattgtggacaactttgatgacatgaacctgaaggagagcctgctgcggggcatctatgcctacggctttgagaagcccagcgccatccagcagagggccatcatcccctgcatcaagggctatgatgtgattgcccaggcccagagcggcaccgggaagacagccacctttgccatcagcatcctgcagcagctggagattgaatag

SEQ ID NO: 122640 - DNA, 1224 bp, Artificial Sequence
  derived and/or modified sequence
atgagcggcggcagcgccgactacaaccgggagcacggcggccccgagggtatggaccctgatggagtgatcgagagtaattggaatgaaattgtggataacttcgacgacatgaatctgaaggagagtctattaaggggcatatacgcgtatggcttcgagaagcctagtgcgatccaacagagggccattatcccttgcatcaagggttacgacgtgattgcacaagcccagtccgggacgggaaaaaccgctacatttgcaatatccattttacagcaactagaaatcgagtttaaagagacacaagcattggttttggctcccactcgtgaactggcgcagcaaatccagaaggtgattcttgcactcggggattatatgggcgctacgtgtcacgcatgcatcggcggtacgaacgtccggaatgagatgcagaagcttcaggccgaagctccacacatagtggtaggcacacctggcagggtgtttgatatgctgaaccggagatacctgtctcctaagtggatcaagatgttcgtgctggacgaagcggatgaaatgctatctcggggattcaaggaccagatctatgagatctttcagaaactcaacacctctatccaggtggttttgctgagtgccacaatgcctaccgatgtgctcgaagtaactaaaaagtttatgcgcgatccgattaggattctagtgaagaaagaggaactgacacttgaaggaataaagcagttctatatcaatgtggaaagggaagagtggaagcttgacacactgtgcgacttatacgagactctgactattacacaggcagtgatttttttaaacacacggagaaaagttgactggctcacagaaaagatgcatgcgagagacttcaccgtgtcagctctgcacggggacatggaccagaaggaacgagacgtcattatgagggagttcagaagcggcagttcaagagtcctcatcactactgacctgctcgctcggggcatcgatgtgcagcaagtttcattggtgattaattacgacctccccacaaatcgcgaaaactatatccatagaatcgggcgtggcgggaggttcggaaggaagggcgtagcaatcaatttcgtaaccgaagaagacaagaggatcttacgcgatattgagacattctacaacactaccgtggaggagatgccgatgaacgtggcagatctgatctag

SEQ ID NO: 122641 - DNA, 939 bp, Artificial Sequence
  derived and/or modified sequence
atgctgaccgtgctgcggagcctgcccctgttcagccgggagctgttattccctgtcctgaagatccaaaaggtgatcctggccctcggggactatatgggggcaacttgtcatgcttgcataggcggaacaaatgtgagaaatgagatgcagaaactccaggcagaagctccccatatcgtggtgggcacgccaggaagggtgttcgacatgctaaacaggagatacctgtccccaaagtggataaaaatgttcgtactcgacgaagccgatgagatgttgtcaagaggattcaaggatcagatatatgaaatcttccaaaaactcaataccagcattcaagtcgtactgctatccgcgacgatgcctaccgacgtgctggaggtaactaagaaattcatgcgagatcccattcggatactggtaaaaaaagaggagcttactctggagggtattaagcagttttacattaacgtggaacgtgaagagtggaaactggacactctctgtgatctttacgaaactttgaccatcacacaggccgtgatctttctgaatactcgcagaaaggttgactggctaaccgagaagatgcacgcgagagacttcacagtaagcgctctgcacggggacatggaccagaaagaaagagacgtcatcatgagagaattcaggagcgggtcatcccgggtcctcatcaccacggacctgctggctcgagggatcgatgttcagcaggtaagccttgtgattaactacgacctgcctaccaacagagaaaattacatccacaggattggccggggcggccggttcgggagaaaaggcgtggccattaatttcgtcacggaggaggataagaggatcttgcgggacatagaaacgttttataatacaaccgtggaggaaatgccaatgaatgtggcagacctaatttag

SEQ ID NO: 122642 - DNA, 1227 bp, Artificial Sequence
  derived and/or modified sequence
atgagcggcggcagcgccgactacaacagccgggagcacggcggccctgaaggcatggatcccgacggtgtaatcgaaagcaattggaatgagattgttgataacttcgatgacatgaatctgaaagaatctctgctgcgcggcatttatgcctatgggtttgagaagccgtccgcgatccagcagagggctatcatcccctgcattaaaggttacgacgtgattgcccaggctcagtcaggtactgggaagactgccacctttgctattagcatattgcagcagctcgagatagagttcaaagaaacccaggccctggtgcttgccccaacacgggaattggcacagcagatacagaaggtcatcctcgcccttggtgactacatgggcgcaacatgccatgcatgtataggtgggactaatgttcggaacgagatgcagaaactgcaggctgaggcacctcacattgttgtgggcacaccaggccgagtttttgatatgctgaaccggaggtacttatcccccaaatggatcaaaatgttcgtgctggatgaagccgatgagatgctaagcagaggctttaaggatcagatctatgaaatcttccagaagctcaatactagcattcaggtagtactgctttcagccactatgccaacggacgtccttgaggttacgaaaaagtttatgcgagacccaatccgaattctggtgaagaaggaagagctgacgctggaaggtattaagcagttctacatcaatgtagaaagagaagagtggaagttagatacactgtgcgacttatacgaaaccctgacaattacccaagctgtgatctttcttaatactcgaaggaaggtggattggttaacagagaaaatgcatgcccgggactttaccgtgtccgctctgcatggtgacatggaccaaaaggaaagggacgtgattatgagagagtttcggagcggatccagtagagtcctcattactaccgatctactggccagaggcattgatgtacaacaggtcagcctcgtgattaactacgatctgcccaccaaccgagaaaattacattcaccgtatcgggagggggggacggttcggcagaaagggcgttgccataaattttgtgactgaggaagacaaaaggatccttcgggatatcgagactttctacaatacgaccgtggaagaaatgcccatgaatgtggcggatctgatttag

SEQ ID NO: 122643 - DNA, 174 bp, Artificial Sequence
  derived and/or modified sequence
atgagcggcggcagcgccgactacaaccgggagcacggcggccccgagggtatggacccagacggagtgatcgagtcaaattggaatgaaatcgttgataattttgacgatatgaacctgaaggagtcactcctcaggggtatttatgcatatggatttgaaaaaccatcatag

SEQ ID NO: 122644 - DNA, 297 bp, Artificial Sequence
  derived and/or modified sequence
atgagcggcggcagcgccgactacaaccgggagcacggcggccccgaggggatggatccagatggggttatcgagtccaattggaatgaaattgtggacaattttgatgacatgaacttgaaggagtcactgctgagaggtatatatgcatacgggtttgagaagccctccgccattcagcagagggcaatcattccgtgcatcaaagggtacgacgtcattgctcaggcccagtctggtacaggcaagactgcaacgtttgcgataagcatcttacagcagcttgagatcgagtag

SEQ ID NO: 122645 - DNA, 1224 bp, Artificial Sequence
  derived and/or modified sequence
atgtccggcggtagcgctgactataaccgtgaacatggtggacctgagggaatggaccccgacggtgtaatcgaatctaattggaatgagatcgtagataatttcgacgacatgaacttgaaagaatcactccttcgcggaatttacgcttacggatttgagaagccttcagccatccaacagcgcgcaatcataccatgtattaagggctatgacgtgattgcccaggctcagagcggaaccggcaagactgccacttttgcgatatccattctccagcagctggaaattgaatttaaagaaacccaagcccttgttttggcccctacccgcgagcttgcacagcaaattcaaaaggtcattctggctctgggagattatatgggcgctacttgtcacgcctgtatcggaggaactaacgtacgtaacgaaatgcagaagcttcaagcggaagctccgcacatagtggtcggcactccagggagggtgttcgacatgctcaacagaagatacctgagtcccaagtggattaagatgttcgtcctggacgaggctgacgagatgctttcaaggggatttaaggaccagatatatgagatctttcaaaagctgaacaccagcatccaagtggtgctacttagtgccacaatgccgactgacgtgttagaggtcactaaaaaattcatgcgggatcctatccgcatccttgtcaaaaaagaggagcttactctggagggtataaagcaattctacattaacgtggagagggaagagtggaagcttgataccctctgcgacctctatgagacactaaccattacccaggcggtgatctttctgaacactagaagaaaagtggactggctgactgaaaagatgcacgcccgtgatttcacggtctcagctctgcacggggacatggaccagaaagagagggacgtgatcatgagagagttccggagcggctcttcgagggtcctcatcacaaccgacctgcttgctaggggtattgatgttcagcaagtctccctagttatcaattacgatttgcccacaaacagggagaactacattcacagaattggtcgcggagggcgatttgggcgaaagggagttgctatcaactttgttaccgaggaggataagcgtatcctgagggacattgaaacgttttataacaccacggttgaggagatgccaatgaacgtggcagatctcatttag

SEQ ID NO: 122646 - DNA, 939 bp, Artificial Sequence
  derived and/or modified sequence
atgctaacggtgctccggagtctgccattattctcaagggagctcttatttcccgtgctgaaaatccagaaggttatcctggcactgggcgactacatgggtgccacctgccacgcttgtattggaggcactaacgtcaggaatgagatgcagaagttgcaggccgaggcaccccacatcgtagtaggtaccccaggtcgcgtcttcgatatgcttaatagacggtacttgtcccccaagtggattaagatgtttgtgctcgacgaggccgatgaaatgctatcccggggtttcaaggaccagatttacgaaatctttcagaagttgaataccagtatacaggttgtcctcctcagtgccaccatgcccaccgatgttctggaggtcactaagaagtttatgagagacccaataagaatcctggtgaaaaaagaggagctgactctggagggaataaagcagttctatatcaacgttgaaagagaagaatggaagttggacactctctgcgatctgtatgaaactctaacaatcacacaagcagtgatctttctgaacaccagaaggaaggttgactggctgacagagaagatgcacgcacgtgacttcaccgtgagcgccctgcatggcgacatggatcagaaggagcgggacgtgataatgagagagttccgctccggctccagcagggtcctgatcaccaccgatctcttagctagagggattgacgtgcaacaggtttctcttgtcatcaattatgatttaccaacaaacagagaaaactatatacatcgcattggcaggggtgggaggttcgggaggaagggcgtggcaattaattttgtgactgaagaagacaagcgaattctgcgagacattgaaactttttacaacacgacggtggaggaaatgccaatgaacgtggcagatctcatctag

SEQ ID NO: 122647 - DNA, 1227 bp, Artificial Sequence
  derived and/or modified sequence
atgagcggagggagcgctgattataatagccgcgagcatggaggacctgagggtatggaccccgacggcgtgattgagtcaaactggaatgagatcgtggacaacttcgatgatatgaatttaaaagagtctttactgcggggaatctatgcctacgggttcgagaagcctagcgctatccaacaacgtgccattatcccctgcatcaaagggtacgatgtgatcgctcaggcgcagagcgggacaggcaagactgccacgtttgctatctctatcctccaacaattagaaatagagtttaaggagacccaagccttggtgttggcccctacgcgcgagcttgctcaacaaatccagaaggttattctcgccctgggggactacatgggcgctacatgccacgcttgtatcggagggacaaacgtccgcaacgagatgcaaaaactgcaagctgaagccccacatattgtggtagggacccccggaagggtattcgatatgctcaatcggcgatatctaagccccaagtggataaagatgttcgtgttagatgaagctgacgagatgctatctcggggtttcaaggatcagatctacgagatcttccagaagctgaatacgtcaatccaggtcgtgttgttgagcgcaactatgcctactgatgtgctggaggtcaccaagaaatttatgagggatcctatccgtatcctagttaagaaagaggagttgactctggaagggattaagcagttctatatcaatgtggagcgcgaggagtggaaactcgacaccctatgtgatctttatgaaacactcacaataacgcaggccgtgatctttttaaacacccgcaggaaagtggattggcttaccgaaaaaatgcatgcccgtgatttcaccgtctccgctctgcacggagacatggaccagaaagaaagagacgtaataatgcgggagtttaggtctggctctagcagggtactaatcaccacagatttgctggctcgcggtatcgatgtccagcaagtgagcctcgttataaactatgacctcccaaccaatcgggaaaactacatccataggatcggccgaggaggcagattcggtagaaaaggagtagccatcaattttgtgactgaggaagacaagcgcattctgcgcgatatagaaacattctacaacaccaccgtggaagaaatgccaatgaacgtggccgatttgatctag

SEQ ID NO: 122648 - DNA, 174 bp, Artificial Sequence
  derived and/or modified sequence
atgagcggcggatctgcggattataatcgtgaacacgggggacctgaagggatggaccctgatggtgtgatcgaatccaattggaacgaaatcgtggataactttgatgatatgaacttaaaagagagtttgttgcggggaatttacgcatacggattcgagaaaccgagttag

SEQ ID NO: 122649 - DNA, 297 bp, Artificial Sequence
  derived and/or modified sequence
atgtcgggagggtccgccgattacaaccgcgaacacggcggtcctgagggcatggacccagatggcgtcatcgaatccaattggaacgagatagtcgacaactttgatgatatgaatcttaaagagtctctgctgcggggaatctacgcctatgggttcgaaaaaccctccgcaattcagcaacgcgcaattatcccttgcatcaaggggtacgatgtgattgcgcaggcccagtccggaaccggcaagacagctacctttgccatctctatactccagcaactggagatcgaatag

SEQ ID NO: 122650 - DNA, 1224 bp, Artificial Sequence
  derived and/or modified sequence
atgagcggcggcagcgccgactacaacagagagcacggcggccccgagggcatggaccccgacggcgtgatcgagagcaactggaacgagatcgtggacaacttcgacgacatgaacctgaaggagagcctgctgagaggcatctacgcctacggcttcgagaagcccagcgccatccagcagagagccatcatcccctgcatcaagggctacgacgtgatcgcccaggcccagagcggcaccggcaagaccgccaccttcgccatcagcatcctgcagcagctggagatcgagttcaaggagacccaggccctggtgctggcccccaccagagagctggcccagcagatccagaaggtgatcctggccctgggcgactacatgggcgccacctgccacgcctgcatcggcggcaccaacgtgagaaacgagatgcagaagctgcaggccgaggccccccacatcgtggtgggcacccccggcagagtgttcgacatgctgaacagaagatacctgagccccaagtggatcaagatgttcgtgctggacgaggccgacgagatgctgagcagaggcttcaaggaccagatctacgagatcttccagaagctgaacaccagcatccaggtggtgctgctgagcgccaccatgcccaccgacgtgctggaggtgaccaagaagttcatgagagaccccatcagaatcctggtgaagaaggaggagctgaccctggagggcatcaagcagttctacatcaacgtggagagagaggagtggaagctggacaccctgtgcgacctgtacgagaccctgaccatcacccaggccgtgatcttcctgaacaccagaagaaaggtggactggctgaccgagaagatgcacgccagagacttcaccgtgagcgccctgcacggcgacatggaccagaaggagagagacgtgatcatgagagagttcagaagcggcagcagcagagtgctgatcaccaccgacctgctggccagaggcatcgacgtgcagcaggtgagcctggtgatcaactacgacctgcccaccaacagagagaactacatccacagaatcggcagaggcggcagattcggcagaaagggcgtggccatcaacttcgtgaccgaggaggacaagagaatcctgagagacatcgagaccttctacaacaccaccgtggaggagatgcccatgaacgtggccgacctgatctag

SEQ ID NO: 122651 - DNA, 939 bp, Artificial Sequence
  derived and/or modified sequence
atgctgaccgtgctgagaagcctgcccctgttcagcagagagctgctgttccccgtgctgaagatccagaaggtgatcctggccctgggcgactacatgggcgccacctgccacgcctgcatcggcggcaccaacgtgagaaacgagatgcagaagctgcaggccgaggccccccacatcgtggtgggcacccccggcagagtgttcgacatgctgaacagaagatacctgagccccaagtggatcaagatgttcgtgctggacgaggccgacgagatgctgagcagaggcttcaaggaccagatctacgagatcttccagaagctgaacaccagcatccaggtggtgctgctgagcgccaccatgcccaccgacgtgctggaggtgaccaagaagttcatgagagaccccatcagaatcctggtgaagaaggaggagctgaccctggagggcatcaagcagttctacatcaacgtggagagagaggagtggaagctggacaccctgtgcgacctgtacgagaccctgaccatcacccaggccgtgatcttcctgaacaccagaagaaaggtggactggctgaccgagaagatgcacgccagagacttcaccgtgagcgccctgcacggcgacatggaccagaaggagagagacgtgatcatgagagagttcagaagcggcagcagcagagtgctgatcaccaccgacctgctggccagaggcatcgacgtgcagcaggtgagcctggtgatcaactacgacctgcccaccaacagagagaactacatccacagaatcggcagaggcggcagattcggcagaaagggcgtggccatcaacttcgtgaccgaggaggacaagagaatcctgagagacatcgagaccttctacaacaccaccgtggaggagatgcccatgaacgtggccgacctgatctag

SEQ ID NO: 122652 - DNA, 1227 bp, Artificial Sequence
  derived and/or modified sequence
atgagcggcggcagcgccgactacaacagcagagagcacggcggccccgagggcatggaccccgacggcgtgatcgagagcaactggaacgagatcgtggacaacttcgacgacatgaacctgaaggagagcctgctgagaggcatctacgcctacggcttcgagaagcccagcgccatccagcagagagccatcatcccctgcatcaagggctacgacgtgatcgcccaggcccagagcggcaccggcaagaccgccaccttcgccatcagcatcctgcagcagctggagatcgagttcaaggagacccaggccctggtgctggcccccaccagagagctggcccagcagatccagaaggtgatcctggccctgggcgactacatgggcgccacctgccacgcctgcatcggcggcaccaacgtgagaaacgagatgcagaagctgcaggccgaggccccccacatcgtggtgggcacccccggcagagtgttcgacatgctgaacagaagatacctgagccccaagtggatcaagatgttcgtgctggacgaggccgacgagatgctgagcagaggcttcaaggaccagatctacgagatcttccagaagctgaacaccagcatccaggtggtgctgctgagcgccaccatgcccaccgacgtgctggaggtgaccaagaagttcatgagagaccccatcagaatcctggtgaagaaggaggagctgaccctggagggcatcaagcagttctacatcaacgtggagagagaggagtggaagctggacaccctgtgcgacctgtacgagaccctgaccatcacccaggccgtgatcttcctgaacaccagaagaaaggtggactggctgaccgagaagatgcacgccagagacttcaccgtgagcgccctgcacggcgacatggaccagaaggagagagacgtgatcatgagagagttcagaagcggcagcagcagagtgctgatcaccaccgacctgctggccagaggcatcgacgtgcagcaggtgagcctggtgatcaactacgacctgcccaccaacagagagaactacatccacagaatcggcagaggcggcagattcggcagaaagggcgtggccatcaacttcgtgaccgaggaggacaagagaatcctgagagacatcgagaccttctacaacaccaccgtggaggagatgcccatgaacgtggccgacctgatctag

SEQ ID NO: 122653 - DNA, 174 bp, Artificial Sequence
  derived and/or modified sequence
atgagcggcggcagcgccgactacaacagagagcacggcggccccgagggcatggaccccgacggcgtgatcgagagcaactggaacgagatcgtggacaacttcgacgacatgaacctgaaggagagcctgctgagaggcatctacgcctacggcttcgagaagcccagctag

SEQ ID NO: 122654 - DNA, 297 bp, Artificial Sequence
  derived and/or modified sequence
atgagcggcggcagcgccgactacaacagagagcacggcggccccgagggcatggaccccgacggcgtgatcgagagcaactggaacgagatcgtggacaacttcgacgacatgaacctgaaggagagcctgctgagaggcatctacgcctacggcttcgagaagcccagcgccatccagcagagagccatcatcccctgcatcaagggctacgacgtgatcgcccaggcccagagcggcaccggcaagaccgccaccttcgccatcagcatcctgcagcagctggagatcgagtag

SEQ ID NO: 122655 - protein, 217 aa, Artificial Sequence [sequence omitted]

SEQ ID NO: 122656 - DNA, 654 bp, Artificial Sequence
  derived and/or modified sequence
atggccaccgtggagcccgagaccacccccacccccaacccccccaccaccgaggaggagaagaccgagagcaaccaggaggtggccaaccccgagcactacatcaagcaccccctgcagaacagatgggccctgtggttcttcaagaacgacaagagcaagacctggcaggccaacctgagactgatcagcaagttcgacaccgtggaggacttctgggccctgtacaaccacatccagctgagcagcaacctgatgcccggctgcgactacagcctgttcaaggacggcatcgagcccatgtgggaggacgagaagaacaagagaggcggcagatggctgatcaccctgaacaagcagcagagaagaagcgacctggacagattctggctggagaccctgctgtgcctgatcggcgagagcttcgacgactacagcgacgacgtgtgcggcgccgtggtgaacgtgagagccaagggcgacaagatcgccatctggaccaccgagtgcgagaacagagaggccgtgacccacatcggcagagtgtacaaggagagactgggcctgccccccaagatcgtgatcggctaccagagccacgccgacaccgccaccaagagcggcagcaccaccaagaacagattcgtggtgtag

SEQ ID NO: 122657 - DNA, 654 bp, Artificial Sequence
  derived and/or modified sequence
atggccacagttgaacctgaaaccacacctacccccaacccccccactactgaggaggagaagacagagagcaaccaggaggtcgctaatcccgaacactatataaaacatccgttgcagaaccggtgggctctctggttctttaaaaatgataagtcaaaaacttggcaagcaaacctccgcctcatctcaaagtttgacacagtggaagacttttgggctctgtacaaccatattcagctgtcttcaaacctgatgcctggctgcgattacagcttgttcaaagacgggattgaaccaatgtgggaagatgagaaaaacaagagagggggaagatggctgatcacattgaataagcagcagaggaggtccgacctggatcgcttctggctcgaaacactgctgtgtctgataggtgagtcttttgatgattattctgatgacgtctgcggtgcagtggtgaatgtgcgggccaaaggcgacaaaatcgctatctggaccacagagtgtgaaaatcgggaagcagtcactcacattggtagggtttacaaagagcgcctaggactgcctccgaaaatcgtgattgggtatcaatcgcacgctgatacggccaccaaatccgggagtacgactaaaaataggtttgtcgtgtag

SEQ ID NO: 122658 - DNA, 11523 bp, Artificial Sequence
  derived and/or modified sequence
aggcacaggcagcctgcatacactccttttcctggtgtcaacattatttaaaagcatgggaaatagtaatgagacagtgtcttcttcattagaaccttaggagtctactagatttcttcatctctatttgttgttattagtagccaaactgtgcaaaaaacacggtcttgagaaatgacagcacagtatcttagagggaaaggaaatgtaggatgccagtgtggggacaaatttctgattgccagtgattgttgtgagcataacaataatttcatgaacattaaagcctctattgagggcagctgcagttgtaaaggaaaaaaaatggtcctgaacatttaaaactacactggtgtacatcataatcaaacaaagtaaacagaaaaaaatttaaactttgctaaaaaaaaaaagcagaagcacttgatctttaggaaggcacgcagttgcttattatgaatcatttctagagtccgatgcattttcaaagccggttacagtcattacgaagcacacccttgtgaggtaagtgtatcatcacctttggttcataaataaaaaagctgagacgccgagcgattaagtcactcgcctaaggagaatgagtcaacgtcaagagtcatagttgacccggcctaaagactccagaccatcagtccagggcttagtcagcggggcccggagtggcttccctggctggcatctggacttaggctatttccgtgcacgtaaaagcggaatattggaacggttgcacagaacttccaaataatttttaccgccacgcaagatttagccctgaggtcttaatctcaggatttgggacagtaaaagctgtcgtccctccccctcgtccagccggtggcaagcgggtactgcgggcggttccgtccgtcccctttcgcagaaatggcaacgaatgaccaccagcattagctgagccaggggacgtgggagggttgattgcctaaacgactctgcatcgccgcctctttttgaaactaagagaaaatggtgggagatcaaaagaaaactaaataaacacacaggcaacttgtcctgggacctcaactaagcaaatgaagccttattgtgtgtgctgagcctgcagttcccaaccttccggggaagatgggaggacagggcgacaaagggcacagtaggcttgcctggcagtaagtgtgaccgcagctatccaggcggaagagcagaggactgaaaccaccctccagcaagcgagtgtccgccgcgttgagaaccgcgcaccctacccatcggccacgtgaccagtcctttttaaaaaaaatttctttaccttaaaaaaaaaaaaaaaaaaaaggtgggggagagactccacttcccagaagcctctcgttactcacgcagccgcagtcttgcgcaggtgccgccagggccaaacggacatatccgtcacgtggccagaagctggccaatccggtttgaatctcatttttttcctcttacccccccttctggagcggttgtgcgatcagatcgatctaagatggcgactgtcgaaccggaaaccacccctactcctaatcccccgactacagaagaggagaaaacggaatctaatcaggaggttgctaacccagaacactatattaaacatcccctacagaacagatgggcactctggttttttaaaaatgataaaagcaaaacttggcaagcaaacctgcggctgatctccaagtttgatactgttgaagacttttgggctctgtacaaccatatccagttgtctagtaatttaatgcctggctgtgactactcactttttaaggatggtattgagcctatgtgggaagatgagaaaaacaaacggggaggacgatggctaattacattgaacaaacagcagagacgaagtgacctcgatcgcttttggctagagacacttctgtgccttattggagaatcttttgatgactacagtgatgatgtatgtggcgctgttgttaatgttagagctaaaggtgataagatagcaatatggactactgaatgtgaaaacagagaagctgttacacatatagggagggtatacaaggaaaggttaggacttcctccaaagatagtgattggttatcagtcccacgcagacacagctactaagagcggctccaccactaaaaataggtttgttgtttaagaagacaccttctgagtattctcataggagactgcgtcaagcaatcgagatttgggagctgaaccaaagcctcttcaaaaagcagagtggactgcatttaaatttgatttccatcttaatgttactcagatataagagaagtctcattcgcctttgtcttgtacttctgtgttcatttttttttttttttttggctagagtttccactatcccaatcaaagaattacagtacacatccccagaatccataaatgtgttcctggcccactctgtaatagttcagtagaattaccattaattacatacagattttacctatccacaatagtcagaaaacaacttggcatttctatactttacaggaaaaaaaattctgttgttccattttatgcagaagcatattttgctggtttgaaagattatgatgcatacagttttctagcaattttctttgtttctttttacagcattgtctttgctgtactcttgctgatggctgctagattttaatttatttgtttccctacttgataatattagtgattctgatttcagtttttcatttgttttgcttttgtttttttcctcatgtaacattggtgaaggatccaggaatatgacacaaaggtggaataaacattaattttgtgcattctttggtaattttttttgttttttgtaactacaaagctttgctacaaatttatgcatttcattcaaatcagtgatctatgtttgtgtgatttcctaaacataattgtggattataaaaaatgtaacatcataattacattcctaactagaattagtatgtctgtttttgtatctttatgctgtattttaacactttgtattacttaggttattttgctttggttaaaaatggctcaagtagaaaagcagtcccattcatattaagacagtgtacaaaactgtaaataaaatgtgtacagtgaattgtcttttagacaactagatttgtccttttatttctccatctttatagaaggaatttgtacttcttattgcaaggcagtctctatattatgtcttcttttgtggtgtcttccatgtgaacagcataagtttggagcactagtttgattattatgtttattacaatttttaataaattgaataggtagtatcatatatatggaattaaattgatgtggctatctttgtttttttataaagtaaggcacagtcattcagtcttaggtaaataatgtactctcttaatatgttaatactcatgagaattgggatctgatgcatcaccatttgattggtagcaacagtggttgtaaaacttggttgctgaattgagttgtttctatgttaagtgtcaaaatgatagtgtagggaaagtacaggtggtggggacatatgcattaagaatcttgttagtgttgcaatctaaatagaatggaataaacaggtgttaagacatatttatagtggtaaattgttgtagtatggtattctgtaaacttgaaaacttgatctactctttgtaggtatcatttgaaagcaaacttgaaaatgttttgtacatagtacatacttgtatagtcctgtgagatgaagtatggctatcagaccaaaggataagccaaactgtaggtagcagaatggaaattattattttgagaggaaaatttgtctttgaatggtgattatgacttaatcattttaaaactgataaacttgacaaaaaccctgtatgaaataaacatgaaattaatagcactgatttcattgtaaaattttaaagcagtttaaagggtaccacaggttatcacagtactctcaatgccacaaacacctcttgttcagtattctagaaatactgaatcagaattctgtgtttattataatctcagcatactgtacataatatctgctagttaaacttgggtaattggttaaggtgacttactgtctatgtcaatatgtatagttttgagtacttcaagagtttacttaaaagtgatgatgttactggtatgttggcagtgggtgggactgaagtagtgtatctattataaattgatctattttcttaattctaagatgaagtccaattttaagcatcagcttttaggtgcaaaggaggaattaacacattaaatgtatacagttctaaatttttgaaataactgatgtgtagcatttgattattggtattaccattttagaatcatgatgttattttaaacctttttcctggggacaagaaaggataataaattacgctgaatcacttttggcagttgccacttaaatagtacagtgacttgcaacttttataactttatcagcatcttctctaaatacaaaattaggctatatgttattttccaacttactgttttctctctgtttagcaggatattataaatagattaaatagatatattttctttttttttttttttttttgagacggagtctcgctttgtctcccaggctggagtgcagtggcgtgatctcccagtagctgggactacaagcacctgccaccatgcccggctaattttttttgtatttttagtagagacggggtttcactgtgttagccaagatggtctcaatctcctgactttgtgatctgcctgcttctgcctcccaaagtgctgggattacaggtgtgagccaccgtacccagcccaaatagatgtattttcataatagagaattgaaataggctttaatgggtgaatagcagtttattgtaggcatgtgacatttcatttaatgaatttaaagtttattatcccaattctacagaaggatttaatgcatactatgcaattaaataattataacactacatagtaataatttatgtgccaggcagtagttcagtcactttacatgcttattaacctgcagaataatcttttgagatgtaggtgctgttactgagaatttaacttttgcttgtaaattgcaaagggtggatttgaattctggaaatttggttccagagacaataattacataacactttctccatagggtacagcctgtctaataggctatagtaaatcacctcagcttgttataggtcgggcatgcaaacatttctccattttactccctttggtaatgaatctagtaatagatggaaattttccctagattcactgtgttagtcagttggggaagtttggaggcaaagatacaggagtttatggggaggtagtgtacataaatataatcatatgctatataaggaagttttggtcagcagcagaccatatataggatggtgggccagtaacattgtaacactgtatttttactgtatcttttccatgttttgttatgtttagatacacaaataacattatggagtattcagtatggtaacatgccatacaggtttgtagcctaggagcagtaatagactgttccctgaaacctatatttgtggtaggtttataccattcaggtttgtgtaagtacacaacgaaatcatctaatggcccatttctcaaaacatattcccatcattaatcaatgcatggtcatgttttcgtatacattttaagcttctgtattctaatctaatataaatggcaaaatattcaaactgataggcattgagattcttaaatgctaaagttgcattcaaaaggataattttaggcgttgtgacaaagcagtgttatattttaaagttagtgacaaggctatgcaccttttatctctaattgtttcttacagaatgtttttattattgagtagtaaaacaataaatgtcagatcctttatacaaattcaagattgacattgataaacaaaacttcagcatatcactcaaggtcagcgtagaaattgtgtgtctggaaacttctatagtaattttatattactgtgacattagtatgtgatcacttttctagtaatgttttaaaaaaatatatcttacaggccaggcatagtgctttatgcctgtaatcccagcactttgggaggccaaggtggcaggattgcatgagtccaggagttcaacaccagtctgggcaataaagtgagaccccatcgctacaaacaaattaaaaaatatttatgtatgtgtgtaatatatataatatataacaaaacacatatgtatgtgtatatatagtatgtctggcagagtacaatttaggggttaagactggtccctcacatatggtgtgagaaacactgttcacaggttgctttccccattagcccagggcaactcatttgcccatcatttcctagaacaaccgggtctgttacgtctacagttttcatcttcatgcagttatggatttggtgtcaaaaactttggtcctgttctctaccatcttaaaataaactcttgtgtcctgctttactatgaattgcaaagtaggcattaggtagccttcctactaccatagtttagagttcaatattcttatgaccattctactggtagaagcaaaaaatgaacttgtaggcatgtgatcacatgtgcctatggtgctgtcttttccagtacaggggaactaattttcatattttaatcttgcagctttttgtttacttcatgcattgtgatttctcatagttttgcacagaactcacttccctaccttttctgaaacaaaagtatgtatacacacatacatatgtattgagcacctctatttactgtgttccacgtgctgggcatatagcaagaacagaatggtctggggccctgctctaaagaagatttaaaagcaaacatatattaaaaatgcgtgagtctggccaggagcagtggctcatgcctgcaaccccagcactttgggaggctgaagcgggtgaatcacctgagatcaggagttgagaccagcctggccaacatggtgaaaccccgtctctactaaaaatacaaaaattagcctggcatggtggcatgcgcctgtaattccagctactttggagactgagacaggagaatcacttgagcccaggaagtggaggttgcagtgagctgagatcgcgccactgcactccagcctgggtgacagagcaagactccatctcaaaaaaaaaaaaaaaacgtgtctgttcataaggttctacaaatagctgttgttacagaaaataggactagggttttattactggggattatgcagtcgaggtaaatataaaatgaggttgtttcttcttttttttatttgagacagagtcttgtttgccaggctggagtgcagtggcgtgctcttagctccgcctcccgggatcaaacgattctcttgcctcagcctctcgagtagctgggactacaggcgcgtgccaccacacccagctgatttttgtatttttagtagagatgggatttcaccatgatggccaggatggtctcgatcttttgacctcatgatccacccacctcggcctcccaaagtgctgggattacaggcgtgagccactgcacccggccctggttctaaatactcttccagctctaaaacattgattctaaacagatcacattccaggaggactctagcaaaccagcatatgcaaattatagcttttgcaagaccgtttctacttttatattactgaactctatatgattgtccaagtaaagttttgtgtctctttgattatttgattgtactttaaaattttttcaccattcatttaacattttttaccatactgtagtatttttaatgcaattgtgtttgcattggtgtggctttagaggcttctccaaccaccttcccaaaatactgatctgtgatttttttctttaatgtttggccaaacataatacatgcttattttatttttcatccctacagaaaggtagaagatgagaattctgtctcctactgttgtttttcaaggtgccactcaaatttcttgtacgtgtctagaaacttgtgcatacaatagaagtacactgtggctgggcatggtggctcatgcctgtaatcccagcactttgtgaagctgaggtgggtggatcacctgaggtcagggagtttgagaccagcctggccaacatgatgaaaccccgtctttactaaaattagaaaaaattagccaggcgtggtggtgtgcgcctgtaatcccagctactcgggaggctgaggcatgagaatcacttgaactcgggtggcagaggctgcagtgagctgagatcatgccactgcattccagcctgcgcagctgagccagactccatctccaaaaaaaaaaaaaaaaaaaaaaaaagatgtccaatatatgtaacttttttctttggacacaaaaattccattagctttgttttctcatttttacttgtcatgatgtatgtcgaacacattatttttagtgtctggtgttccattatacagatgtctctcttgttggttgaatttttgcattcacagaccctcaagttggattcatatctttttacactaagcataaagaagacggattggggtcgggtatggtggctcacgcctgtaatcccagcacttcgggaggctgaggtgggcggatcacgaggtcaggagttcgagaccagcctggccaacatactgaaaccccgtctctaaaaatatgaaaaaaaaattagccaggcgtggtggtgcgcagctgtagccccagctacttgggaggctgaggcaggagaatcacttgaacccaggaggtggaggttgcagtgagcatattgcaccattgcattccagcctgcacgacagaggaagacgccatttcaaaaaaaaaaaaaaaaagacggattgattttcttcagcagtatcaagtggcacttaccatccacccctttaacacccaaaccattctaatccatgtatacagaccatcatctgtttcgttattgtgttctataatgcagctttgcgagttatgcagttttggtcctcatgatatttttctgattggtttttaatgtattttgttctaacgagccaacattgttatacatgtaatttgtttatttgctagattgtactctttcccaaagatgggctatgaactagcatctactttcattttacctatttacctgtaaacattgaaaaaactgaatcaaatgcagtgatatcggacctagttttattgttatgccttataatgaatttaacttcacagttttctaaatgagagcatttcccaaagacatctttatggtcataaccagtttcccttggcatttgatttatttttatttttatttatttatctttttgagaaggagtttcgctcttgttgcccaggctagagtgcaatggcgtgatctcgggtcactgcaacctctgcctcccgggttcaagcgattctcctgcctcagcctccaagtagctgggattacaggcatgcaccaccacgcccgactaatttgtatttttagagacggggtttctccgtgttggtcaggctggtctcaaacttccaacctcaggtgatccgcccgccgtggcctcccaaagtgttgggattacaggcgtgagccacagtgtctggcctgatttgtttttaagagcattatttttctgctttattttgtgacttcaacatttgacacaattttgggtgaatggtttgtgcatggtgcctgacatcgtgttttgatgtgtagtatatgccataggacatgtgagacaagatatgtcccaacttgaccttgttttgtattgtttatgtcaaggtgttgagtgtattagatatactgttggggctctgtgttctagctctgccttttagataataaccatggttaaatattgcaatgtcctgcatgtctccacacatgggttttgtaactgagtcagaatgataagtgattagtaagcacattttttctcctttcaggaaaccactattttccttttctacatgctgttttgtaagtagtacttttatgaaggttgtcttcaaatgttcgcatcttccatttctactgcccttgggttatccatcctgtcattttgtgccaatcacttttttttttaacttttaagttcagggatgaaagtgtagatttgttacataggtaaacttgtgtcatggggttgttgtacagattatttcatcacccaggtgttaagcctagtatgcactagttgtttttcctgatcctctccctgctcccaccctccaccctctgataggccccagtgtgtgttgttcccctctgtgtgtccatgtgttctcatcatttagctcccacttacaagtgagaatgtggtgtttggttttctgttcctgcattagtttgctaaggataatggcctcgagctccatccaagtccctgtaaaggacatgatcttgtacttttttatggctgcatagtattctgtggtgtatatgtaccacattttctttatccagtctatcattaggcatttaggttgattccatgtttttgctattgtgaatagtgctgcaatgaacatacatgtgcatgtctttttataatagaatgatttatattctgttgtgtatatacccagtaatgggattgctgagttgaatgctatttctgcctttaggtctttgatgaattgccacactgtcttccacaatggttgaactaatttacactcccaccaacggtgaataagtgttcacttttctccacaaccttgtcagcatctattattttttgactttttagtaatagccattctgactgctcacatctattttgtaaataaagttttattgaaacatggccttacccatttgtttacatatattcatggctgtttttgtgccacaatgtcagagttgtcttaaagtagacagagactatctggctgtaaagcctgagatatatactaactggttctttatgtaaaaagtttgctgaccacctactctaaacgttttgcagtgatggtagtgttggcaaaaaaccaaatagcttaccctctttaaatttcccttttacttcttacaaactcctaacaccatttacgactttgtcatcaatatggtcaactaagcttggtttgcatggctctacttcctttcaccttccacttaggcagtgtctccaagtccactgcagtttctatttgtctcctgactgttactgtatcagttcttacctaaataacataacaactgatctccctactttttgcctatgccctcaaatgtgctcattgttgatctatctccctgttaggtgttctttttctcctctttagaaagcagccaaggaaaccagggttctctcaaagtggaaaatactggaacttatgtactgttatcataatgatagttggtgttttgaattataagaatgattccaggtggtttctaaatcatccaataaagctgtattcactctgta

SEQ ID NO: 122659 - DNA, 654 bp, Artificial Sequence
  derived and/or modified sequence
atggccaccgtggagcctgagaccacccccacccccaacccccccaccacagaggaggagaagacagagagcaaccaggaggtggccaaccctgagcactacatcaagcaccccctgcagaaccgctgggccctgtggttcttcaagaatgacaagagcaagacctggcaggccaacctgcggctcatcagcaagtttgacacagtggaggacttctgggccctgtacaaccacatccagctgagcagcaacctgatgcctggctgtgactacagcctcttcaaggatggcatcgagcccatgtgggaggatgagaagaacaagaggggcggccgctggctgatcaccctgaacaagcagcagaggagaagtgacctggaccgcttctggctggagaccctgctgtgcctgattggagagagctttgatgactacagtgatgatgtgtgtggggctgtggtgaatgtgcgggccaagggggacaagatcgccatctggaccacagaatgtgaaaatcgggaggccgtgacccacatcggccgggtgtacaaggagcggctgggcctgccccccaagatcgtgattggctaccagagccatgctgacacagccaccaagagcggcagcaccaccaagaacagatttgtggtgtag

SEQ ID NO: 122660 - DNA, 654 bp, Artificial Sequence
  derived and/or modified sequence
atggccaccgtggagcccgagaccacccccacccccaacccccccacaaccgaagaggaaaagacggaaagtaatcaggaagtagctaacccggaacactatataaaacacccactgcagaacagatgggccctgtggttctttaaaaatgataagtccaaaacttggcaggccaacctgcggttgatctccaaattcgacaccgtggaggatttctgggcactatataatcacatccaactgtcttcgaacctgatgcctgggtgcgactactcactgtttaaagacggtattgagccaatgtgggaagatgagaaaaataagcggggtgggagatggttgattaccctcaacaaacagcagcggaggtcagacctggaccgcttttggctagagacattgctctgcttaatcggtgagagctttgatgactattctgatgatgtctgcggcgctgtggtgaatgtgcgcgcaaaaggagacaagatcgcaatttggactaccgagtgtgaaaatcgcgaagccgtcacgcacattgggcgtgtgtacaaggagaggcttggcttgcctcctaagatcgtgatcggctatcagagccacgccgataccgccacaaaatcggggtcaacaactaaaaacaggttcgtggtgtag

SEQ ID NO: 122661 - DNA, 654 bp, Artificial Sequence
  derived and/or modified sequence
atggctactgtcgaaccagagactacacccacacccaaccctcccaccaccgaagaagagaaaaccgaatccaatcaggaagtggcaaacccagagcactatatcaaacatccgctgcagaacaggtgggccctgtggttctttaagaatgacaagagcaagacatggcaagctaatctccgactgatcagcaagttcgacactgtggaggatttctgggccttgtacaaccacatccagctgagtagcaacctgatgccaggctgtgattattcgctgtttaaggacggaatagagccaatgtgggaagacgagaagaacaaacgcggtggtagatggctgattaccctgaacaaacagcagcggcgaagtgatctcgatagattctggctcgaaacacttctctgcctcataggtgaaagctttgatgattactcagacgacgtgtgcggtgctgttgtcaacgtccgggctaaaggggacaagatagctatttggactaccgagtgcgaaaaccgggaggccgtcactcatatcggcagagtgtataaggaacgcctagggctgcctccaaagattgtgataggatatcagtcgcacgcagataccgcaaccaaaagtggcagtacgactaagaatcggtttgtcgtatag

SEQ ID NO: 122662 - protein, 258 aa, Artificial Sequence
  derived and/or modified sequence
MLVLYGHSTQDLPETNARVVGGTEAGRNSWPSQISLQYRSGGSRYHTCGGTLIRQNWVMTAAHCVDYQKTFRVVAGDHNLSQNDGTEQYVSVQKIVVHPYWNSDNVAAGYDIALLRLAQSVTLNSYVQLGVLPQEGAILANNSPCYITGWGKTKTNGQLAQTLQQAYLPSVDYAICSSSSYWGSTVKNTMVCAGGDGVRSGCQGDSGGPLHCLVNGKYSVHGVTSFVSSRGCNVSRKPTVFTQVSAYISWINNVIASN

SEQ ID NO: 122663 - DNA, 777 bp, Artificial Sequence
  derived and/or modified sequence
atgctggtgttgtacggacatagtacacaggacctgcccgagaccaatgcccgtgtggttggcggtacagaggcaggacgcaactcttggcctagccagataagtttgcagtaccgatccgggggatctcggtaccacacatgtgggggaactctcatccggcagaactgggtcatgacggctgcccactgtgtggactatcagaagacttttagagtcgttgccggagaccacaacctgtcccaaaatgacggcacagaacagtatgtgtctgtccagaagatcgtcgtccatccctactggaacagcgataatgttgctgcgggttacgatattgccctcttgcggcttgcgcagtctgtaacgcttaattcatacgtgcaactgggtgtcttgccacaagaaggagctatactggccaataatagtccttgttatatcacgggctggggcaagaccaaaacaaatggtcagctggcacagactctgcagcaggcttacctacccagcgtcgactatgccatctgctctagtagtagctactggggatccacagttaagaatacgatggtgtgcgccggaggcgatggtgtcagatcgggctgccagggcgactccggtgggcctctccattgtctggtgaacggcaaatacagcgtgcacggggtgacgagcttcgtttcctcaagaggttgcaatgtgagtcgcaagcccacagtcttcacccaggtgagcgcatatatctcctggattaataacgtcatagcatcgaattag

SEQ ID NO: 122664 - DNA, 777 bp, Artificial Sequence
  derived and/or modified sequence
atgttagtgctgtacggccattcaacacaagacctcccagagacaaacgctagagtcgttggcgggacagaagcaggaagaaattcctggccaagccagatttctctgcaataccggagtggaggcagccgatatcatacatgtggcggcaccctaatccgacagaactgggtaatgaccgccgcccattgcgtggattatcagaagactttcagagtcgtggctggcgaccacaacttgtcacagaacgatggaactgagcagtatgtgagcgtgcagaaaatcgtggtgcatccctattggaattccgacaatgtggccgccggatatgatatcgccctgttgaggctggctcagtctgtgacactgaactcatacgtccagctaggcgtgttgcctcaggaaggtgccatactcgcgaataactccccttgctacattacaggatgggggaaaactaagactaacggccagcttgcacagactctccagcaggcttatctgccttctgtagactatgcaatttgtagttcatcaagctattggggttctactgttaaaaatacaatggtgtgtgccgggggagacggcgttcgttccgggtgccaaggggattcggggggccctttgcactgtttagttaatggaaagtactccgtgcatggggttacatcatttgtcagctccagggggtgcaatgtttctcgcaagcccactgtctttacccaggtttctgcctacatatcatggataaacaatgtaatcgcatccaattag

SEQ ID NO: 122665 - DNA, 777 bp, Artificial Sequence
  derived and/or modified sequence
atgttggtgctttacggccactccacgcaggacctgcctgagacgaacgcgcgcgtggttggaggcaccgaagccggacgcaattcctggccgtcccagatttccctccaatacagaagtggaggatcacgatatcatacctgtggcggaacattgattcgacagaactgggtaatgacagctgcccattgcgttgattatcagaaaacatttcgcgtcgttgctggcgatcacaacctaagccaaaatgacggtacagaacagtatgttagcgttcagaagattgtggtacacccttactggaattccgacaacgtcgccgctggctatgacatagctctcctccggctcgctcagtccgttaccctgaacagttacgtccagctcggagtgctgccacaagaaggcgctatacttgcaaacaactctccatgctatatcaccgggtggggtaagaccaagaccaacggtcaactggcacagactctccaacaggcctatcttcccagcgtcgactatgctatttgttctagctcgagttattgggggtcgactgtcaaaaatactatggtatgtgcagggggtgatggcgtaagaagtggatgtcaaggtgattctggggggccgctacattgcttagtgaacggcaaatatagtgtgcacggtgttactagcttcgtgtcttctaggggctgtaacgtttcaagaaaaccaacagtgttcacgcaagtatccgcatatattagctggattaataacgtaatagcttctaattag

SEQ ID NO: 122666 - DNA, 952 bp, Artificial Sequence
  derived and/or modified sequence
ttggtccaagcaagaaggcagtggtctactccatcggcaacatgctggtcctttatggacacagcacccaggaccttccggaaaccaatgcccgcgtagtcggagggactgaggccgggaggaattcctggccctctcagatttccctccagtaccggtctggaggttcccggtatcacacctgtggagggacccttatcagacagaactgggtgatgacagctgctcactgcgtggattaccagaagactttccgcgtggtggctggagaccataacctgagccagaatgatggcactgagcagtacgtgagtgtgcagaagatcgtggtgcatccatactggaacagcgataacgtggctgccggctatgacatcgccctgctgcgcctggcccagagcgttaccctcaatagctatgtccagctgggtgttctgccccaggagggagccatcctggctaacaacagtccctgctacatcacaggctggggcaagaccaagaccaatgggcagctggcccagaccctgcagcaggcttacctgccctctgtggactacgccatctgctccagctcctcctactggggctccactgtgaagaacaccatggtgtgtgctggtggagatggagttcgctctggatgccagggtgactctgggggccccctccattgcttggtgaatggcaagtattctgtccatggagtgaccagctttgtgtccagccggggctgtaatgtctccaggaagcctacagtcttcacccaggtctctgcttacatctcctggataaataatgtcatcgcctccaactgaacattttcctgagtccaacgaccttcccaaaatggttcttagatctgcagtaggacttgcgatcaaaaagtaaaacacattctgaaagactattgagccattgatagaaaagcaaataaaactagatatacatt

SEQ ID NO: 122667 - DNA, 777 bp, Artificial Sequence
  derived and/or modified sequence
atgctggtgctgtacggccacagcacccaggacctgcccgagaccaacgccagagtggtgggcggcaccgaggccggcagaaacagctggcccagccagatcagcctgcagtacagaagcggcggcagcagataccacacctgcggcggcaccctgatcagacagaactgggtgatgaccgccgcccactgcgtggactaccagaagaccttcagagtggtggccggcgaccacaacctgagccagaacgacggcaccgagcagtacgtgagcgtgcagaagatcgtggtgcacccctactggaacagcgacaacgtggccgccggctacgacatcgccctgctgagactggcccagagcgtgaccctgaacagctacgtgcagctgggcgtgctgccccaggagggcgccatcctggccaacaacagcccctgctacatcaccggctggggcaagaccaagaccaacggccagctggcccagaccctgcagcaggcctacctgcccagcgtggactacgccatctgcagcagcagcagctactggggcagcaccgtgaagaacaccatggtgtgcgccggcggcgacggcgtgagaagcggctgccagggcgacagcggcggccccctgcactgcctggtgaacggcaagtacagcgtgcacggcgtgaccagcttcgtgagcagcagaggctgcaacgtgagcagaaagcccaccgtgttcacccaggtgagcgcctacatcagctggatcaacaacgtgatcgccagcaactag

SEQ ID NO: 122668 - DNA, 777 bp, Artificial Sequence
  derived and/or modified sequence
atgcttgtgctttacggccactccacacaggatctgccagagacgaatgcccgtgtagtgggtggaacagaggctgggcgaaacagttggccttcacagatttctttgcagtatcggagtggcggctccagataccatacttgtggcggaactttgatccgccagaactgggtgatgactgccgcccattgcgtggattaccaaaagacctttcgtgtagtcgccggagatcacaacctgtcccagaatgatgggacagaacagtatgtgagtgtacagaagattgtcgtccatccttactggaacagcgacaatgtcgccgcaggctacgacatagcactcctgagactagcgcagagtgttacacttaactcatacgtccagttgggcgtcctgcctcaagagggtgccattcttgcaaataattcaccatgttacataactgggtggggcaagaccaagaccaacggtcagctcgcccaaaccctgcagcaggcatatttaccctctgtcgactacgctatctgtagcagcagctcttactgggggtccaccgtgaaaaacactatggtgtgcgctggcggcgacggggtgaggtcagggtgccagggagacagtggaggccccctgcactgtctggtgaacggcaagtattccgtgcacggtgtcacttctttcgtgagctcacgagggtgtaacgtttcgcggaaacctactgtgttcactcaggtgtctgcctatatcagctggatcaataatgtcatcgccagcaactag

SEQ ID NO: 122669 - DNA, 777 bp, Artificial Sequence
  derived and/or modified sequence
atgctggtgctgtatggccacagcacccaggacctgcctgagaccaatgcccgggtggtgggcggcacagaagctggaagaaattcctggcccagccagatcagcctgcagtaccgcagcggcggcagccgctaccacacctgtggcggcaccctcatccggcagaactgggtgatgacagctgcccactgtgtggactaccagaagaccttccgggtggtggccggggaccacaacctgagccagaatgatggaacagagcagtatgtgtctgtgcagaagatcgtggtgcacccctactggaacagcgacaacgtggccgccggctatgacatcgccctgctgcggctggcccagagcgtgaccctgaacagctatgtgcagctgggcgtgctgccccaggagggcgccatcctggccaacaacagcccctgctacatcaccggctggggcaagaccaagaccaacggccagctggcccagaccctgcagcaggcctacctgcccagcgtggactatgccatctgcagcagcagcagctactggggcagcacagtgaagaacaccatggtgtgtgctggaggagatggagtgcgcagcggctgccagggcgacagcggcggccccctgcactgcctggtgaatggcaagtacagcgtgcatggagtgaccagctttgtgagcagccggggctgcaatgtgtccaggaagcccaccgtcttcacccaggtgtctgcctacatctcctggatcaacaacgtgattgccagcaactag

SEQ ID NO: 122670 - DNA, 777 bp, Artificial Sequence
  derived and/or modified sequence
atgctggtgctgtacggccacagcacccaggacctgcccgagaccaacgcaagagttgttgggggaacggaggcggggcgcaattcttggccttcacagatcagtttgcagtacaggtctggtggctctcgctatcacacttgcggtggcactcttatccgtcagaactgggtgatgacagccgcccactgcgtagactatcaaaaaacattcagggtggtggcaggtgaccataatctaagccagaacgacgggacggagcagtacgtcagtgtgcaaaaaatagtcgttcacccttattggaattctgataatgtggccgccgggtatgacattgcactgctccgtctagcccagagtgtaaccttgaattcctatgtgcagctaggcgttctgcctcaggagggagcaatcctagccaacaattctccttgttacattacagggtggggcaagacaaagactaacgggcagttggcccaaaccctacagcaggcgtacctccccagcgtcgattatgctatttgctcatcttccagctattgggggagcaccgtgaagaatacaatggtgtgtgcagggggcgatggggtcagaagtggttgtcagggtgactccggcggtccactgcactgtctggtgaatgggaaatactctgtgcatggcgtaacatcatttgtgtcttctcggggttgcaatgtttctcggaagccgactgtgttcactcaggtgagtgcttatattagttggataaacaatgtaattgcctcaaattag

SEQ ID NO: 122671 - RNA, 777 nt, Artificial Sequence
  derived and/or modified sequence
auguuagugcuguacggccauucaacacaagaccucccagagacaaacgcuagagucguuggcgggacagaagcaggaagaaauuccuggccaagccagauuucucugcaauaccggaguggaggcagccgauaucauacauguggcggcacccuaauccgacagaacuggguaaugaccgccgcccauugcguggauuaucagaagacuuucagagucguggcuggcgaccacaacuugucacagaacgauggaacugagcaguaugugagcgugcagaaaaucguggugcaucccuauuggaauuccgacaauguggccgccggauaugauaucgcccuguugaggcuggcucagucugugacacugaacucauacguccagcuaggcguguugccucaggaaggugccauacucgcgaauaacuccccuugcuacauuacaggaugggggaaaacuaagacuaacggccagcuugcacagacucuccagcaggcuuaucugccuucuguagacuaugcaauuuguaguucaucaagcuauugggguucuacuguuaaaaauacaauggugugugccgggggagacggcguucguuccgggugccaaggggauucggggggcccuuugcacuguuuaguuaauggaaaguacuccgugcaugggguuacaucauuugucagcuccagggggugcaauguuucucgcaagcccacugucuuuacccagguuucugccuacauaucauggauaaacaauguaaucgcauccaauuag

SEQ ID NO: 122672 - RNA, 777 nt, Artificial Sequence
  derived and/or modified sequence
auguuggugcuuuacggccacuccacgcaggaccugccugagacgaacgcgcgcgugguuggaggcaccgaagccggacgcaauuccuggccgucccagauuucccuccaauacagaaguggaggaucacgauaucauaccuguggcggaacauugauucgacagaacuggguaaugacagcugcccauugcguugauuaucagaaaacauuucgcgucguugcuggcgaucacaaccuaagccaaaaugacgguacagaacaguauguuagcguucagaagauugugguacacccuuacuggaauuccgacaacgucgccgcuggcuaugacauagcucuccuccggcucgcucaguccguuacccugaacaguuacguccagcucggagugcugccacaagaaggcgcuauacuugcaaacaacucuccaugcuauaucaccgggugggguaagaccaagaccaacggucaacuggcacagacucuccaacaggccuaucuucccagcgucgacuaugcuauuuguucuagcucgaguuauugggggucgacugucaaaaauacuaugguaugugcagggggugauggcguaagaaguggaugucaaggugauucuggggggccgcuacauugcuuagugaacggcaaauauagugugcacgguguuacuagcuucgugucuucuaggggcuguaacguuucaagaaaaccaacaguguucacgcaaguauccgcauauauuagcuggauuaauaacguaauagcuucuaauuag

SEQ ID NO: 122673 - protein, 20 aa, Artificial Sequence
  derived and/or modified sequence
GNGVQCLAMGWGLLGRNRGI

SEQ ID NO: 122674 - protein, 267 aa, Artificial Sequence
  derived and/or modified sequence
MTLGRRLACLFLACVLPALLLGGTALASEIVGGRRARPHAWPFMVSLQLRGGHFCGATLIAPNFVMSAAHCVANVNVRAVRVVLGAHNLSRREPTRQVFAVQRIFENGYDPVNLLNDIVILQLNGSATINANVQVAQLPAQGRRLGNGVQCLAMGWGLLGRNRGIASVLQELNVTVVTSLCRRSNVCTLVRGRQAGVCFGDSGSPLVCNGLIHGIASFVRGGCASGLYPDAFAPVAQFVNWIDSIIQRSEDNPCPHPRDPDPASRTH

SEQ ID NO: 122675 - DNA, 804 bp, Artificial Sequence
  derived and/or modified sequence
atgaccctcggccggcgcctggcttgcctgttccttgcctgcgtgttacccgctttgctgttgggaggaacagccttggcctcagagattgttggcggtcggcgcgctcggccccacgcatggccatttatggtgtcgctacaactacgcgggggccatttttgcggagcaaccctgatcgctcccaactttgtgatgagcgccgcacattgtgtagccaatgtcaatgttcgcgcggtgagagtcgttctcggcgcacataacctgagtcgcagagaacctactcgccaagtcttcgccgtccagaggattttcgagaatggatatgatccggtcaacctcctcaatgatattgtgatcttgcaattgaacggatctgctaccattaatgccaatgtgcaggttgcacagctgccagcccagggccgccgcctgggaaatggtgtgcaatgtctggctatgggatgggggttactggggcgcaacaggggtatcgccagtgtgttgcaggagctaaatgtaaccgttgtaactagcctgtgccgaaggtcaaatgtgtgtacgttagtgcgcggcagacaggccggtgtgtgttttggggattctgggagcccgctagtctgcaatggcctgattcacggtattgcctccttcgtgcgaggcgggtgcgcaagtggcctgtatcctgacgcttttgcacctgtagcccagttcgtgaactggatcgacagtatcatccagcgaagtgaggataacccatgtccacacccgagagatccagacccagctagcagaacacattag

SEQ ID NO: 122676 - DNA, 804 bp, Artificial Sequence
  derived and/or modified sequence
atgaccctcggacgtcggcttgcctgcctgtttctggcgtgtgtcctgccagctttgctactcggggggacagccctggcctccgagatagtgggcgggaggcgcgcccgtccccacgcctggccctttatggtgtccttgcagctacgcggcggccatttttgcggtgccaccctgatcgccccgaattttgttatgtctgccgcccactgtgttgctaatgtgaatgtgcgtgctgtcagagtggtgctgggagcacataacctgtcgcgcagagaaccaacgcgccaggtgtttgccgtgcaacgaatcttcgagaatggatacgatcccgtgaatctgctgaacgacattgtcatcttgcagttgaatgggagtgccactattaatgctaacgtgcaggtcgcacagctcccagcgcaaggccggaggctgggtaacggtgtgcagtgtttggccatgggttggggattgcttgggcgtaacagaggaatagcatcggtcctgcaggagctgaatgtgaccgtagtcacaagcctgtgccgccggtcgaacgtttgtacgctggtgagagggaggcaggcgggcgtgtgcttcggggactcggggtcccccctggtctgcaacggattaatccacggaatcgcaagtttcgttcgtgggggatgcgcctccggattgtaccctgatgcctttgctcctgtggcccagtttgtcaattggatcgacagcatcattcagaggtcagaagataatccgtgcccccatccaagggatccagaccccgcctccagaactcattag

SEQ ID NO: 122677 - DNA, 804 bp, Artificial Sequence
  derived and/or modified sequence
atgaccctgggccgccgcctggcctgcctcttcctggcctgtgtgctgcctgccctgctgctgggcggcacagccctggccagcgagatcgtgggcggccggcgggcccggccccacgcctggcccttcatggtgtccctgcagctgcggggcggccacttctgtggggccaccctcatcgcccccaactttgtgatgtctgctgcccactgtgtggccaacgtgaatgtgcgggctgtgcgggtggtgctgggcgcccacaacctgagcagaagagagcccacccggcaggtgtttgctgtgcagaggatctttgaaaatggctatgaccctgtgaacctgctgaatgacatcgtcatcctgcagctgaatggcagcgccaccatcaatgccaacgtgcaggtggcccagctgcctgcccagggccgccgcctgggcaatggagtgcagtgcctggccatgggctggggcctgctgggcaggaacagaggaattgcctctgtgctgcaggagctgaatgtgacagtggtgaccagcctgtgccgccgcagcaatgtgtgcaccctggtgcggggccggcaggccggcgtgtgctttggagacagcggcagccccctggtgtgcaatggcctcatccatggaattgccagctttgtgcggggcggctgtgccagcggcctgtacccagatgcctttgcccctgtggcccagtttgtgaactggattgacagcatcatccagaggtctgaggacaacccctgcccccacccccgggaccctgaccctgccagcaggacccactag

SEQ ID NO: 122678 - DNA, 804 bp, Artificial Sequence
  derived and/or modified sequence
atgaccctgggccggcggctggcctgcctgttcctggcctgcgtgctccccgccctgctgctcggcgggactgcattggcgtcggaaattgtgggtggacggagagcacggccccacgcctggccatttatggtctcgctccagctaagaggcgggcacttctgcggcgcaactttgattgccccaaatttcgttatgtctgccgcacactgtgtggcaaatgtgaacgtccgcgcagtgagggttgtcctgggggcccacaatttgtctagacgcgaacccacaaggcaggtcttcgccgtgcaaaggattttcgaaaatgggtacgaccctgtaaatcttcttaacgacattgtcattttgcagctgaacggctcagccaccattaatgcgaatgtccaggtcgcgcaactgcccgctcaggggaggcgtttaggaaatggggtgcagtgcctcgccatgggttggggcctgctggggaggaataggggtatcgcctctgttttgcaggagctgaatgttaccgtggtgactagtctctgcagaaggagtaatgtgtgtaccctggttcgcggacgacaagccggcgtgtgttttggtgacagcgggtctccacttgtttgcaatggtctcatccacggcatcgcctctttcgtacgaggcgggtgcgcaagcgggctttatcccgacgccttcgctccggtggcccagttcgttaattggatagacagtatcattcagcgtagtgaagataacccatgtccccacccacgagatcccgaccccgcctcacggacacactag

SEQ ID NO: 122679 - DNA, 804 bp, Artificial Sequence
  derived and/or modified sequence
atgaccctgggccggcggctggcctgcctgttcctggcctgcgtgctgcctgcactgctgttgggaggaactgcgctagcctctgagatcgttggggggcgacgcgccagaccacacgcatggccattcatggtgtctctgcagctgcgggggggacatttttgcggtgccaccctgatagcgcctaactttgtgatgtctgcagcgcactgcgtggctaatgttaatgtgagggcagtaagagtggtgctgggcgctcataacctgtcacggcgagagcccacaagacaggtttttgcagtgcagagaatcttcgagaatgggtatgatcctgttaatctcctgaatgacattgtcattctccagctgaatggatccgccaccattaatgcaaatgttcaagtcgctcagctgcctgcccagggacgccgcctcggcaacggcgtccaatgcttggcaatgggctggggtctgctcgggcggaatcgggggatagcatcagtgctgcaggagttaaacgtcaccgtagtcacatctttatgcagacggagtaatgtgtgcaccctcgtgcgcggcagacaagctggtgtctgctttggagattccggcagccctctcgtctgcaatggtttgatacatgggatcgcctcattcgtgagggggggttgtgcctcaggcttgtatccagacgctttcgcccccgtggcacagttcgtgaattggatcgacagtattatccagaggagtgaagacaacccttgcccccacccccgagaccccgatcccgcgtcacgaactcactag

SEQ ID NO: 122680 - DNA, 804 bp, Artificial Sequence
  derived and/or modified sequence
atgaccctgggacgcagacttgcttgtttatttctggcctgcgtgctgccagctctcctgcttggtggcaccgccctggcatcggagattgtaggcggaaggcgagccagaccacacgcatggccttttatggtgtcattacagttacgcggtggccacttttgcggcgctacactgattgcccctaactttgttatgtctgccgcacactgcgtagccaatgttaacgtgcgagctgtgagggtcgtgctgggagcgcataatcttagtaggagggaaccgacgcgtcaggtgtttgccgttcagcggatttttgagaatggctacgatcccgttaaccttctaaatgatatagtgattcttcagctgaatggttcagcaactatcaatgccaacgtgcaggtcgcacaactccccgcacagggacgacgactgggaaatggagtgcagtgtctggccatgggttggggtttactggggcgaaatcggggaatagcttcagtcctccaggagctgaatgttacagttgttaccagcttgtgtcgcaggagcaacgtctgtactttggtccgaggacgtcaggccggagtgtgtttcggggactcgggatccccactggtttgcaacggcctcatccacggaattgcgtccttcgtacggggtgggtgcgcctccgggttgtacccggacgcgtttgccccagtggctcagtttgtaaactggattgatagcatcatacagcggagcgaagataatccatgtcctcaccccagggaccccgacccagcatcccgaacacattag

SEQ ID NO: 122681 - DNA, 804 bp, Artificial Sequence
  derived and/or modified sequence
atgacattgggacgaagactcgcttgcctattcctagcctgcgtgcttccggctctcctgctcggcggtacagcgcttgctagtgagattgtcggcggtagaagagcccgaccgcacgcctggcccttcatggttagcttgcagctgagagggggtcacttttgcggagccacactcattgccccaaattttgtgatgtccgccgctcattgcgttgctaacgtgaacgtccgcgcagtccgggtggtcctcggcgctcacaatctctctagacgtgaacccaccagacaggtcttcgccgtgcagcggatcttcgagaacggctacgaccctgttaatctgctgaatgatatagtgatacttcagcttaacgggtcagcaacaatcaatgcgaatgtccaggtggcacagctgcctgcacagggcagacggctcggaaatggtgtacaatgcttggccatgggctggggcttgctgggacgtaatagggggattgccagcgtcttacaagagttaaatgtaactgttgtaacttccctatgtcgtcgatccaacgtgtgcacccttgtcagaggcagacaggccggtgtgtgcttcggggatagcggatcccctctagtgtgcaatggacttatacacggaattgccagcttcgtaaggggaggatgtgcttccggcttataccccgacgctttcgcccctgtcgctcagttcgtcaactggatcgactcaatcatacagagatcagaagacaacccctgtccccacccacgggacccagatcccgcttcacggacacattag

SEQ ID NO: 122682 - DNA, 90 bp, Artificial Sequence
  derived and/or modified sequence
atgtccccacccaaagaccccagccccagcctcccgcttccttcttcatcgtcgcattcttccagcccgccttcttcaagctccacgtag

SEQ ID NO: 122683 - DNA, 804 bp, Artificial Sequence
  derived and/or modified sequence
atgaccctgggcagaagactggcctgcctgttcctggcctgcgtgctgcccgccctgctgctgggcggcaccgccctggccagcgagatcgtgggcggcagaagagccagaccccacgcctggcccttcatggtgagcctgcagctgagaggcggccacttctgcggcgccaccctgatcgcccccaacttcgtgatgagcgccgcccactgcgtggccaacgtgaacgtgagagccgtgagagtggtgctgggcgcccacaacctgagcagaagagagcccaccagacaggtgttcgccgtgcagagaatcttcgagaacggctacgaccccgtgaacctgctgaacgacatcgtgatcctgcagctgaacggcagcgccaccatcaacgccaacgtgcaggtggcccagctgcccgcccagggcagaagactgggcaacggcgtgcagtgcctggccatgggctggggcctgctgggcagaaacagaggcatcgccagcgtgctgcaggagctgaacgtgaccgtggtgaccagcctgtgcagaagaagcaacgtgtgcaccctggtgagaggcagacaggccggcgtgtgcttcggcgacagcggcagccccctggtgtgcaacggcctgatccacggcatcgccagcttcgtgagaggcggctgcgccagcggcctgtaccccgacgccttcgcccccgtggcccagttcgtgaactggatcgacagcatcatccagagaagcgaggacaacccctgcccccaccccagagaccccgaccccgccagcagaacccactag

SEQ ID NO: 122684 - DNA, 1023 bp, Artificial Sequence
  derived and/or modified sequence
tgaccgtgagcctgggtgaaagggagaggaagtggagggcgctggccggccgtggggcaatgcaacggcctcccagcacagggctataagaggagccgggcgggcacggaggggcagagaccccggagccccagccccaccatgaccctcggccgccgactcgcgtgtcttttcctcgcctgtgtcctgccggccttgctgctggggggcaccgcgctggcctcggagattgtggggggccggcgagcgcggccccacgcgtggcccttcatggtgtccctgcagctgcgcggaggccacttctgcggcgccaccctgattgcgcccaacttcgtcatgtcggccgcgcactgcgtggcgaatgtaaacgtccgcgcggtgcgggtggtcctgggagcccataacctctcgcggcgggagcccacccggcaggtgttcgccgtgcagcgcatcttcgaaaacggctacgaccccgtaaacttgctcaacgacatcgtgattctccagctcaacgggtcggccaccatcaacgccaacgtgcaggtggcccagctgccggctcagggacgccgcctgggcaacggggtgcagtgcctggccatgggctggggccttctgggcaggaaccgtgggatcgccagcgtcctgcaggagctcaacgtgacggtggtgacgtccctctgccgtcgcagcaacgtctgcactctcgtgaggggccggcaggccggcgtctgtttcggggactccggcagccccttggtctgcaacgggctaatccacggaattgcctccttcgtccggggaggctgcgcctcagggctctaccccgatgcctttgccccggtggcacagtttgtaaactggatcgactctatcatccaacgctccgaggacaacccctgtccccacccccgggacccggacccggccagcaggacccactgagaagggctgcccgggtcacctcagctgcccacacccacactctccagcatctggcacaataaacattctctgttttgt

SEQ ID NO: 122685 - DNA, 920 bp, Artificial Sequence
  derived and/or modified sequence
gcacggaggggcagagaccccggagccccagccccaccatgaccctcggccgccgactcgcgtgtcttttcctcgcctgtgtcctgccggccttgctgctggggggcaccgcgctggcctcggagattgtggggggccggcgagcgcggccccacgcgtggcccttcatggtgtccctgcagctgcgcggaggccacttctgcggcgccaccctgattgcgcccaacttcgtcatgtcggccgcgcactgcgtggcgaatgtaaacgtccgcgcggtgcgggtggtcctgggagcccataacctctcgcggcgggagcccacccggcaggtgttcgccgtgcagcgcatcttcgaaaacggctacgaccccgtaaacttgctcaacgacatcgtgattctccagctcaacgggtcggccaccatcaacgccaacgtgcaggtggcccagctgccggctcagggacgccgcctgggcaacggggtgcagtgcctggccatgggctggggccttctgggcaggaaccgtgggatcgccagcgtcctgcaggagctcaacgtgacggtggtgacgtccctctgccgtcgcagcaacgtctgcactctcgtgaggggccggcaggccggcgtctgtttcggggactccggcagccccttggtctgcaacgggctaatccacggaattgcctccttcgtccggggaggctgcgcctcagggctctaccccgatgcctttgccccggtggcacagtttgtaaactggatcgactctatcatccaacgctccgaggacaacccctgtccccacccccgggacccggacccggccagcaggacccactgagaagggctgcccgggtcacctcagctgcccacacccacactctccagcatctggcacaataaacattctctgttttgt

SEQ ID NO: 122686 - protein, 886 aa, Artificial Sequence
  derived and/or modified sequence
MRGFNLLLFWGCCVMHSWEGHIRPTRKPNTKGNNCRDSTLCPAYATCTNTVDSYYCACKQGFLSSNGQNHFKDPGVRCKDIDECSQSPQPCGPNSSCKNLSGRYKCSCLDGFSSPTGNDWVPGKPGNFSCTDINECLTSSVCPEHSDCVNSMGSYSCSCQVGFISRNSTCEDVDECADPRACPEHATCNNTVGNYSCFCNPGFESSSGHLSFQGLKASCEDIDECTEMCPINSTCTNTPGSYFCTCHPGFAPSNGQLNFTDQGVECRDIDECRQDPSTCGPNSICTNALGSYSCGCIAGFHPNPEGSQKDGNFSCQRVLFKCKEDVIPDNKQIQQCQEGTAVKPAYVSFCAQINNIFSVLDKVCENKTTVVSLKNTTESFVPVLKQISTWTKFTKEETSSLATVFLESVESMTLASFWKPSANITPAVRTEYLDIESKVINKECSEENVTLDLVAKGDKMKIGCSTIEESESTETTGVAFVSFVGMESVLNERFFKDHQAPLTTSEIKLKMNSRVVGGIMTGEKKDGFSDPIIYTLENIQPKQKFERPICVSWSTDVKGGRWTSFGCVILEASETYTICSCNQMANLAVIMASGELTMDFSLYIISHVGIIISLVCLVLAIATFLLCRSIRNHNTYLHLHLCVCLLLAKTLFLAGIHKTDNKMGCAIIAGFLHYLFLACFFWMLVEAVILFLMVRNLKVVNYFSSRNIKMLHICAFGYGLPMLVVVISASVQPQGYGMHNRCWLNTETGFIWSFLGPVCTVIVINSLLLTWTLWILRQRLSSVNAEVSTLKDTRLLTFKAFAQLFILGCSWVLGIFQIGPVAGVMAYLFTIINSLQGAFIFLIHCLLNGQVREEYKRWITGKTKPSSQSQTSRILLSSMPSASKTG

SEQ ID NO: 122687 - DNA, 2661 bp, Artificial Sequence
  derived and/or modified sequence
atgcgcggattcaacttgctgctgttctggggatgttgtgtgatgcatagttgggagggccacatccgtcccactcgcaagccgaataccaaaggcaacaactgtagagattccacactttgccccgcgtacgccacctgcactaacacagtggattcatactactgtgcttgtaaacagggcttcctgtcctcaaacggtcagaatcactttaaagaccctggggtacgctgtaaagacatagacgaatgctctcaaagtcctcagccctgcgggcccaattcctcatgtaagaatctctccgggcgatacaaatgcagttgcctggatggattctcttcccctactggtaacgactgggtccccggtaagcccggaaactttagctgtaccgacattaatgaatgtctgacctcctctgtttgcccagaacattccgattgtgtgaatagtatggggtcgtactcctgttcatgccaggtgggcttcatcagtagaaactctacctgtgaggacgtcgatgaatgcgctgatcctcgggcttgtcctgagcacgcaacatgtaataacaccgtggggaactactcctgtttctgtaatcccggcttcgagtcaagcagcggacacttgtcgttccagggcctaaaagccagctgcgaagacatcgacgaatgtaccgaaatgtgtccaatcaattccacttgtacaaacacgcccgggtcctatttttgcacatgtcaccctgggttcgcgccttctaatgggcagcttaattttacggatcagggagtggaatgtagggacatcgatgaatgtcggcaggatcccagcacgtgcggccccaacagcatttgcaccaatgccttggggtcctattcttgcggttgtattgccgggtttcaccccaatcctgagggcagccagaaggacggcaactttagttgccagagagtattgttcaaatgtaaggaggacgtgattcctgataataaacagatccagcagtgccaggaaggcacagctgtcaagcctgcatacgtgtccttctgtgctcagattaacaacattttcagcgtgctcgataaagtttgcgaaaataagacaaccgtagtatctctcaagaacacaaccgagtctttcgtccctgtcctcaagcagatctctacatggacaaagtttacaaaagaagaaacctcatcgctggcaactgtgtttttggagagcgttgaaagtatgacactcgcttctttttggaagcccagcgcaaacataacacccgctgtgagaacagaatacctagacattgagtccaaggtaattaacaaagagtgtagtgaggagaatgtaactcttgatctggtcgccaagggcgataaaatgaaaattgggtgttccaccatagaagagagcgagtctacagaaaccacaggcgttgccttcgttagctttgttggaatggaaagtgtgcttaatgagcgcttcttcaaagaccaccaggctcccttgactaccagcgagattaaattgaagatgaactctagagtggtgggaggcattatgaccggagagaagaaggacggtttctctgatccaatcatctacacactcgagaacattcaacctaagcaaaagttcgagagacccatctgtgtaagttggagtaccgatgtgaaaggagggcggtggacttcatttgggtgtgtgatactggaagcttctgaaacatataccatctgttcctgtaaccaaatggcgaacctggctgtgatcatggccagcggtgaactcaccatggacttcagcctgtacattatcagtcacgtcggtatcatcatttccctcgtgtgcctggtcttggccatcgccacatttctattatgccggtcaattcgtaaccataacacctatctgcatctccacctctgtgtgtgtctgctgttggcgaaaacgctgttcctggcaggcatccataagacggacaacaaaatgggctgcgcgataatcgccggttttttgcattacctgtttctggcctgttttttctggatgcttgtcgaggctgtcatcctgtttcttatggtgcgcaatttaaaggtggtaaactatttttcatcaaggaacataaagatgttgcacatttgtgcctttggctacggtctgcccatgttggtggtggtaattagcgcctcagtacagcctcagggctatggcatgcacaatagatgctggttaaatacagagaccggctttatctggtcctttctgggtccagtgtgcaccgtgatcgtaattaactccctgctactcacttggacattgtggatcctacggcagaggctgagttcggtcaacgctgaagtgtcaaccttaaaagacacccggctgttaactttcaaagcttttgcccaattgtttatcctgggctgttcctgggtgcttggtatttttcagattgggccagtggccggcgtgatggcgtatcttttcacgattatcaattcgctacagggggcttttatctttctcatacactgtctgttaaatggccaggtgcgggaagaatataaacgctggatcacagggaagacaaagccaagcagtcaatcccagactagtagaatcctgctgtcttccatgccttcagcatccaaaactggttag

SEQ ID NO: 122688 - DNA, 2661 bp, Artificial Sequence
  derived and/or modified sequence
atgaggggcttcaacctgctgctcttctggggctgctgcgtgatgcacagctgggagggccacatccggcccaccaggaagcccaacaccaagggcaacaactgccgggacagcaccctgtgcccagcctatgccacctgcaccaacacagtggacagctactactgtgcctgcaagcagggcttcctgagcagcaatggccagaaccacttcaaggaccccggggtgcgctgcaaggacattgatgaatgttcccagagcccccagccctgtggccccaacagcagctgcaagaacctgagcggccgctacaagtgcagctgcctggatggcttcagcagccccactggaaatgactgggtgcctgggaagccaggcaacttcagctgcacagacatcaatgaatgtctgaccagctctgtgtgcccagagcacagcgactgtgtgaacagcatgggcagctacagctgcagctgccaggtgggcttcatcagcaggaacagcacctgtgaagatgtggatgaatgtgccgacccccgggcctgcccagagcacgccacctgcaacaacacagtgggcaactacagctgcttctgcaaccctggctttgagagcagcagcggccacctgtccttccagggcctgaaggccagctgtgaggacattgatgagtgcacagagatgtgccccatcaacagcacctgcaccaacaccccaggcagctacttctgcacctgccaccctggctttgcccccagcaatggccagctgaacttcacagaccagggcgtggagtgccgggacattgatgaatgtcggcaggaccccagcacctgtggccccaacagcatctgcaccaatgccctgggcagctacagctgtggctgcatcgccggcttccaccccaaccctgagggcagccagaaggatggcaacttcagctgccagagggtgctcttcaagtgcaaggaggatgtgatcccagacaacaagcagatccagcagtgccaggagggcacagctgtgaagccagcctacgtgtccttctgtgcccagatcaacaacatcttctctgtgctggacaaggtgtgtgagaacaagaccaccgtggtgtccctgaagaacaccacagagagctttgtgcctgtgctgaagcagatcagcacctggaccaagttcaccaaggaggagaccagcagcctggccaccgtcttcctggagagcgtggagagcatgaccctggccagcttctggaagcccagcgccaacatcaccccagctgtgaggacagagtacctggacatcgagagcaaggtgatcaacaaggaatgttctgaagaaaatgtgaccctggacctggtggccaagggggacaagatgaagattggctgcagcaccatcgaggagagcgagagcacagagaccaccggggtggcctttgtgtcctttgtgggcatggagagcgtgctgaatgaacgcttcttcaaggaccaccaggcccccctgaccaccagcgagatcaagctgaagatgaacagccgggtggtgggcggcatcatgactggagagaagaaggatggcttcagtgaccccatcatctacaccctggagaacatccagcccaagcagaagtttgagcggcccatctgtgtgtcctggagcacagatgtgaagggcggccgctggaccagctttggctgtgtgatcctggaggccagcgagacctacaccatctgcagctgcaaccagatggccaacctggccgtcatcatggccagcggggagctgaccatggacttcagcctgtacatcatcagccacgtgggcatcatcatcagcctggtgtgcctggtgctggccatcgccaccttcctgctgtgccgcagcatccggaaccacaacacctacctgcacctgcacctgtgtgtgtgcctgctgctggccaagaccctcttcctggccggcatccacaagacagacaacaagatgggctgtgccatcatcgccggcttcctgcactacctgttcctggcctgcttcttctggatgctggtggaggccgtcatcctcttcctgatggtgaggaacctgaaggtggtgaactacttcagcagcaggaacatcaagatgctgcacatctgtgccttcggctacggcctgcccatgctggtggtggtgatcagcgcctctgtgcagccccagggctacggcatgcacaaccgctgctggctgaacacagagaccggcttcatctggagcttcctgggccctgtgtgcaccgtcatcgtcatcaacagcctgctgctgacctggaccctgtggatcctgcggcagaggctgagctctgtgaatgctgaggtgtccaccctgaaggacacccggctgctgaccttcaaggcctttgcccagctgttcatcctgggctgctcctgggtgctgggcatcttccagatcggccctgtggccggcgtgatggcctacctgttcaccatcatcaacagcctgcagggcgccttcatcttcctgatccactgcctgctgaatggccaggtgcgggaggagtacaagcgctggatcaccgggaagaccaagcccagcagccagagccagaccagccgcatcctgctgagctccatgcccagcgccagcaagacaggatag

SEQ ID NO: 122689 - DNA, 2661 bp, Artificial Sequence
  derived and/or modified sequence
atgcggggcttcaacctgctgctgttctggggctgctgcgtgatgcattcttgggaaggacacatacggcccacccgaaagcctaacacgaaaggcaacaattgtcgagattctacattgtgtcccgcctatgctacctgcacaaacacggttgactcttattactgcgcctgtaaacagggatttttatcttctaatgggcagaatcacttcaaggacccaggcgtccgctgcaaggacatcgatgagtgtagccaaagccctcagccttgtggacccaatagctcttgcaaaaacctttcaggccggtacaaatgttcctgcctggatggttttagtagccccacaggtaatgactgggtgccaggaaagccgggcaacttcagctgcacggacatcaatgagtgcctgactagcagtgtgtgtcctgagcacagcgattgcgtgaactcgatgggcagctattcctgttcttgtcaagtaggattcatctcccggaacagcacctgcgaggatgtggatgagtgtgcagatcctcgggcatgcccggagcacgctacctgtaataacacggtcggcaattactcctgcttctgtaaccccggcttcgaaagctcttcaggccatctcagcttccagggtcttaaagcttcctgtgaggacattgatgagtgtactgaaatgtgccctattaattccacgtgcactaatacaccgggatcttatttttgcacttgccaccccgggtttgccccgtctaacggccaattgaattttaccgaccaaggcgtagagtgccgagatatcgacgagtgtcgccaagatccatcaacttgcggtccgaattctatttgcaccaatgccctcggctcctatagctgtggctgtatcgccggctttcaccccaaccccgagggctctcagaaggacgggaacttctcctgtcagcgtgtgctgttcaaatgcaaggaagacgtcattccagacaataaacagatccaacagtgtcaggaaggcacggccgtgaaaccagcgtatgtgtccttctgtgcccaaatcaataacattttcagcgtcctcgacaaggtctgcgaaaacaagacaaccgtggtgtctctcaaaaataccactgaatcttttgtccccgtactaaaacaaatttccacctggaccaagtttaccaaggaagaaaccagcagcctggctacagtctttcttgagtccgtggaaagcatgacgctagctagtttctggaaaccaagcgcaaatatcactccagcggtccggaccgagtatctcgacattgagtctaaggtcattaataaggagtgttctgaggaaaacgtgaccctagacctggtagccaaaggagacaaaatgaagattgggtgtagcaccatagaagaatctgaaagcaccgagaccacaggggtcgcgttcgtgagtttcgtagggatggagagcgtcctgaacgagaggttcttcaaagatcaccaggccccccttaccacttctgagatcaaacttaagatgaacagccgcgttgtgggcggaatcatgacaggtgaaaagaaggacggcttttctgatcctatcatttatactctagagaatattcagccgaagcagaaatttgaacggccaatttgtgtgtcctggagcaccgatgtgaaaggaggccgttggacttcatttgggtgcgtgattctagaggctagcgagacctacaccatttgcagttgtaatcagatggccaacctggctgttatcatggcatctggggaactgactatggatttcagtctgtacattatttcacatgtgggaatcattattagcttagtctgcctggtgctggctatcgcaaccttcctgttgtgtaggtctatccgaaatcacaatacctatctccatctgcatctctgcgtgtgtttgctcctggcaaaaacgctgtttttggctggcatccataagacagataacaagatgggatgcgccataatcgctggttttctgcattacttgttcctggcttgcttcttctggatgctggtggaggctgtcattctgttcctgatggtccggaacctaaaagtggttaactacttctctagtcgcaatattaaaatgttacacatttgcgcctttggttacggacttcccatgctcgtcgtggtcatatcggccagtgttcagccacagggctatgggatgcataatagatgttggttgaacaccgagactggatttatctggtccttcctgggtccagtttgtacggtgatagtgatcaatagtctgctgttaacatggactctctggattctccgccagagactctcatccgtgaacgccgaggtgtctactctgaaagacaccaggctcctgactttcaaagcctttgcgcagctcttcattcttggatgctcatgggtccttggtattttccagatcggcccagtcgccggcgtcatggcctacctgttcacaatcatcaatagtctgcaaggggcgttcatattcttgatacactgcctcctgaacggccaggtacgcgaggaatacaagcgatggattactggtaaaacaaaacccagcagccagagtcaaacgagccgaatcctgctgtcaagcatgccatccgcttcaaagaccggctag

SEQ ID NO: 122690 - DNA, 2661 bp, Artificial Sequence
  derived and/or modified sequence
atgaggggatttaatctcctgttattctggggatgctgcgttatgcactcttgggaagggcatattaggcccacacggaaacctaatactaagggtaataattgccgcgacagtacgctgtgccccgcttacgcgacttgtaccaataccgtcgacagttattactgcgcttgtaaacagggctttctctcgtctaacggccaaaaccattttaaggacccaggggtcaggtgcaaagatatcgatgagtgctcacagtctccccagccctgtggaccgaattcttcgtgcaaaaatctgagtgggagatacaaatgcagttgcctggacggtttttctagccctacaggtaatgactgggtcccgggtaagcccggaaacttcagctgcaccgacattaacgaatgtctgacaagctctgtctgccccgagcactccgactgcgttaactctatgggctcctattcatgctcatgccaggtgggcttcatctcacggaactccacctgtgaggatgtggatgaatgcgcagatccgcgagcctgccccgagcatgcaacttgtaataacaccgttgggaactacagctgtttttgcaatccgggtttcgaaagttcaagtggccacctgagctttcaggggctgaaggcttcctgcgaggacattgatgagtgtactgagatgtgtccaattaattccacctgcaccaacacacctgggtcctacttctgcacttgccacccaggcttcgctccctccaatggccagctgaacttcactgatcagggagtggagtgccgggatattgacgagtgcaggcaggatccttccacttgcgggccaaatagcatttgtaccaacgcattggggtcgtattcatgcggatgcatcgccggattccaccctaatcctgagggatcacagaaagacggcaatttttcatgtcagcgagtgcttttcaagtgcaaggaagatgtgatcccagacaacaagcagatccagcagtgccaggagggcacagcggtgaagcctgcttacgttagtttctgcgcgcagataaataacatattctctgtgctggataaagtctgtgaaaataagactacagtagtgtccctcaagaacactaccgaaagcttcgtgcccgtcctgaagcaaatttccacctggactaagttcaccaaggaggagacttctagcctggcgaccgtatttttagagtctgtggagagcatgacgttagcgtcgttctggaaaccatccgctaacatcacacccgcagttcgcaccgaatatttagatatcgagtcaaaggtgatcaacaaagagtgctcagaagagaacgtgacactagatttagtggcaaaaggagataagatgaagatagggtgtagtactatcgaagagagtgaaagcaccgagacgaccggggtggcctttgtaagcttcgtaggcatggagtcagttttgaatgagagatttttcaaggatcatcaggccccactaacaacgagtgaaataaagctcaaaatgaactcacgggtggtcggagggatcatgacaggagagaaaaaggacggattctctgatcccatcatctacacacttgagaacattcaaccgaagcagaagttcgaacggcctatttgcgttagttggagtacagatgtaaagggagggagatggacatcctttggctgcgtgatcctggaggcatccgagacctacaccatatgctcctgtaatcaaatggccaatttggctgtgataatggcttctggcgagctgaccatggatttctcactgtatattatctcccacgtgggcataatcattagcttagtgtgtctcgttttggccattgctacctttttgctgtgcaggtccatccgtaaccacaatacctacctgcacctgcacctctgtgtgtgcctgttactggcaaagactctgttcctagcgggaattcataaaacggacaacaagatggggtgtgccatcatcgctggtttcctccattaccttttcctggcctgctttttttggatgctcgtggaggccgtgatactttttttgatggtgagaaacctgaaagtggtgaattattttagctctagaaacattaaaatgctccacatatgcgctttcggatacgggctcccaatgcttgttgtcgtgatatctgccagtgtccagccccaggggtacggtatgcacaaccggtgctggctcaatactgaaactggcttcatctggtcctttttgggacctgtttgcacggtgattgtgataaactccctccttctgacatggaccctttggattctccgccagcgtttgagctccgtaaatgctgaagtgagcacgcttaaggacacgcgcttgctcacctttaaagcctttgcacagctattcattttaggctgtagctgggtgcttgggatctttcagataggccctgtggctggagtcatggcatatctgttcaccatcataaactctctccagggagcatttatatttctcattcactgtctattgaacggacaagtacgagaggaatataaacggtggattaccggaaagactaagccttcgtcgcagtctcaaacatcacgcatcctcctgagtagcatgccttccgcctcaaagaccggatag

SEQ ID NO: 122691 - DNA, 2661 bp, Artificial Sequence
  derived and/or modified sequence
atgagaggcttcaacctgctgctgttctggggctgctgcgtgatgcacagctgggagggccacatcagacccaccagaaagcccaacaccaagggcaacaactgcagagacagcaccctgtgccccgcctacgccacctgcaccaacaccgtggacagctactactgcgcctgcaagcagggcttcctgagcagcaacggccagaaccacttcaaggaccccggcgtgagatgcaaggacatcgacgagtgcagccagagcccccagccctgcggccccaacagcagctgcaagaacctgagcggcagatacaagtgcagctgcctggacggcttcagcagccccaccggcaacgactgggtgcccggcaagcccggcaacttcagctgcaccgacatcaacgagtgcctgaccagcagcgtgtgccccgagcacagcgactgcgtgaacagcatgggcagctacagctgcagctgccaggtgggcttcatcagcagaaacagcacctgcgaggacgtggacgagtgcgccgaccccagagcctgccccgagcacgccacctgcaacaacaccgtgggcaactacagctgcttctgcaaccccggcttcgagagcagcagcggccacctgagcttccagggcctgaaggccagctgcgaggacatcgacgagtgcaccgagatgtgccccatcaacagcacctgcaccaacacccccggcagctacttctgcacctgccaccccggcttcgcccccagcaacggccagctgaacttcaccgaccagggcgtggagtgcagagacatcgacgagtgcagacaggaccccagcacctgcggccccaacagcatctgcaccaacgccctgggcagctacagctgcggctgcatcgccggcttccaccccaaccccgagggcagccagaaggacggcaacttcagctgccagagagtgctgttcaagtgcaaggaggacgtgatccccgacaacaagcagatccagcagtgccaggagggcaccgccgtgaagcccgcctacgtgagcttctgcgcccagatcaacaacatcttcagcgtgctggacaaggtgtgcgagaacaagaccaccgtggtgagcctgaagaacaccaccgagagcttcgtgcccgtgctgaagcagatcagcacctggaccaagttcaccaaggaggagaccagcagcctggccaccgtgttcctggagagcgtggagagcatgaccctggccagcttctggaagcccagcgccaacatcacccccgccgtgagaaccgagtacctggacatcgagagcaaggtgatcaacaaggagtgcagcgaggagaacgtgaccctggacctggtggccaagggcgacaagatgaagatcggctgcagcaccatcgaggagagcgagagcaccgagaccaccggcgtggccttcgtgagcttcgtgggcatggagagcgtgctgaacgagagattcttcaaggaccaccaggcccccctgaccaccagcgagatcaagctgaagatgaacagcagagtggtgggcggcatcatgaccggcgagaagaaggacggcttcagcgaccccatcatctacaccctggagaacatccagcccaagcagaagttcgagagacccatctgcgtgagctggagcaccgacgtgaagggcggcagatggaccagcttcggctgcgtgatcctggaggccagcgagacctacaccatctgcagctgcaaccagatggccaacctggccgtgatcatggccagcggcgagctgaccatggacttcagcctgtacatcatcagccacgtgggcatcatcatcagcctggtgtgcctggtgctggccatcgccaccttcctgctgtgcagaagcatcagaaaccacaacacctacctgcacctgcacctgtgcgtgtgcctgctgctggccaagaccctgttcctggccggcatccacaagaccgacaacaagatgggctgcgccatcatcgccggcttcctgcactacctgttcctggcctgcttcttctggatgctggtggaggccgtgatcctgttcctgatggtgagaaacctgaaggtggtgaactacttcagcagcagaaacatcaagatgctgcacatctgcgccttcggctacggcctgcccatgctggtggtggtgatcagcgccagcgtgcagccccagggctacggcatgcacaacagatgctggctgaacaccgagaccggcttcatctggagcttcctgggccccgtgtgcaccgtgatcgtgatcaacagcctgctgctgacctggaccctgtggatcctgagacagagactgagcagcgtgaacgccgaggtgagcaccctgaaggacaccagactgctgaccttcaaggccttcgcccagctgttcatcctgggctgcagctgggtgctgggcatcttccagatcggccccgtggccggcgtgatggcctacctgttcaccatcatcaacagcctgcagggcgccttcatcttcctgatccactgcctgctgaacggccaggtgagagaggagtacaagagatggatcaccggcaagaccaagcccagcagccagagccagaccagcagaatcctgctgagcagcatgcccagcgccagcaagaccggctag

SEQ ID NO: 122692 - DNA, 3122 bp, Artificial Sequence
  derived and/or modified sequence
aaaagtttcttttctttgaatgacagaactacagcataatgcgtggcttcaacctgctcctcttctggggatgttgtgttatgcacagctgggaagggcacataagacccacacggaaaccaaacacaaagggtaataactgtagagacagtaccttgtgcccagcttatgccacctgcaccaatacagtggacagttactattgcgcttgcaaacaaggcttcctgtccagcaatgggcaaaatcacttcaaggatccaggagtgcgatgcaaagatattgatgaatgttctcaaagcccccagccctgtggtcctaactcatcctgcaaaaacctgtcagggaggtacaagtgcagctgtttagatggtttctcttctcccactggaaatgactgggtcccaggaaagccgggcaatttctcctgtactgatatcaatgagtgcctcaccagcagcgtctgccctgagcattctgactgtgtcaactccatgggaagctacagttgcagctgtcaagttggattcatctctagaaactccacctgtgaagacgtggatgaatgtgcagatccaagagcttgcccagagcatgcaacttgtaataacactgttggaaactactcttgtttctgcaacccaggatttgaatccagcagtggccacttgagtttccagggtctcaaagcatcgtgtgaagatattgatgaatgcactgaaatgtgccccatcaattcaacatgcaccaacactcctgggagctacttttgcacctgccaccctggctttgcaccaagcaatggacagttgaatttcacagaccaaggagtggaatgtagagatattgatgagtgccgccaagatccatcaacctgtggtcctaattctatctgcaccaatgccctgggctcctacagctgtggctgcattgcaggctttcatcccaatccagaaggctcccagaaagatggcaacttcagctgccaaagggttctcttcaaatgtaaggaagatgtgatacccgataataagcagatccagcaatgccaagagggaaccgcagtgaaacctgcatatgtctccttttgtgcacaaataaataacatcttcagcgttctggacaaagtgtgtgaaaataaaacgaccgtagtttctctgaagaatacaactgagagctttgtccctgtgcttaaacaaatatccacgtggactaaattcaccaaggaagagacgtcctccctggccacagtcttcctggagagtgtggaaagcatgacactggcatctttttggaaaccctcagcaaatatcactccggctgttcggacggaatacttagacattgagagcaaagttatcaacaaagaatgcagtgaagagaatgtgacgttggacttggtagccaagggggataagatgaagatcgggtgttccacaattgaggaatctgaatccacagagaccactggtgtggcttttgtctcctttgtgggcatggaatcggttttaaatgagcgcttcttcaaagaccaccaggctcccttgaccacctctgagatcaagctgaagatgaattctcgagtcgttgggggcataatgactggagagaagaaagacggcttctcagatccaatcatctacactctggagaacattcagccaaagcagaagtttgagaggcccatctgtgtttcctggagcactgatgtgaagggtggaagatggacatcctttggctgtgtgatcctggaagcttctgagacatataccatctgcagctgtaatcagatggcaaatcttgccgttatcatggcgtctggggagctcacgatggacttttccttgtacatcattagccatgtaggcattatcatctccttggtgtgcctcgtcttggccatcgccacctttctgctgtgtcgctccatccgaaatcacaacacctacctccacctgcacctctgcgtgtgtctcctcttggcgaagactctcttcctcgccggtatacacaagactgacaacaagatgggctgcgccatcatcgcgggcttcctgcactaccttttccttgcctgcttcttctggatgctggtggaggctgtgatactgttcttgatggtcagaaacctgaaggtggtgaattacttcagctctcgcaacatcaagatgctgcacatctgtgcctttggttatgggctgccgatgctggtggtggtgatctctgccagtgtgcagccacagggctatggaatgcataatcgctgctggctgaatacagagacagggttcatctggagtttcttggggccagtttgcacagttatagtgatcaactcccttctcctgacctggaccttgtggatcctgaggcagaggctttccagtgttaatgccgaagtctcaacgctaaaagacaccaggttactgaccttcaaggcctttgcccagctcttcatcctgggctgctcctgggtgctgggcatttttcagattggacctgtggcaggtgtcatggcttacctgttcaccatcatcaacagcctgcagggggccttcatcttcctcatccactgtctgctcaacggccaggtacgagaagaatacaagaggtggatcactgggaagacgaagcccagctcccagtcccagacctcaaggatcttgctgtcctccatgccatccgcttccaagacgggttaaagtcctttcttgctttcaaatatgctatggagccacagttgaggacagtagtttcctgcaggagcctaccctgaaatctcttctcagcttaacatggaaatgaggatcccaccagccccagaaccctctggggaagaatgttgggggcggtcttcctgtggttgtatgcactgatgagaaatcaggcgtttctgctccaaacgaccattttatcttcgtgctctgcaacttcttcaattccagagtttctgagaacagacccaaattcaatggcatgaccaagaacacctggctaccattttgttttctcctgcccttgttggtgcatggttctaagcatgcccctccagagcctatcatacgcctgatacagagaacctctcaataaatgatttgtcgcctgtctgactgatttaccctagg

SEQ ID NO: 122693 - protein, 434 aa, Artificial Sequence
  derived and/or modified sequence
MSIEKIWAREILDSRGNPTVEVDLYTAKGLFRAAVPSGASTGIYEALELRDGDKQRYLGKGVLKAVDHINSTIAPALISSGLSVVEQEKLDNLMLELDGTENKSKFGANAILGVSLAVCKAGAAERELPLYRHIAQLAGNSDLILPVPAFNVINGGSHAGNKLAMQEFMILPVGAESFRDAMRLGAEVYHTLKGVIKDKYGKDATNVGDEGGFAPNILENSEALELVKEAIDKAGYTEKIVIGMDVAASEFYRDGKYDLDFKSPTDPSRYITGDQLGALYQDFVRDYPVVSIEDPFDQDDWAAWSKFTANVGIQIVGDDLTVTNPKRIERAVEEKACNCLLLKVNQIGSVTEAIQACKLAQENGWGVMVSHRSGETEDTFIADLVVGLCTGQIKTGAPCRSERLAKYNQLMRIEEELGDEARFAGHNFRNPSVL

SEQ ID NO: 122694 - protein, 391 aa, Artificial Sequence
  derived and/or modified sequence
MSIEKIWAREILDSRGNPTVEVDLYTAKGLFRAAVPSGASTGIYEALELRDGDKQRYLGKAKFGANAILGVSLAVCKAGAAERELPLYRHIAQLAGNSDLILPVPAFNVINGGSHAGNKLAMQEFMILPVGAESFRDAMRLGAEVYHTLKGVIKDKYGKDATNVGDEGGFAPNILENSEALELVKEAIDKAGYTEKIVIGMDVAASEFYRDGKYDLDFKSPTDPSRYITGDQLGALYQDFVRDYPVVSIEDPFDQDDWAAWSKFTANVGIQIVGDDLTVTNPKRIERAVEEKACNCLLLKVNQIGSVTEAIQACKLAQENGWGVMVSHRSGETEDTFIADLVVGLCTGQIKTGAPCRSERLAKYNQLMRIEEELGDEARFAGHNFRNPSVL

SEQ ID NO: 122695 - DNA, 1305 bp, Artificial Sequence
  derived and/or modified sequence
atgagcatcgagaagatctgggccagagagatcctggacagcagaggcaaccccaccgtggaggtggacctgtacaccgccaagggcctgttcagagccgccgtgcccagcggcgccagcaccggcatctacgaggccctggagctgagagacggcgacaagcagagatacctgggcaagggcgtgctgaaggccgtggaccacatcaacagcaccatcgcccccgccctgatcagcagcggcctgagcgtggtggagcaggagaagctggacaacctgatgctggagctggacggcaccgagaacaagagcaagttcggcgccaacgccatcctgggcgtgagcctggccgtgtgcaaggccggcgccgccgagagagagctgcccctgtacagacacatcgcccagctggccggcaacagcgacctgatcctgcccgtgcccgccttcaacgtgatcaacggcggcagccacgccggcaacaagctggccatgcaggagttcatgatcctgcccgtgggcgccgagagcttcagagacgccatgagactgggcgccgaggtgtaccacaccctgaagggcgtgatcaaggacaagtacggcaaggacgccaccaacgtgggcgacgagggcggcttcgcccccaacatcctggagaacagcgaggccctggagctggtgaaggaggccatcgacaaggccggctacaccgagaagatcgtgatcggcatggacgtggccgccagcgagttctacagagacggcaagtacgacctggacttcaagagccccaccgaccccagcagatacatcaccggcgaccagctgggcgccctgtaccaggacttcgtgagagactaccccgtggtgagcatcgaggaccccttcgaccaggacgactgggccgcctggagcaagttcaccgccaacgtgggcatccagatcgtgggcgacgacctgaccgtgaccaaccccaagagaatcgagagagccgtggaggagaaggcctgcaactgcctgctgctgaaggtgaaccagatcggcagcgtgaccgaggccatccaggcctgcaagctggcccaggagaacggctggggcgtgatggtgagccacagaagcggcgagaccgaggacaccttcatcgccgacctggtggtgggcctgtgcaccggccagatcaagaccggcgccccctgcagaagcgagagactggccaagtacaaccagctgatgagaatcgaggaggagctgggcgacgaggccagattcgccggccacaacttcagaaaccccagcgtgctgtag

SEQ ID NO: 122696 - DNA, 1305 bp, Artificial Sequence
  derived and/or modified sequence
atgagtattgaaaaaatctgggcccgcgaaattctggactcaagaggcaacccaactgtggaagtagacttatataccgctaaagggctgttcagagcggcagtcccctccggcgcttctacggggatttacgaggcccttgagctcagggatggagataaacagagatatctcggaaaaggggtgttgaaggccgttgatcacatcaatagtaccatagcccctgcactcatctcctccggactttctgtggttgagcaggaaaaactggataatcttatgctcgagctggatggaactgagaataagagcaaattcggtgctaacgcaattctgggagtttctttagcagtgtgcaaagcgggtgccgcagagcgcgagcttccactgtatcggcacatcgcacaacttgccggcaacagtgatctgattttgccggtgccggcctttaacgtgataaatggcggcagtcacgccggcaacaagctggcaatgcaggagttcatgatcttacctgtcggcgcagagtccttccgcgatgcgatgaggcttggggctgaagtgtaccacaccctgaagggggtcatcaaagacaaatatggaaaggacgcaaccaacgtaggggacgaaggcggattcgccccgaacattctcgagaattccgaggctctcgaactagtgaaagaggccatcgacaaggccggctacacagaaaagattgtgatcggcatggatgtggcagctagcgagttctaccgggatgggaagtacgatttggacttcaagtcaccgacagatccttctagatacattactggggaccagctgggtgccttataccaggacttcgttagggactatcccgtcgtttccatcgaggaccccttcgaccaggatgattgggccgcatggagcaaatttacagctaacgtggggatacagatcgttggagacgacctgacggtgaccaacccaaaacggatagagcgtgcagtggaggagaaggcttgtaattgtcttcttttaaaggtcaatcagatcgggagtgtaaccgaagcaatccaggcttgcaaacttgcacaggaaaatggctggggggtcatggtgagccacagaagcggcgagactgaggacacttttattgctgaccttgttgtaggcctgtgcaccggccagatcaagaccggggctccctgccggtcggagaggctcgctaaatataaccagctgatgagaattgaagaagagttgggtgacgaagcacggtttgccggccataatttcaggaacccatcggtgctctag

SEQ ID NO: 122697 - DNA, 2423 bp, Artificial Sequence
  derived and/or modified sequence
acccgcgctcgtacgtgcgcctccgccggcagctcctgactcatcgggggctccgggtcacatgcgcccgcgcggccctataggcgcctcctccgcccgccgcccgggagccgcagccgccgccgccactgccactcccgctctctcagcgccgccgtcgccaccgccaccgccaccgccactaccaccgtctgagtctgcagtcccgagatcccagccatcatgtccatagagaagatctgggcccgggagatcctggactcccgcgggaaccccacagtggaggtggatctctatactgccaaaggtcttttccgggctgcagtgcccagtggagcctctacgggcatctatgaggccctggagctgagggatggagacaaacagcgttacttaggcaaaggtgtcctgaaggcagtggaccacatcaactccaccatcgcgccagccctcatcagctcaggtctctctgtggtggagcaagagaaactggacaacctgatgctggagttggatgggactgagaacaaatccaagtttggggccaatgccatcctgggtgtgtctctggccgtgtgtaaggcaggggcagctgagcgggaactgcccctgtatcgccacattgctcagctggccgggaactcagacctcatcctgcctgtgccggccttcaacgtgatcaatggtggctctcatgctggcaacaagctggccatgcaggagttcatgatcctcccagtgggagctgagagctttcgggatgccatgcgactaggtgcagaggtctaccatacactcaagggagtcatcaaggacaaatacggcaaggatgccaccaatgtgggggatgaaggtggctttgcccccaatatcctggagaacagtgaagccttggagctggtgaaggaagccatcgacaaggctggctacacggaaaagatcgttattggcatggatgttgctgcctcagagttttatcgtgatggcaaatatgacttggacttcaagtctcccactgatccttcccgatacatcactggggaccagctgggggcactctaccaggactttgtcagggactatcctgtggtctccattgaggacccatttgaccaggatgattgggctgcctggtccaagttcacagccaatgtagggatccagattgtgggtgatgacctgacagtgaccaacccaaaacgtattgagcgggcagtggaagaaaaggcctgcaactgtctgctgctcaaggtcaaccagatcggctcggtcactgaagccatccaagcgtgcaagctggcccaggagaatggctggggggtcatggtgagtcatcgctcaggagagactgaggacacattcattgctgacctggtggtggggctgtgcacaggccagatcaagactggtgccccgtgccgttctgaacgtctggctaaatacaaccagctcatgagaattgaggaagagctgggggatgaagctcgctttgccggacataacttccgtaatcccagtgtgctgtgattcctctgcttgcctggagacgtggaacctctgtctcatcctcctggaaccttgctgtcctgatctgtgatagttcaccccctgagatcccctgagccccagggtgcccagaacttccctgattgacctgctccgctgctccttggcttacctgacctcttgctgtctctgctcgccctcctttctgtgccctactcattggggttccgcactttccacttcttcctttctctttctctcttccctcagaaactagaaatgtgaatgaggattattataaaagggggtccgtggaagaatgatcagcatctgtgatgggagcgtcagggttggtgtgctgaggtgttagagagggaccatgtgtcacttgtgctttgctcttgtcccacgtgtcttccactttgcatatgagccgtgaactgtgcatagtgctgggatggaggggagtgttgggcatgtgatcacgcctggctaataaggctttagtgtatttatttatttatttattttatttgtttttcattcatcccattaatcatttccccataactcaatggcctaaaactggcctgacttgggggaacgatgtgtctgtatttcatgtggctgtagatcccaagatgactggggtgggaggtcttgctagaatgggaagggtcatagaaagggccttgacatcagttcctttgtgtgtactcactgaagcctgcgttggtccagagcggaggctgtgtgcctgggggagttttcctctatacatctctccccaaccctaggttccctgttcttcctccagctgcaccagagcaacctctcactccccatgccacgttccacagttgccaccacctctgtggcattgaaatgagcacctccattaaagtctgaatcagtgc

SEQ ID NO: 122698 - DNA, 1305 bp, Artificial Sequence
  derived and/or modified sequence
atgagcattgagaagatctgggcccgggagatcctggacagccggggcaaccccaccgtggaggtggacctgtacacagccaagggcctcttccgggctgctgtgcccagcggggccagcacaggcatctatgaggccctggagctgagagatggagacaagcagcgctacctgggcaagggcgtgctgaaggctgtggaccacatcaacagcaccatcgccccagccctgatcagcagcggcctgtctgtggtggagcaggagaagctggacaacctgatgctggagctggatggaacagagaacaagagcaagtttggagccaatgccatcctgggcgtgtccctggccgtgtgcaaggccggggctgctgagcgggagctgcccctgtaccgccacatcgcccagctggccggcaacagcgacctgatcctgcctgtgcctgccttcaacgtcatcaatggaggcagccatgctggcaacaagctggccatgcaggagttcatgatcctgcctgtgggcgctgagagcttcagagatgccatgaggctgggcgctgaggtgtaccacaccctgaagggcgtcatcaaggacaagtatggcaaggatgccaccaacgtgggagatgaaggaggctttgcccccaacatcctggagaacagcgaggccctggagctggtgaaggaggccatcgacaaggccggctacacagagaagatcgtcatcggcatggatgtggccgccagcgagttctacagagatggcaagtatgacctggacttcaagagccccacagaccccagccgctacatcaccggggaccagctgggcgccctgtaccaggactttgtgcgggactaccctgtggtgtccattgaggacccctttgaccaggatgactgggccgcctggagcaagttcaccgccaacgtgggcatccagatcgtgggagatgacctgactgtgaccaaccccaagagaattgaaagagctgtggaggagaaggcctgcaactgcctgctgctgaaggtgaaccagatcggctctgtgacagaggccatccaggcctgcaagctggcccaggagaatggctggggcgtgatggtgagccacaggtctggagaaacagaggacaccttcatcgctgacctggtggtgggcctgtgcaccggccagatcaagacaggagccccctgccgctctgagcggctggccaagtacaaccagctgatgagaattgaggaggagctgggagatgaggccaggtttgctggccacaacttcaggaaccccagcgtgctgtag

SEQ ID NO: 122699 - DNA, 1305 bp, Artificial Sequence
  derived and/or modified sequence
atgagcatcgagaagatctgggcccgggagatcctggacagccgggggaatccaactgtagaagtggatctgtatacagcaaaaggcttattccgcgccgccgtcccaagcggagccagcaccggtatttacgaggccctcgaactgagagatggggacaaacagcgctatctcggaaaaggcgtgctgaaagcagtggaccacattaattctacaatagcaccggctcttatcagcagcgggttgagtgtagtcgagcaggagaagctggacaacctcatgctggagttagacggaacagagaacaaatctaagtttggagccaacgcgatccttggcgtgtcattggctgtctgtaaagccggcgctgctgagcgagaattgccattatatcggcatatagctcagttggctggcaactcagaccttattctccccgtaccagcttttaacgtcattaacggcggatcacacgctggcaataagctggccatgcaggagttcatgatcctcccagttggggcagagtctttccgcgatgcaatgagacttggagcagaagtgtatcacacactgaaaggtgtgattaaagataaatatggtaaggatgcaaccaacgtgggcgatgaaggtggatttgcccctaacattttggaaaattccgaggcactggagctggtaaaagaggcaattgataaagcgggttacaccgaaaagatcgtgattggtatggacgtagcagcaagcgagttttaccgcgatgggaaatacgacttggatttcaaaagccccaccgatccctcacgctatatcacaggggaccagctaggcgcactataccaggactttgtgcgcgactaccccgtagttagtatcgaagaccccttcgatcaggatgattgggctgcttggagcaagtttacggcaaatgtggggatccagattgtcggcgatgatctcacagtcacaaaccccaagcggatagagagggcagtggaggaaaaagcctgcaactgccttcttcttaaagtgaatcagataggttctgtaacagaagctatacaggcttgcaagctggctcaagaaaacggctggggggtgatggtgtcacaccgaagtggggagacggaagacacatttatcgctgatctggttgtgggtttatgtaccgggcaaatcaagactggcgccccctgtaggtccgaacgcctggctaaatataatcagcttatgcggatagaagaagaactgggcgacgaagctcgcttcgctgggcacaatttcaggaatcctagtgttctttag

SEQ ID NO: 122700 - DNA, 1305 bp, Artificial Sequence
  derived and/or modified sequence
atgtctatcgagaagatttgggccagggaaatcttggactcaaggggcaaccctactgtggaggttgatctttacaccgctaagggcctcttccgggctgccgttccatctggcgctagcaccggaatctatgaagctctggagttacgggacggcgataagcagcgttacctcggcaagggagtcttgaaagcagtggatcacatcaattctactattgcaccagccctcatctcatcaggtctgtcagttgtggaacaagaaaaactcgataatcttatgttggagctggacggaactgagaacaaatcaaaatttggagcaaacgccattctcggcgtgtctctggcggtgtgtaaagcaggggcagccgaaagggaacttcctctctatcgtcacattgcccagctggccggaaactcagatctgatcctcccagtgccagccttcaatgttatcaatgggggatctcacgctggaaacaagttggccatgcaagagtttatgattcttcccgtgggagcagaatcctttcgggatgccatgagactgggagcggaagtctaccacactttgaaaggggttataaaggacaagtatggcaaggatgccaccaatgtaggggacgagggtgggttcgcgcctaacatattggagaatagtgaagccctcgagctagtcaaggaggccattgataaggctggctacaccgaaaaaatagtgattgggatggacgtcgcggcaagtgaattctatagggacggcaagtatgacttggatttcaagagtcccactgatccgagtcgctacatcacaggggaccagcttggtgccctttatcaggatttcgttagggactatcctgtcgtgtcaattgaggacccctttgatcaggatgactgggccgcatggtccaagtttactgctaacgtgggtatccagatagtcggagatgacctgacagtgacgaacccaaagcgcatcgaacgcgcagtagaagaaaaagcctgcaactgccttcttctgaaggtaaatcaaataggctccgttaccgaggccatccaagcttgcaaattggcccaggaaaatggttggggagttatggttagccacagaagcggagaaacggaggataccttcattgcagacctcgtagtgggcttgtgtaccggccaaattaagacgggagccccttgcaggtctgagcgtctggctaaatacaatcaactgatgcgtattgaggaagagttaggagatgaagcaagattcgcgggtcacaactttcgcaatcctagcgtgctatag

SEQ ID NO: 122701 - DNA, 1305 bp, Artificial Sequence
  derived and/or modified sequence
atgagcatcgaaaaaatttgggcaagagaaatcctagactccagggggaatcccacggtggaagtggatctctatacagccaaggggctgtttagagctgcggtcccaagcggtgcaagcaccggaatatacgaggctctggaattgcgggacggggacaagcagcgatatctgggcaagggagtgcttaaggccgtggatcacattaactccaccatagcacctgctttgatctcgagcggtctgtcagtagtcgaacaagagaagttggacaatctcatgctcgagctggatgggactgaaaataagagcaaatttggagctaatgcaatactaggcgtgtctctggccgtttgtaaggctggggcagccgaacgggagctgcccctatacagacacatagcgcaactcgccggcaacagtgatttgatcctgccggtgcccgcttttaacgtcatcaacgggggctctcacgccggcaacaaactggccatgcaagagttcatgattctgcctgtgggggctgagagctttcgcgacgctatgagactgggagccgaagtgtaccataccctgaagggtgtaatcaaggataagtacgggaaggacgccactaacgttggagacgagggtgggtttgcccctaacattctggaaaactctgaggccctcgagctggtcaaggaggccatcgataaggctggctataccgagaagatcgtgataggaatggatgtggccgcttccgaattctatcgagatggcaagtatgacctggatttcaagagcccaacagatccgagtcgatacataactggtgaccagctgggggcactttaccaggatttcgttagggattacccagttgtgtccattgaggacccgttcgatcaggatgattgggccgcctggtccaaattcactgctaacgtgggaatccagatagtcggtgacgatctgacagtgaccaacccaaagagaatcgaaagagctgtggaagagaaagcatgtaactgtctgctgctcaaagtaaaccagatagggtcagtcactgaggcgattcaggcctgtaagttggctcaagaaaacgggtggggtgtgatggtatcgcataggtcaggtgagacagaggatacctttatcgccgatttagtcgttggcctctgtactggccagatcaagaccggtgcgccatgtcgcagtgaacggctcgctaagtataaccagttgatgagaatcgaagaggagcttggggatgaggctagattcgctgggcataattttcgcaatccatcagttctctag

SEQ ID NO: 122702 - DNA, 1305 bp, Artificial Sequence
  derived and/or modified sequence
atgagcatcgaaaagatatgggctcgcgagatacttgacagccggggtaaccctaccgtggaggtggacttatacaccgcaaaagggctgttccgggctgccgtgccatcaggggcatcaaccggcatctacgaggcgctggagcttagggatggcgacaaacagcggtacctggggaaaggagtgctgaaggccgtcgaccacatcaacagcaccatagcccctgctctgataagtagtgggctgtcagtcgtggagcaggagaagttggacaacctaatgttggaattggacgggaccgaaaacaaatctaagttcggcgctaacgctatccttggcgtcagcctggccgtgtgcaaggccggagctgcagagcgtgaactgcctctgtaccgtcacatcgcccagttggctggtaactctgacctgatcctgcccgtgccagcgtttaatgtgatcaatggagggagtcacgctggaaacaagctggcaatgcaagaatttatgattctgcctgtgggcgctgagagtttcagagatgctatgaggctaggagccgaagtgtaccacaccttaaagggggtgattaaagacaaatacggcaaagatgctaccaatgtcggcgatgaaggcggtttcgccccgaatattctggagaacagcgaggcattggaactcgtgaaggaagctatagacaaagcaggttatactgagaaaatagtgattggcatggatgtggccgctagtgagttttaccgggatggtaagtatgatctcgactttaaaagtcctaccgatcccagtaggtacattacgggggaccagctaggggcactttaccaagatttcgtgcgggactatcccgtcgtctccatcgaggatccattcgaccaggatgattgggcggcttggtctaagttcacagcaaatgtcggcatccaaattgtgggggatgatcttaccgtcacaaatccaaagagaattgagagagcggtggaagaaaaggcctgcaattgcctgctgctgaaggtcaatcaaatcgggtctgtcacggaggcaatccaggcttgcaaattagcacaggagaatggttggggagttatggtgtcgcaccgcagcggcgagactgaagatacctttatcgcagacctggtggtgggcctatgcactggacagataaagactggcgcaccttgcagatccgagcgcttggccaagtacaatcagttgatgcggatcgaggaagagttgggagacgaagctagattcgccgggcacaactttagaaacccaagtgtgctttag

SEQ ID NO: 122703 - DNA, 1176 bp, Artificial Sequence
  derived and/or modified sequence
atgtccattgaaaaaatttgggcacgcgagatcttagatagtcgcggcaaccctaccgtggaggttgatttgtacacagctaagggtttattcagggcagctgtgccttccggcgcctccacagggatctatgaagcactggagctgagggacggagacaagcagcgctacctcggaaaagcaaagttcggtgcaaatgccattttgggggtatccctggcagtgtgtaaggctggagccgctgaaagggagcttccactgtataggcacatagcccagctagccggtaactcagatctcatattgcctgtgccagcctttaacgtgataaacggggggtcccacgctggaaataaactcgctatgcaggaattcatgatccttccagtgggtgcagagagtttccgggatgctatgaggcttggcgccgaagtatatcataccttgaagggtgtgatcaaggacaaatacgggaaggacgctactaacgtgggagatgaaggcgggttcgctcctaatatcctggaaaacagtgaggcactggagctcgttaaggaagccatcgataaagctggatacactgaaaagatcgtcattggaatggatgtagcagcctctgagttctacagggacggtaagtatgatttagatttcaaaagtcctactgaccctagtcggtatatcacgggtgatcagctcggagctctttaccaggattttgtccgcgactaccccgtggtgtcgatcgaggatcccttcgatcaggatgactgggccgcctggtccaagtttacagcaaatgtgggaatacagatcgttggcgacgacctgaccgtgactaatccaaagcgcatcgaacgtgcggtagaggaaaaagcttgcaattgcctgctgctaaaggttaatcagatcggctcagtgactgaggcaatccaggcctgcaagcttgcccaagagaatgggtggggagtcatggtaagccaccgatccggggagactgaggataccttcatagctgacctcgtcgtagggctatgcaccgggcaaattaaaactggcgccccatgtcgcagtgagagattggcaaagtataaccaactaatgagaatcgaggaggaattgggcgatgaggctcgctttgccggacacaatttccggaatccttcggtgctgtag

SEQ ID NO: 122704 - DNA, 1305 bp, Artificial Sequence
  derived and/or modified sequence
atgtcgatcgaaaaaatctgggctagggagatactggattctcggggcaacccgacggtggaggtggatttgtatactgccaaagggctgttccgagccgccgtaccatctggggcatcaacgggtatttatgaggccttggagctgagagacggggataagcagagatatctgggaaagggtgtcctcaaggccgttgatcacatcaactcaaccatcgcccctgctctcatctcctccgggttgagcgtcgtggagcaagagaaactggataacttaatgctggagctggatgggaccgaaaataagtcaaagtttggagccaacgcaatccttggagtatctcttgccgtttgtaaagccggggcagcagaacgtgaacttccactgtatcgacatatcgcgcagctggctgggaacagcgatcttattctccccgtgcccgcatttaacgtaattaacggtggctcacacgcgggtaacaagctggccatgcaagagttcatgatccttcccgtcggtgctgagtcattcagggacgcaatgcgcctgggggctgaggtgtaccacacactcaagggcgtcatcaaggacaaatatgggaaggacgctaccaacgtaggagatgaaggtggcttcgcccccaacattcttgaaaactcggaagctttagagctcgtgaaggaggccatagacaaggctggctacaccgaaaagatcgttatcggtatggatgtggcagcaagcgagttttatcgagatggaaagtatgatctggacttcaaatctcccacagacccatctaggtatataaccggcgatcagctgggagccctgtaccaggatttcgtgcgcgactatcccgtggtatccatagaagaccctttcgatcaagatgattgggcagcctggtctaagtttacagcaaacgtgggaatccagattgttggtgatgacctaacagttaccaaccctaagcggatagagcgcgccgtcgaagaaaaggcttgtaattgcctcctcctcaaggtcaatcaaattggcagcgtaaccgaggccatacaagcttgtaagctcgcccaggagaatggctggggcgtgatggttagccataggtcgggcgagactgaagacacctttatcgccgatctggtagtgggcctgtgcaccggacagattaaaactggggctccctgtaggtcagaacgactcgctaagtataatcaactaatgagaatagaagaggagctcggcgacgaagcgcgatttgccggacataattttcgcaacccctcagtactttag

SEQ ID NO: 122705 - DNA, 1176 bp, Artificial Sequence
  derived and/or modified sequence
atgagcatcgagaagatttgggcgcgggagattttggactccagagggaacccaaccgtcgaagtggatctctacaccgcaaaaggcctgttccgcgccgccgttccatccggggcatcaacgggcatatatgaggcactggagctgcgcgatggtgacaaacagcggtatctgggcaaggccaaattcggagccaatgctatcctaggggtgtccttggcagtctgcaaggccggagcagctgagcgagaactgcctctctacaggcatattgcccagctggcaggcaactccgacttgatccttcccgtccccgccttcaacgtgattaatggcggctcacacgccggaaacaaactcgctatgcaggaatttatgattctgcccgtgggcgccgaatcatttagggatgcgatgaggcttggcgccgaggtttatcatactctgaagggagtcattaaggataagtatggtaaggatgctacgaatgttggcgatgaaggcggctttgctcctaacattcttgagaatagcgaagccctcgagttagtgaaagaggccatcgataaagcaggctacacggaaaaaattgtgattggaatggatgtagctgcctcagagttttaccgggatggcaaatacgacttggacttcaaatcaccgacagatccaagccgatacataaccggtgatcagctcggggcactgtaccaggactttgtcagggattaccctgtcgtaagcatcgaggacccgttcgaccaggacgactgggcagcctggagtaaattcacggcaaatgtcggcattcaaattgtgggggatgacctgacagtgacaaatcccaaaaggattgagcgggccgtagaggagaaagcctgcaactgcctgctgctgaaggttaatcagatcggcagtgtgacagaggccattcaggcatgtaagctggcacaggaaaacggctggggtgtgatggtgagtcaccggtcaggggagactgaggacactttcatcgctgacttggttgtgggcctttgtacaggccagatcaaaaccggagctccatgccgcagtgaaagactcgcaaaatacaatcaacttatgcgtatagaggaagaactgggtgacgaggccaggtttgcaggacacaacttcagaaacccatcggtgctatag

SEQ ID NO: 122706 - DNA, 1176 bp, Artificial Sequence
  derived and/or modified sequence
atgagcattgagaagatctgggcccgggagatcctggacagccggggcaaccccaccgtggaggtggacctgtacacagccaagggcctcttccgggctgctgtgcccagcggggccagcacaggcatctatgaggccctggagctgagagatggagacaagcagcgctacctgggcaaggccaagtttggagccaatgccatcctgggcgtgtccctggccgtgtgcaaggccggggctgctgagcgggagctgcccctgtaccgccacatcgcccagctggccggcaacagcgacctgatcctgcctgtgcctgccttcaacgtcatcaatggaggcagccacgccggcaacaagctggccatgcaggagttcatgatcctgcctgtgggcgctgagagcttcagagatgccatgaggctgggcgctgaggtgtaccacaccctgaagggcgtcatcaaggacaagtatggcaaggatgccaccaacgtgggagatgagggcggctttgcccccaacatcctggagaacagcgaggccctggagctggtgaaggaggccatcgacaaggccggctacacagagaagatcgtgattggcatggatgtggccgccagcgagttctacagagatggcaagtatgacctggacttcaagagccccacagaccccagccgctacatcactggagaccagctgggcgccctgtaccaggactttgtgcgggactaccctgtggtgtccattgaggacccctttgaccaggatgactgggccgcctggagcaagttcaccgccaacgtgggcatccagatcgtgggagatgacctgactgtgaccaaccccaagagaattgaaagagctgtggaggagaaggcctgcaactgcctgctgctgaaggtgaaccagatcggctctgtgacagaggccatccaggcctgcaagctggcccaggagaatggctggggcgtgatggtgagccacaggtctggagaaacagaggacaccttcatcgctgacctggtggtgggcctgtgcaccggccagatcaagacaggagccccctgccgctctgagcggctggccaagtacaaccagctgatgagaattgaggaggagctgggagatgaggccaggtttgctggccacaacttcaggaaccccagcgtgctgtag

SEQ ID NO: 122707 - DNA, 1305 bp, Artificial Sequence
  derived and/or modified sequence
atgagcatcgagaagatctgggcccgggagatcctggacagccggggtaaccctacagtcgaggttgacctgtataccgcaaaaggactattcagagcggccgtgccctctggagcatccactggcatctacgaagctttggaattgagggatggagataaacagagatatctcggcaagggagtgcttaaagcggtggatcatattaactccacgattgcacccgcactgatttcgagtggactatccgtcgtggaacaggaaaaactggacaatctgatgttggagctggacgggacggaaaataaatccaagtttggggccaacgctatcctgggggttagcctagccgtatgtaaggctggtgccgcggaacgtgagcttcctctgtaccggcatatagctcagcttgctggaaactctgacctcatcctcccggtgcctgcattcaatgtgatcaatggtggctcccacgccgggaacaagctagcgatgcaagaattcatgatcctgccagttggggctgagagttttcgcgacgctatgaggctgggagccgaggtctaccacacattgaaaggagttatcaaggataagtatgggaaagacgccacgaacgttggggacgaaggcgggtttgccccaaatatactggaaaattccgaagccctcgaacttgtcaaggaggccattgacaaggccggctacactgagaagatcgtaatagggatggatgtagctgcatccgagttctacagggacggtaagtacgacttagattttaaatcaccaaccgatccatcacggtacattaccggggaccagttgggtgcgctgtaccaggattttgtgcgtgattatcctgtggttagcattgaggatccctttgaccaggacgactgggccgcttggtcaaaatttactgcgaatgttggtattcagattgttggcgacgacctgacggtgaccaacccaaagcgtatcgagcgcgcggtagaggagaaggcttgtaactgcctccttcttaaggtgaaccagataggttctgtcactgaggccattcaggcctgtaagctagctcaggagaacggatggggcgtgatggtctcacacaggtcaggggagaccgaagatactttcatcgccgaccttgtcgtcggtctttgtacaggccaaatcaagacaggtgcaccatgccgcagtgaaaggctggctaagtacaaccagctgatgcgtatcgaagaggaactcggtgacgaggcccggtttgctggacataacttcagaaatccttccgttctctag

SEQ ID NO: 122708 - DNA, 1305 bp, Artificial Sequence
  derived and/or modified sequence
atgagcatcgagaagatctgggcccgggagatcctggacagccggggcaaccccactgtagaggttgacctgtacacggccaagggcctttttagggccgctgtgccttccggcgcctccaccggtatctacgaggctctggaactcagggacggtgataaacagagatatctgggaaaaggggtgctcaaagcggtggaccatatcaacagtaccatcgcccccgctttgattagttccgggctgagtgttgtcgaacaagagaagctggataatctgatgttagagctggatgggactgagaataaaagcaaatttggggcgaatgccattcttggggtttcattggccgtttgtaaagcaggggccgcagaaagggaactcccattatatcggcacattgcgcagctcgccggcaatagcgacctgatcctgccagtccccgcgttcaatgtgattaatggcggatcgcacgctggaaacaaactggcgatgcaggaattcatgattcttcccgtaggagccgaatccttcagggatgccatgcgtttaggagccgaggtctaccacacactgaagggcgttatcaaagataagtacggaaaggacgccacaaacgtgggtgacgaaggagggttcgctcccaatattctggaaaacagtgaggcactcgagttggtgaaagaagcaatagataaagccggctacaccgagaaaatcgtgattgggatggatgtcgcggcaagtgaattctaccgggatggtaaatatgatctcgactttaagtcacccacagacccctccaggtatatcaccggggatcagctgggagccttataccaagacttcgttcgcgactatcccgttgtatccatcgaggaccccttcgaccaggatgactgggccgcctggtctaaattcacagcaaacgtcggaatccagatcgtgggtgacgacctgacggtcactaatccgaagcgcatcgaacgcgctgtcgaagagaaagcctgcaattgtcttctcctgaaggtgaatcaaataggcagtgttactgaagccatccaagcttgcaaactcgcccaagaaaatggatggggagtgatggtgagtcaccgaagcggtgagaccgaggataccttcattgcagacttggtggtgggactgtgtacggggcaaatcaaaacgggggcaccgtgcagatccgaaagattagccaaatataatcagcttatgagaatagaggaggagttgggggatgaagctcgcttcgcaggtcataattttcgaaacccatctgtgctctag

SEQ ID NO: 122709 - DNA, 1176 bp, Artificial Sequence
  derived and/or modified sequence
atgagcatcgagaagatctgggcccgggagatcctggacagccggggaaatccaacggtggaagttgacctctatacagccaaaggtctgtttcgcgccgctgtccccagtggagcttccaccggtatctatgaagccctcgaattgagggatggtgataaacaaaggtacctaggcaaagccaagtttggggctaatgcaatactcggcgtatctctggccgtgtgtaaggctggcgccgccgaacgcgaacttcccctgtacaggcacattgcccaactagccggcaacagtgatctcattctgcctgttccagcgtttaacgtcataaatggtgggagccacgccgggaataaacttgccatgcaagagtttatgatcttaccagtcggtgccgagtccttccgcgacgctatgaggcttggagcggaggtctaccatactttaaaaggagtgattaaggataagtacggcaaagacgcaaccaacgtaggcgatgaaggcgggttcgcccctaacattttggagaatagtgaagccctggagctggtcaaggaggctatcgataaagccggatatacagagaagattgtaataggtatggacgtggcagcctccgagttttaccgggacggtaagtacgacctcgactttaaaagccctaccgatcctagccggtacataacaggggaccaactgggtgccctgtaccaggattttgttcgtgactaccctgtcgtgagcatcgaagacccatttgaccaggatgactgggctgcatggagcaagttcaccgccaatgtgggtattcaaatcgtgggtgatgacctgaccgtcactaaccctaagcggatcgaaagggctgtggaagaaaaagcctgtaactgtctgctgctgaaagttaatcagatcggtagcgttacagaggctattcaggcatgcaaactggcccaggagaatggatggggtgtgatggtgtcgcaccgctcaggagaaacggaagatacattcattgccgatctggtagtcggcctgtgcaccgggcaaattaaaaccggcgcaccttgtcgatcagaacgacttgctaaatacaatcaactgatgaggatcgaagaagagctaggggatgaggcacggtttgcaggtcacaacttccgaaatccctcagttctctag

SEQ ID NO: 122710 - DNA, 1305 bp, Artificial Sequence
  derived and/or modified sequence
atgagcatcgagaagatctgggcccgggagatcctggacagccgggggaacccgacagtggaggtggatctgtacaccgcgaaagggctattccgggccgccgttccttcgggcgcgtctactgggatctatgaagccttggaactaagagatggagacaagcaacggtacctcggcaaaggtgtgttgaaagccgtcgatcacataaactccaccattgcgcccgccctaatcagcagcggtctctcagtggtagaacaagagaagctcgataacctcatgctggagttggatggcaccgagaacaagtcaaagtttggggccaatgccatcctgggagtgtctctagccgtttgtaaggctggcgctgccgagcgtgagttgccgctgtacagacatattgcccagctagccgggaattcggaccttattcttcctgttccagcctttaacgtgataaacggaggatcgcacgccggtaacaaactagccatgcaggagtttatgatattacccgtgggagccgagtctttccgcgacgcaatgcgcctgggagccgaggtataccataccctcaaaggtgtgatcaaagataaatatggcaaagacgcgactaacgtgggcgacgaaggcggatttgcgcccaatatattggaaaacagtgaggcattggagctcgttaaggaagcgattgataaagccgggtacacagagaagatagtaattggaatggacgttgcggcctctgagttctatcgggatgggaaatatgatctggactttaagagccccacggatccttcacggtatatcaccggagaccagttgggcgcactgtatcaggactttgttagggattatccggtcgtgtccatcgaggaccctttcgatcaggacgactgggctgcctggagcaagttcacagccaacgtcggcattcagatcgttggtgacgaccttacagttaccaacccaaagaggatagaacgtgctgtcgaagaaaaggcttgtaattgccttctgcttaaggtgaatcagattggcagcgtcaccgaggccatccaggcgtgcaaattggcacaggagaacggttggggggtgatggtatcacacaggtctggagagactgaggatacctttatagccgatctagtggtcggactgtgtaccgggcagattaagacaggagccccgtgcaggagcgagaggctggctaaatacaaccaactgatgagaatcgaagaagagttgggcgatgaggcaaggtttgctgggcacaactttaggaacccttctgtcctttag

SEQ ID NO: 122711 - DNA, 1176 bp, Artificial Sequence
  derived and/or modified sequence
atgagcatcgagaagatctgggcccgggagatcctggacagccgggggaaccccacggtggaggtggacctgtacactgcgaaaggtcttttccgcgctgcagtgccatccggcgcttcgaccggcatttacgaggccctagagctgagagacggagacaagcaacgatatctaggaaaggctaaattcggtgccaatgcgatactcggcgtctccctggcagtgtgtaaggccggggccgccgaacgtgaactccctctgtatcgccacatcgcccagctcgccggcaactcagatttgatactccctgtcccagcattcaacgtgataaatggcggcagccatgccgggaacaagctggccatgcaagagttcatgatcttacccgtcggggctgagagctttcgtgacgcaatgcgtctgggcgctgaggtgtaccacacactgaaaggtgtgatcaaggataaatacggtaaagacgcaaccaatgtgggtgacgaggggggatttgcaccaaatatcctggaaaacagcgaggctctggagctggtgaaggaggccattgataaagccggttacactgaaaagatcgtcattggcatggatgtcgctgcctcagagttttacagggacggcaagtatgatctggatttcaagagccctactgaccccagccggtacattacgggggatcagcttggggcactctaccaggacttcgtacgagattatcctgttgtgtcgattgaggaccccttcgaccaggacgactgggctgcttggtcaaaatttacagcgaacgtagggattcagattgtaggtgatgacctgactgttacaaaccccaagcgtatcgagagagctgttgaggagaaggcgtgtaactgcctgctgcttaaggtgaaccagatcggttccgtgacagaagcaatccaggcctgtaaactcgcacaagagaacgggtggggcgttatggtatcccatagaagcggggaaacagaagatactttcatcgccgacctcgtggtcggactgtgcaccggccaaatcaagaccggcgctccctgcagatcggaacggctggccaaatacaatcaacttatgcgaatcgaggaagaactgggtgacgaggccagattcgccggacacaacttcagaaacccttcggtcctgtag

SEQ ID NO: 122712 - DNA, 1305 bp, Artificial Sequence
  derived and/or modified sequence
atgagcatagaaaagatctgggcgcgtgaaattctcgacagtcgcggaaatccaacagtcgaagtagatttgtacaccgccaaaggcctgttccgcgcagccgtgccaagtggcgctagcaccgggatttacgaggcactcgaactgcgggatggtgataaacagagatacctgggaaagggtgtgttgaaagccgttgaccacattaactcaaccattgccccagccctcattagttcaggcctcagcgtcgttgagcaagaaaagctagacaatctgatgctcgagcttgatggaactgagaataagagcaagttcggcgcaaacgctatccttggagtgtcactggctgtgtgcaaagccggtgcggctgagagggagctcccactgtaccgccacattgcccagctggccggaaattctgacctgattctcccagttcctgcttttaatgtgatcaacgggggatcccacgccggtaataagctggccatgcaggagtttatgatcctccctgtgggcgcagagtcttttagagatgcaatgagacttggcgcagaggtctaccataccctcaaaggggtgattaaagataagtatgggaaagacgccacaaatgtaggagatgaaggaggatttgcaccgaatatcttggagaatagtgaggccctcgaactagtaaaggaagcaatcgacaaggctggatatacggagaagatcgtgattggtatggatgtcgccgcatccgagttctatcgtgacggaaaatatgatctggattttaagtctcccaccgatcccagcagatatattacaggagaccaactgggcgcactgtaccaggactttgtacgcgattacccggtcgtgtccattgaagacccttttgaccaagacgattgggcagcctggtccaagttcaccgcgaatgttgggattcaaattgtcggggatgacctgacagtcaccaatcccaagcggattgagagggctgtggaggaaaaggcctgtaactgcctgctgttaaaggtgaatcagataggctctgtcaccgaggcgatccaagcctgcaaacttgctcaggagaacggctggggggttatggtttctcaccggtctggcgagacagaagacactttcatcgcagaccttgtcgtgggtctgtgcacagggcagatcaagactggtgccccatgccgcagcgaaaggctggcaaaatacaaccaactgatgcgcatcgaggaggagttgggtgatgaagccaggttcgcgggtcataacttccggaaccctagtgtactgtag

SEQ ID NO: 122713 - DNA, 1305 bp, Artificial Sequence
  derived and/or modified sequence
atgtccattgagaagatatgggcaagggagatattggactctagggggaatcctacggtcgaggtcgacctgtacacggctaaagggctgtttcgagccgcagtgccttccggagcatcaacaggcatttacgaggccctggaactccgggacggggacaaacagcgatatctaggcaaaggcgtacttaaggcagttgatcacataaacagtacaattgcccctgctcttatcagcagtggactcagcgtggtggagcaggaaaagctggataacttaatgctcgaactcgacggtactgagaataagagtaagttcggtgctaatgcaatattgggggtttcactcgctgtttgcaaagccggtgcggctgaaagagagctacccctctataggcacattgcccagctcgctgggaactcggatctgatactccccgtgcctgcttttaatgtgatcaacggcggaagccacgccggtaacaagctcgcaatgcaagagtttatgattctcccagtgggagccgaatctttcagggacgctatgcgccttggggctgaggtctaccacaccctgaagggggtgatcaaagataagtacggaaaagacgcgaccaatgtaggagacgaaggaggctttgcccctaatatcctggagaactcggaggcactagagctcgtgaaggaggcaattgataaggccggatatacagagaagatcgtgatcgggatggacgtggcggcatcagagttctacagggatggcaaatatgatctggatttcaaatcccctaccgacccctctcgctacataacaggggaccagctcggagccctctatcaagattttgtacgagactaccctgtggttagtattgaggacccttttgatcaggacgactgggccgcatggtctaagttcacagccaatgttggcatccaaatcgtgggggatgacctgactgttaccaaccctaaacgcatcgagcgcgcagtggaagagaaggcctgcaattgtctgctcctcaaggtgaatcagatcggctctgtaacagaagcaatacaggcatgtaaactggcccaggagaacgggtggggcgtcatggtgagccataggagcggtgagactgaggacacattcatcgccgacctcgttgtaggcctgtgcaccggccaaatcaagaccggcgctccttgtaggtctgaacgacttgcaaaatacaaccagttgatgcgcatagaggaggagctgggcgatgaagcacggttcgctggccacaactttcgcaatcccagcgtcctctag

SEQ ID NO: 122714 - DNA, 1176 bp, Artificial Sequence
  derived and/or modified sequence
atgtcaattgagaagatatgggcccgagagatcctagattctaggggcaatcccacagtggaggttgacctctatactgccaagggactgtttcgagctgccgtgccatccggagcctctaccggcatctatgaagcgttggagctgcgggatggagataagcagaggtacctgggcaaagcaaagtttggcgctaatgccatcctgggcgtgagtttggcagtctgcaaagctggcgcagcagagcgtgagctgcccctttaccgccatatagcccaattggccggaaacagtgatctgatactcccagtcccagcgttcaatgtgatcaatgggggtagccacgcgggaaacaagttggccatgcaggagttcatgattctcccagtgggggctgagagcttcagagatgctatgcgacttggtgcagaagtgtaccacacgttaaagggcgtgattaaagataagtacggcaaggacgcaaccaatgtgggggatgaaggtgggttcgcccctaacattctggagaatagcgaggcgctggagcttgttaaagaggctatcgataaagccggttacaccgagaagatcgtcatcggaatggatgtggccgctagcgaattctatcgggacggcaagtacgatctcgattttaagtccccaacagaccctagtagatacatcactggcgaccagctaggggcactgtaccaggacttcgtgagagattatcctgttgtttcaatagaagacccctttgatcaggacgattgggccgcatggagcaagtttacagctaatgttggcattcagattgtgggtgatgacctgacggtaaccaacccaaaacgcatcgagcgcgctgtggaggagaaagcttgcaattgtcttttgttaaaggttaaccaaattggcagcgttacagaggctattcaggcgtgcaagctcgcccaggagaatgggtggggagtcatggtctctcaccggtccggcgaaacagaggataccttcatagccgatctagtggtaggcctgtgcacaggccagatcaaaaccggagctccctgtcgctctgaacgactggcaaagtataaccagctaatgcggatagaagaggaactgggcgatgaggctaggtttgctgggcacaattttcggaacccctccgtgctctag

SEQ ID NO: 122715 - DNA, 1305 bp, Artificial Sequence
  derived and/or modified sequence
atgtccatagaaaagatctgggctcgcgagattttagattctcggggtaaccctacagtggaagtcgacctttatacagctaaggggctgtttcgggctgcggtgcctagcggcgcaagcactggcatttacgaagctctggagctacgtgatggggataaacagcggtacctaggaaagggggtcctgaaggccgtagatcatattaactcgaccatcgccccagcgttgataagctccgggctgagcgtggtcgagcaagaaaaactagacaatttaatgctagagctcgacggcacagagaacaagagcaagttcggcgcaaacgcaatcttgggagtttctctcgccgtctgtaaggccggtgccgcagagagggaactgccgctgtatcgccatatcgcccaattggcgggtaattcagacctgattctccctgtgcccgctttcaatgttatcaacggcggatcacatgcgggaaacaaattagcaatgcaggaatttatgatccttcccgttggggctgagtctttccgggacgctatgcgtctcggcgcagaagtataccataccctgaagggcgtcatcaaggacaagtacgggaaggacgccaccaatgttggagatgaggggggtttcgctcctaatatcctagagaacagtgaggcgcttgagctggtgaaagaagcaattgacaaagcagggtacactgaaaagatcgtgataggcatggacgtggctgccagcgagttctatagagatggtaagtacgatctggattttaaatcccccaccgacccatcacgatacatcacaggggaccagctgggagccctttatcaggactttgtccgcgactatcccgttgtgtctattgaggaccccttcgatcaggatgattgggcggcttggagcaaattcacagctaatgtgggaatacaaatcgtcggtgacgatttaaccgttactaaccccaagagaatcgagcgagccgtcgaggagaaggcatgtaactgtcttctgctgaaggtgaaccagattggctctgtcactgaggccatccaggcctgcaaactggcccaggaaaatgggtggggggtcatggtgagtcacagatcgggagagactgaagacacgtttattgcagatctggtcgtgggactctgcacaggacagatcaagacaggagccccttgtcgttcagagaggctcgccaaatataaccagctgatgaggatcgaggaagaactcggggacgaggccagatttgcgggacacaacttccgaaatccatcagtgttgtag

SEQ ID NO: 122716 - DNA, 1176 bp, Artificial Sequence
  derived and/or modified sequence
atgagcatcgaaaaaatctgggccagagagattttggactcacgagggaacccgaccgtcgaagtggacttgtatacagctaagggcctgttccgagcggcagtgccctccggcgcatcgaccggaatctatgaagcccttgaactgcgtgacggagacaagcagcggtatctcgggaaggctaagttcggagccaacgccatcttaggtgtgagcctggcagtatgcaaagccggtgctgcagagcgcgagctccctctgtaccggcacatagcacagctagctggtaattccgaccttatactgcccgttccagccttcaacgtgataaatggtgggagccacgcaggtaataagctggccatgcaggaattcatgattctccccgttggtgctgagtctttcagagacgctatgaggttgggtgcagaggtctaccatacactaaagggtgtgattaaagataaatatggcaaagatgcaaccaacgtgggagatgaaggtgggttcgcccctaatattttagaaaactccgaggctcttgagttggttaaggaggcgatagacaaggccggatatacagaaaagatcgtgattggtatggacgtcgctgcctctgaattctatagggacggaaagtatgaccttgacttcaagtctcccaccgacccctcccggtatatcaccggcgatcagctcggcgctctttaccaggatttcgtgcgggactatcctgttgtgagtatcgaggaccccttcgatcaggacgattgggccgcttggagtaaattcactgcgaacgtcggcatacaaatcgtcggggacgatttgacagtgacaaaccccaagcgaatcgagcgtgctgtggaggagaaggcctgtaactgcctgctcctcaaggttaaccagatcggtagcgtgaccgaagctatccaggcttgtaaactcgctcaagaaaatggatggggtgttatggtgtcacaccgatccggcgaaaccgaggatacgttcattgcagatttggtcgtcggcctgtgtacaggccagataaagacaggcgctccctgccgttcagagcggctggccaaatacaatcaactcatgaggattgaagaagagttaggagatgaagcccgttttgcgggtcataacttccgcaacccctctgtcctgtag

SEQ ID NO: 122717 - DNA, 1176 bp, Artificial Sequence
  derived and/or modified sequence
atgagcatcgagaagatctgggccagagagatcctggacagcagaggcaaccccaccgtggaggtggacctgtacaccgccaagggcctgttcagagccgccgtgcccagcggcgccagcaccggcatctacgaggccctggagctgagagacggcgacaagcagagatacctgggcaaggccaagttcggcgccaacgccatcctgggcgtgagcctggccgtgtgcaaggccggcgccgccgagagagagctgcccctgtacagacacatcgcccagctggccggcaacagcgacctgatcctgcccgtgcccgccttcaacgtgatcaacggcggcagccacgccggcaacaagctggccatgcaggagttcatgatcctgcccgtgggcgccgagagcttcagagacgccatgagactgggcgccgaggtgtaccacaccctgaagggcgtgatcaaggacaagtacggcaaggacgccaccaacgtgggcgacgagggcggcttcgcccccaacatcctggagaacagcgaggccctggagctggtgaaggaggccatcgacaaggccggctacaccgagaagatcgtgatcggcatggacgtggccgccagcgagttctacagagacggcaagtacgacctggacttcaagagccccaccgaccccagcagatacatcaccggcgaccagctgggcgccctgtaccaggacttcgtgagagactaccccgtggtgagcatcgaggaccccttcgaccaggacgactgggccgcctggagcaagttcaccgccaacgtgggcatccagatcgtgggcgacgacctgaccgtgaccaaccccaagagaatcgagagagccgtggaggagaaggcctgcaactgcctgctgctgaaggtgaaccagatcggcagcgtgaccgaggccatccaggcctgcaagctggcccaggagaacggctggggcgtgatggtgagccacagaagcggcgagaccgaggacaccttcatcgccgacctggtggtgggcctgtgcaccggccagatcaagaccggcgccccctgcagaagcgagagactggccaagtacaaccagctgatgagaatcgaggaggagctgggcgacgaggccagattcgccggccacaacttcagaaaccccagcgtgctgtag

SEQ ID NO: 122718 - DNA, 2827 bp, Artificial Sequence
  derived and/or modified sequence
ctcttcacttcccgctgcaacccccagggactgcagggcctttctcaggaccctcttccccgacacctgtattgcatgcgcctttcgcgggaagaggagggatacacgtttgggagagagtgggaccttggggaaggggcagtgttcaggcagctggggtgttaagttggggaggtatgggggctctggaagagaggcccaggcagcccatcctcttcttggctcccaggagaaatgcaagcctggcagccattccgctctgaggagatctgggggaaccccaccggctggccaagctgcaaagaggcgcgggaaccactgtcgtgcccctcccctcctcactgcagtgttctcccatctcatcatttgatcttaccccgccccccactgcagtgacctccccttcctcactgcattgaccttctcctcttcccaggggggagggggaatcccttctacagccctagactgcagccagcgcctccctacccaccccccacccactgcagtaacctctttcccatccctcccagcctcccgccccgcccattgatctcaggctccacccctctaagcctcttatctttctccttccttcccttccacccgaggagatcccagccatcatgtccatagagaagatctgggcccgggagatcctggactcccgcgggaaccccacagtggaggtggatctctatactgccaaaggtcttttccgggctgcagtgcccagtggagcctctacgggcatctatgaggccctggagctgagggatggagacaaacagcgttacttaggcaaaggtgtcctgaaggcagtggaccacatcaactccaccatcgcgccagccctcatcagctcaggtctctctgtggtggagcaagagaaactggacaacctgatgctggagttggatgggactgagaacaaatccaagtttggggccaatgccatcctgggtgtgtctctggccgtgtgtaaggcaggggcagctgagcgggaactgcccctgtatcgccacattgctcagctggccgggaactcagacctcatcctgcctgtgccggccttcaacgtgatcaatggtggctctcatgctggcaacaagctggccatgcaggagttcatgatcctcccagtgggagctgagagctttcgggatgccatgcgactaggtgcagaggtctaccatacactcaagggagtcatcaaggacaaatacggcaaggatgccaccaatgtgggggatgaaggtggctttgcccccaatatcctggagaacagtgaagccttggagctggtgaaggaagccatcgacaaggctggctacacggaaaagatcgttattggcatggatgttgctgcctcagagttttatcgtgatggcaaatatgacttggacttcaagtctcccactgatccttcccgatacatcactggggaccagctgggggcactctaccaggactttgtcagggactatcctgtggtctccattgaggacccatttgaccaggatgattgggctgcctggtccaagttcacagccaatgtagggatccagattgtgggtgatgacctgacagtgaccaacccaaaacgtattgagcgggcagtggaagaaaaggcctgcaactgtctgctgctcaaggtcaaccagatcggctcggtcactgaagccatccaagcgtgcaagctggcccaggagaatggctggggggtcatggtgagtcatcgctcaggagagactgaggacacattcattgctgacctggtggtggggctgtgcacaggccagatcaagactggtgccccgtgccgttctgaacgtctggctaaatacaaccagctcatgagaattgaggaagagctgggggatgaagctcgctttgccggacataacttccgtaatcccagtgtgctgtgattcctctgcttgcctggagacgtggaacctctgtctcatcctcctggaaccttgctgtcctgatctgtgatagttcaccccctgagatcccctgagccccagggtgcccagaacttccctgattgacctgctccgctgctccttggcttacctgacctcttgctgtctctgctcgccctcctttctgtgccctactcattggggttccgcactttccacttcttcctttctctttctctcttccctcagaaactagaaatgtgaatgaggattattataaaagggggtccgtggaagaatgatcagcatctgtgatgggagcgtcagggttggtgtgctgaggtgttagagagggaccatgtgtcacttgtgctttgctcttgtcccacgtgtcttccactttgcatatgagccgtgaactgtgcatagtgctgggatggaggggagtgttgggcatgtgatcacgcctggctaataaggctttagtgtatttatttatttatttattttatttgtttttcattcatcccattaatcatttccccataactcaatggcctaaaactggcctgacttgggggaacgatgtgtctgtatttcatgtggctgtagatcccaagatgactggggtgggaggtcttgctagaatgggaagggtcatagaaagggccttgacatcagttcctttgtgtgtactcactgaagcctgcgttggtccagagcggaggctgtgtgcctgggggagttttcctctatacatctctccccaaccctaggttccctgttcttcctccagctgcaccagagcaacctctcactccccatgccacgttccacagttgccaccacctctgtggcattgaaatgagcacctccattaaagtctgaatcagtgc

SEQ ID NO: 122719 - DNA, 1646 bp, Artificial Sequence
  derived and/or modified sequence
gctctctcagcgccgccgtcgccaccgccaccgccaccgccactaccaccgtctgagtctgcagtcccgaggagatcccagccatcatgtccatagagaagatctgggcccgggagatcctggactcccgcgggaaccccacagtggaggtggatctctatactgccaaaggtcttttccgggctgcagtgcccagtggagcctctacgggcatctatgaggccctggagctgagggatggagacaaacagcgttacttaggcaaagccaagtttggggccaatgccatcctgggtgtgtctctggccgtgtgtaaggcaggggcagctgagcgggaactgcccctgtatcgccacattgctcagctggccgggaactcagacctcatcctgcctgtgccggccttcaacgtgatcaatggtggctctcatgctggcaacaagctggccatgcaggagttcatgatcctcccagtgggagctgagagctttcgggatgccatgcgactaggtgcagaggtctaccatacactcaagggagtcatcaaggacaaatacggcaaggatgccaccaatgtgggggatgaaggtggctttgcccccaatatcctggagaacagtgaagccttggagctggtgaaggaagccatcgacaaggctggctacacggaaaagatcgttattggcatggatgttgctgcctcagagttttatcgtgatggcaaatatgacttggacttcaagtctcccactgatccttcccgatacatcactggggaccagctgggggcactctaccaggactttgtcagggactatcctgtggtctccattgaggacccatttgaccaggatgattgggctgcctggtccaagttcacagccaatgtagggatccagattgtgggtgatgacctgacagtgaccaacccaaaacgtattgagcgggcagtggaagaaaaggcctgcaactgtctgctgctcaaggtcaaccagatcggctcggtcactgaagccatccaagcgtgcaagctggcccaggagaatggctggggggtcatggtgagtcatcgctcaggagagactgaggacacattcattgctgacctggtggtggggctgtgcacaggccagatcaagactggtgccccgtgccgttctgaacgtctggctaaatacaaccagctcatgagaattgaggaagagctgggggatgaagctcgctttgccggacataacttccgtaatcccagtgtgctgtgattcctctgcttgcctggagacgtggaacctctgtctcatcctcctggaaccttgctgtcctgatctgtgatagttcaccccctgagatcccctgagccccagggtgcccagaacttccctgattgacctgctccgctgctccttggcttacctgacctcttgctgtctctgctcgccctcctttctgtgccctactcattggggttccgcactttccacttcttcctttctctttctctcttccctcagaaactagaaatgtgaatgaggattattataaaagggggtccgtggaagaatgatcagcatctgtgatgggagcgtcagggttggtgtgctgaggtgttagagagggaccatgtgtcacttgtgctttgctcttgt

SEQ ID NO: 122720 - DNA, 2549 bp, Artificial Sequence
  derived and/or modified sequence
ctgttactgtcgagtgggtcgggccgtgggtatgagcgcttgtgtgcgctggggccaggtcgtgggtgcccccacccttcccccatcctcctcccttccccactccaccctcgtcggtcccccacccgcgctcgtacgtgcgcctccgccggcagctcctgactcatcgggggctccgggtcacatgcgcccgcgcggccctataggcgcctcctccgcccgccgcccgggagccgcagccgccgccgccactgccactcccgctctctcagcgccgccgtcgccaccgccaccgccaccgccactaccaccgtctgagtctgcagtcccgaggagatcccagccatcatgtccatagagaagatctgggcccgggagatcctggactcccgcgggaaccccacagtggaggtggatctctatactgccaaaggtcttttccgggctgcagtgcccagtggagcctctacgggcatctatgaggccctggagctgagggatggagacaaacagcgttacttaggcaaaggtgtcctgaaggcagtggaccacatcaactccaccatcgcgccagccctcatcagctcaggtctctctgtggtggagcaagagaaactggacaacctgatgctggagttggatgggactgagaacaaatccaagtttggggccaatgccatcctgggtgtgtctctggccgtgtgtaaggcaggggcagctgagcgggaactgcccctgtatcgccacattgctcagctggccgggaactcagacctcatcctgcctgtgccggccttcaacgtgatcaatggtggctctcatgctggcaacaagctggccatgcaggagttcatgatcctcccagtgggagctgagagctttcgggatgccatgcgactaggtgcagaggtctaccatacactcaagggagtcatcaaggacaaatacggcaaggatgccaccaatgtgggggatgaaggtggctttgcccccaatatcctggagaacagtgaagccttggagctggtgaaggaagccatcgacaaggctggctacacggaaaagatcgttattggcatggatgttgctgcctcagagttttatcgtgatggcaaatatgacttggacttcaagtctcccactgatccttcccgatacatcactggggaccagctgggggcactctaccaggactttgtcagggactatcctgtggtctccattgaggacccatttgaccaggatgattgggctgcctggtccaagttcacagccaatgtagggatccagattgtgggtgatgacctgacagtgaccaacccaaaacgtattgagcgggcagtggaagaaaaggcctgcaactgtctgctgctcaaggtcaaccagatcggctcggtcactgaagccatccaagcgtgcaagctggcccaggagaatggctggggggtcatggtgagtcatcgctcaggagagactgaggacacattcattgctgacctggtggtggggctgtgcacaggccagatcaagactggtgccccgtgccgttctgaacgtctggctaaatacaaccagctcatgagaattgaggaagagctgggggatgaagctcgctttgccggacataacttccgtaatcccagtgtgctgtgattcctctgcttgcctggagacgtggaacctctgtctcatcctcctggaaccttgctgtcctgatctgtgatagttcaccccctgagatcccctgagccccagggtgcccagaacttccctgattgacctgctccgctgctccttggcttacctgacctcttgctgtctctgctcgccctcctttctgtgccctactcattggggttccgcactttccacttcttcctttctctttctctcttccctcagaaactagaaatgtgaatgaggattattataaaagggggtccgtggaagaatgatcagcatctgtgatgggagcgtcagggttggtgtgctgaggtgttagagagggaccatgtgtcacttgtgctttgctcttgtcccacgtgtcttccactttgcatatgagccgtgaactgtgcatagtgctgggatggaggggagtgttgggcatgtgatcacgcctggctaataaggctttagtgtatttatttatttatttattttatttgtttttcattcatcccattaatcatttccccataactcaatggcctaaaactggcctgacttgggggaacgatgtgtctgtatttcatgtggctgtagatcccaagatgactggggtgggaggtcttgctagaatgggaagggtcatagaaagggccttgacatcagttcctttgtgtgtactcactgaagcctgcgttggtccagagcggaggctgtgtgcctgggggagttttcctctatacatctctccccaaccctaggttccctgttcttcctccagctgcaccagagcaacctctcactccccatgccacgttccacagttgccaccacctctgtggcattgaaatgagcacctccattaaagtctgaatcagtgc

SEQ ID NO: 122721 - DNA, 1643 bp, Artificial Sequence
  derived and/or modified sequence
gctctctcagcgccgccgtcgccaccgccaccgccaccgccactaccaccgtctgagtctgcagtcccgagatcccagccatcatgtccatagagaagatctgggcccgggagatcctggactcccgcgggaaccccacagtggaggtggatctctatactgccaaaggtcttttccgggctgcagtgcccagtggagcctctacgggcatctatgaggccctggagctgagggatggagacaaacagcgttacttaggcaaagccaagtttggggccaatgccatcctgggtgtgtctctggccgtgtgtaaggcaggggcagctgagcgggaactgcccctgtatcgccacattgctcagctggccgggaactcagacctcatcctgcctgtgccggccttcaacgtgatcaatggtggctctcatgctggcaacaagctggccatgcaggagttcatgatcctcccagtgggagctgagagctttcgggatgccatgcgactaggtgcagaggtctaccatacactcaagggagtcatcaaggacaaatacggcaaggatgccaccaatgtgggggatgaaggtggctttgcccccaatatcctggagaacagtgaagccttggagctggtgaaggaagccatcgacaaggctggctacacggaaaagatcgttattggcatggatgttgctgcctcagagttttatcgtgatggcaaatatgacttggacttcaagtctcccactgatccttcccgatacatcactggggaccagctgggggcactctaccaggactttgtcagggactatcctgtggtctccattgaggacccatttgaccaggatgattgggctgcctggtccaagttcacagccaatgtagggatccagattgtgggtgatgacctgacagtgaccaacccaaaacgtattgagcgggcagtggaagaaaaggcctgcaactgtctgctgctcaaggtcaaccagatcggctcggtcactgaagccatccaagcgtgcaagctggcccaggagaatggctggggggtcatggtgagtcatcgctcaggagagactgaggacacattcattgctgacctggtggtggggctgtgcacaggccagatcaagactggtgccccgtgccgttctgaacgtctggctaaatacaaccagctcatgagaattgaggaagagctgggggatgaagctcgctttgccggacataacttccgtaatcccagtgtgctgtgattcctctgcttgcctggagacgtggaacctctgtctcatcctcctggaaccttgctgtcctgatctgtgatagttcaccccctgagatcccctgagccccagggtgcccagaacttccctgattgacctgctccgctgctccttggcttacctgacctcttgctgtctctgctcgccctcctttctgtgccctactcattggggttccgcactttccacttcttcctttctctttctctcttccctcagaaactagaaatgtgaatgaggattattataaaagggggtccgtggaagaatgatcagcatctgtgatgggagcgtcagggttggtgtgctgaggtgttagagagggaccatgtgtcacttgtgctttgctcttgt

SEQ ID NO: 122722 - protein, 957 aa, Artificial Sequence
  derived and/or modified sequence
MNFAEREGSKRYCIQTKHVAILCAVVVGVGLIVGLAVGLTRSCDSSGDGGPGTAPAPSHLPSSTASPSGPPAQDQDICPASEDESGQWKNFRLPDFVNPVHYDLHVKPLLEEDTYTGTVSISINLSAPTRYLWLHLRETRITRLPELKRPSGDQVQVRRCFEYKKQEYVVVEAEEELTPSSGDGLYLLTMEFAGWLNGSLVGFYRTTYTENGQVKSIVATDHEPTDARKSFPCFDEPNKKATYTISITHPKEYGALSNMPVAKEESVDDKWTRTTFEKSVPMSTYLVCFAVHQFDSVKRISNSGKPLTIYVQPEQKHTAEYAANITKSVFDYFEEYFAMNYSLPKLDKIAIPDFGTGAMENWGLITYRETNLLYDPKESASSNQQRVATVVAHELVHQWFGNIVTMDWWEDLWLNEGFASFFEFLGVNHAETDWQMRDQMLLEDVLPVQEDDSLMSSHPIIVTVTTPDEITSVFDGISYSKGSSILRMLEDWIKPENFQKGCQMYLEKYQFKNAKTSDFWAALEEASRLPVKEVMDTWTRQMGYPVLNVNGVKNITQKRFLLDPRANPSQPPSDLGYTWNIPVKWTEDNITSSVLFNRSEKEGITLNSSNPSGNAFLKINPDHIGFYRVNYEVATWDSIATALSLNHKTFSSADRASLIDDAFALARAQLLDYKVALNLTKYLKREENFLPWQRVISAVTYIISMFEDDKELYPMIEEYFQGQVKPIADSLGWNDAGDHVTKLLRSSVLGFACKMGDREALNNASSLFEQWLNGTVSLPVNLRLLVYRYGMQNSGNEISWNYTLEQYQKTSLAQEKEKLLYGLASVKNVTLLSRYLDLLKDTNLIKTQDVFTVIRYISYNSYGKNMAWNWIQLNWDYLVNRYTLNNRNLGRIVTIAEPFNTELQLWQMESFFAKYPQAGAGEKPREQVLETVKNNIEWLKQHRNTIREWFFNLLESG

SEQ ID NO: 122723 - DNA, 2874 bp, Artificial Sequence
  derived and/or modified sequence
atgaatttcgccgaacgagagggcagcaagcggtattgcattcagactaagcatgtggctattctttgtgctgttgtggtgggcgttggtctcatcgttggcctggctgtcggcctcactaggtcttgtgactcctcaggagacggtggaccaggtaccgctcctgctccatctcacctgcccagctccaccgccagcccgagcgggccccccgcccaggatcaggatatctgccccgccagcgaggatgagagcggacaatggaaaaactttcgccttccagactttgtgaatcctgtgcactatgacctgcacgtcaagccgttgttggaggaggacacttatactggcacagtcagcatctccatcaatctctctgccccaacccgctacctgtggctgcatcttagagaaactagaatcaccagactccccgagctgaaacgcccatcaggcgaccaagttcaggtgcgccggtgctttgagtacaagaaacaggagtatgtagtagtggaggcagaagaggagcttaccccctccagcggtgacggactctatctgctgaccatggagtttgcaggctggttgaatggatcactggtgggcttctaccgcacaacatacaccgagaatggccaagtgaagagtatagtggccaccgaccacgaaccaactgatgcccgcaagtcttttccctgtttcgatgagcccaacaaaaaagccacctatactatttctatcacacacccaaaagaatatggtgctctgagcaacatgcccgtggctaaagaggagtccgtcgacgacaagtggacccgtaccacctttgaaaaaagcgtgcccatgagtacataccttgtatgttttgccgtgcaccagtttgactcagtgaagcggatctcgaactctgggaaacctctgactatatacgtgcagccagaacagaagcacaccgctgagtacgctgccaacattacaaaatccgtcttcgactacttcgaggagtatttcgcgatgaactatagtctacctaagctggataagatcgccatccctgatttcggaacgggagccatggagaattggggattaatcacctaccgtgaaacaaatctgctttatgaccccaaggagtccgcgtcaagtaatcaacaacgggtggctaccgtggttgcacacgaattagtgcaccagtggttcggcaacatcgtgactatggactggtgggaagatctatggctgaacgaaggctttgctagtttctttgagttcctgggcgttaaccatgccgagaccgattggcagatgcgcgatcagatgctgctggaagatgtactacccgtgcaggaggatgactccctgatgagttctcacccaattatcgtaaccgttactactcccgacgagattacaagcgtcttcgatggcattagctactcaaaagggtcttctattctccgtatgctagaagattggattaagcccgaaaactttcagaagggatgtcagatgtatctggaaaagtaccagtttaagaatgcaaaaacatctgatttttgggcggcactggaggaggcgtcacgcttgccggtgaaggaggttatggacacctggaccagacaaatggggtacccggtgcttaatgtaaacggtgtgaagaatataacccagaagcggttcttgcttgacccccgcgcaaacccctcacagccccctagcgacctcggctatacatggaatatccctgttaagtggaccgaggataatatcacgagctctgtcttgttcaacaggtcagaaaaggagggcatcaccttgaacagtagtaatccatcaggcaacgcgttcttgaagataaatccagatcacatcggattctatcgcgtgaattacgaggtcgcgacatgggattcaatagccacagccctgagcttgaatcacaagactttctcttccgccgatcgtgcctcactaattgacgatgcttttgcactggcaagggcccaattactcgattataaggtggccttaaacctcacaaagtacctcaagagggaggaaaactttttgccctggcagcgagtaatttccgccgtgacgtacatcattagcatgtttgaagacgataaagagttataccccatgatagaagaatattttcagggccaggtgaaacccattgccgacagtctgggttggaatgatgccggggatcatgtgaccaaactgctgagatcatcagttctgggctttgcctgtaagatgggtgacagggaagctttaaacaatgcatcaagcttatttgagcaatggctgaacggcaccgtgagtttacccgtgaatctgaggctactcgtgtacagatatggcatgcagaactctggaaatgaaatcagttggaactacaccctagaacagtatcaaaaaaccagcctcgcacaagaaaaggaaaaactgctgtacgggctggcgagcgttaaaaacgtgacgctcctgtccagatatctggacctgcttaaggacactaatcttataaagacacaagacgtttttacagttattcgctatatatcttacaactcttacggaaagaatatggcatggaattggattcagctgaattgggattatctggtgaatcgttatacattgaacaaccggaacctcgggcggatagtaaccattgccgagcccttcaacaccgagctccagctgtggcagatggagagtttcttcgctaagtatccccaggcaggcgcaggtgagaagccgagagaacaagtgctggagactgtgaaaaataatattgagtggctcaagcaacacagaaacaccattcgtgagtggttcttcaatttattggagtctggctag

SEQ ID NO: 122724 - DNA, 6943 bp, Artificial Sequence
  derived and/or modified sequence
gttttatatttaactcgctgcagtgcaggaggggtaggggtggagatgcgtcgtttataaggggagctgtgacaatcttcttgccagccctcttcctcccactcggctcctcttacggagtcctcattccaccccccttgtttccgcattcatcctgagtggctggtgggaacgtgaaaagggagaggaaaaggcgcaagaagccagagagaggggtgtgggaaaagcgaaaacaggctgccaaatcaggggattccttccaatttaaaaaggaagtctgctgacgttagttagttaaatttaacatctttttatgtgtaacacttgactttggaagcaaaaatgaactttgcggagagagagggctctaagagatactgcattcaaacgaaacatgtggccattctctgtgcggtggtggtgggtgtaggattaatagtgggacttgccgtgggcttgaccagatcgtgtgactccagcggggacggcgggccgggcactgcgccagctccttcccacctgccttcttccacggccagcccctcaggtcctcctgcccaggaccaggacatctgcccggccagtgaggatgagagcggacagtggaaaaactttcgactgccggacttcgtcaacccagtccactacgacctgcacgtgaagcccctgttggaggaggacacctacacgggcaccgtgagcatctccatcaacctgagcgctcccacccggtacctgtggctgcacctccgggagaccaggatcacccggctcccggagctgaagaggccctctggggaccaggtgcaagtccggaggtgtttcgagtacaaaaagcaggagtacgtggtggtcgaggcggaggaagagcttacccccagcagtggagatggcctgtatctcctgaccatggagttcgccggctggctgaacggctccctcgtgggattttatagaaccacctacacggagaacggacaagtcaagagcatagtggccaccgatcatgaaccaacagatgccaggaaatcttttccttgttttgatgagcccaacaaaaaggcaacttatacaatatctatcacccatcccaaagaatacggagcactttcaaatatgccagtggcgaaagaagagtcagtggatgataaatggactcgaacaacttttgagaagtctgtccccatgagcacgtacctggtgtgctttgctgtacatcaatttgactctgtaaagagaatatcaaatagtggaaaacctcttacaatttatgtccagccagagcaaaagcacacagccgaatatgctgcaaacataactaaaagtgtgtttgattattttgaagaatactttgctatgaattattctcttcctaaattagataaaatcgctattccagattttggcactggtgccatggagaactggggactcatcacgtacagagaaacgaacctgctttatgaccctaaggaatcagcctcatcaaaccaacagagggtggccactgtggttgcccatgaacttgtgcatcagtggtttggaaatattgtgaccatggactggtgggaagacttgtggctaaatgaaggatttgcttctttctttgagtttctgggagtaaaccatgcagaaacagactggcaaatgcgtgaccaaatgttacttgaagatgtattacctgttcaagaggatgattctttgatgtcttcgcatccaattattgtgactgtgacaacccctgatgaaataacatctgtttttgatggaatatcctatagcaagggatcttctattttgagaatgcttgaagactggataaaaccagagaattttcaaaaaggatgtcagatgtacttggaaaaataccaattcaagaatgcaaaaacttctgatttttgggcagcactggaagaggcaagtaggctaccagtgaaagaagtaatggacacctggaccagacagatgggttatcctgtgcttaacgtgaacggtgtcaagaacatcacacagaaacgctttttgttggacccaagagctaacccttctcagcccccttcagatcttggttatacatggaatatcccagttaaatggactgaagataatataacaagcagtgtgttatttaataggtcagaaaaagaaggaatcactttgaactcctctaatcctagtggaaatgcttttctcaaaataaacccagatcatattgggttttatcgtgtaaattatgaagtagcaacttgggactcgatagctacagcgctctccttgaaccacaagacattttcttcagcagatcgtgcaagtcttattgatgatgcttttgccttggcaagagctcaacttctagattataaggtggctttgaacttgaccaagtatctcaaaagggaagagaattttttaccatggcagagagtaatttcagctgtaacctacatcattagcatgtttgaagatgataaagagctatatcctatgattgaggaatacttccaaggtcaagtgaagcctattgcagattctctgggatggaatgatgctggagaccatgtcacaaagttactccgttcctccgtgttagggtttgcgtgcaagatgggagacagagaagccttgaacaatgcttcctcgttatttgagcagtggctaaatgggactgtaagccttcccgtaaatctcaggcttctggtgtatcggtatgggatgcagaactctggcaatgagatttcatggaactacactcttgagcaataccagaaaacttcattagctcaagaaaaagaaaaactgctgtatggattagcatcagtgaagaacgttactcttttgtcaaggtatttggatttgctcaaggacacgaaccttattaaaactcaggatgtgtttacagtcattcgatatatctcatataacagctatgggaagaacatggcctggaattggatacaactcaactgggactatctagtcaacagatatacactcaataacagaaaccttggccgaattgtcacaatagcagagccattcaacactgaactgcaactgtggcagatggagagcttttttgcaaaatatccacaagctggagcaggagaaaaacctagggaacaagtgctggaaacagtgaaaaacaatatagagtggctaaaacaacatagaaacaccatcagagaatggttttttaatttacttgagagtggttaatgtattcaaatgttagagtttaattttgtgaatctattgtttctcctctgaagcatttggtggcctaatttacaagcacgatggagagagccttataaacagataatgcttttactaagcactgtgtttatatgtcttgcaaagcctttaaattgttcctctttgtttatgaagaaagatactaatagagtacttaatatactcagggattccttctaagtgtacttcataagatattctttacaaactgaagataatgaaatagttattttaatacctttaaatatcattctttgtatcttaaatctgtgaagtagaacaatttggtcttagctttacattttcagtaccaaagaaacaccacttaatcttctctcttgattgatttttaaagtttaaataccagtacttgagggaccaatattaccatcttaatctttattttattattcagaattatacagacctaatatcattttattcacatatgtcttactactttaaatcctaccaaagtaacctgggcttaagttttacttgaggatcatatgaattagccaaaagaatggctgactgttgcctttgctcttataaaatcaataagagaactctcctctttttttaaaaataaatctaaatgattatcttgaaaaagtattgttttccagtgtcacttgactcttgaataaaaataactgcagtgttccccaaataatttaacacattgcaaatatgattcaagaatctggcctttttcatgcttggtactctcttctcttgctccattccttacaaagctccttcaaatatgctatgaaattagagggaacatagtgcttaactctgctccatggattttagaggaaaaaagctaaataattggaaactgttcaggaaagagagaaggcagattatttcttaaaactaaatggaattagaatttagctttgacctcacctagcaatctaagtgtgaaaatggggagacctgtgggcatccccagcatgactctgcatatctgagcatatatctccttatagatcaattttatgtataaacccttagatcctaatccatacagaatagcactgatcaaatttaaatgcatgacttgattaaagacatcaatttcatagaagctggtggcaagaatatgtttaatatggcacttgatacctcctagatccataatgtaagtccaataggcagaaaagatggtaagttactatgtttcaatctgctatatctagaaaatctaaatttatttggaactttcaaaaatgtaaggtaatttagaatcggcttgatgagaattgaagcatatggaaacaaaaccttagctttaactttatttatacaataatgtgccctaatcatgtactctgaaactttataaactttcctgttgctgtttcttaattatcacttctcaatccgtacagccaaactagtaaattcaaatgtagactgggttgtgggtggcagatatagaagaagaaatttccagaccaaaaaatattaaatattattttaaattatttcagaagcaaaaacatattaacatcataacttaccagaaaaaccccactatcctcataagattaacttaaaattctgaccacaatcagaaccagcacttgaagtctatgtattgtttcaagtaggacatattatgaggtgagatggtttatccttctgttttatgaaattaatacattttaaaagaaaaatgttagtttaagggggtggtaaataaaacagatttcaacttgcctacaagacattctatttcatgccttttccttttgttgttctatttcattctattttaagcattaaaactgagaacaaattgtttacttcttttcactccacacgcgaaagagttgtatgtactttgtcagaataagtcttctagaccatcaggtccttctcaaacaacacctgttttttaaaaggctgatgcctaatagatagatctatgccaagcacagtttattactttgcttgcttggttttgcacagtattcacaggggacaaaaaatttaatatgatgtttccaaaattaagccacagtaaatttaaataattaattttaattgaaaaaaagtaaccatttaatttcaagaattaactggaaaatatgggaagcaaggtcatgtagcaaaaagcaaggccagtattactgcctcccctctaggcagcccactcctgtattccagatcattgctatgtacccacataattataaattaggagtttaaataataaaacatagacgtaaaactgacaggcaagggaggtttgggaaacaggggtgagatgtatacctgggttgaaggtaatgatactcctacagcttaccctccaagttggtgaagtgttagtccaaaagtagaaacaacagagtaggggcaaaaatctagaacaataattctcaaagggaattgggggatgagaaggaagtagaaaagaggggattcaaattaccagtggtgctttctaaaacacggttaggtaatcatcatcatcagactttcctttttttttcaagcatttttataaacactagcactccacataacattaatttttacaaaacccccttaaagtagatactgttattgttcttattttagagtggataaattgagatggagaagttatagaacttgcacaaggctacaaaagttgtatttggcaccagccagtatttgaacccaggcagtttatcactctaatctacattttaatctgtattagagtaaaaatatgcttttgaaatcagagtgacctgggttggaatatcaactacttggtagttgagtgcttttaacctctccattgttgtttcatctataaagtaaggatcaaaatagtagctacctcaatggtagttgtgaggattaaatacaaaaatgcatgtaaaggacatacgtataggaaataacaatcactcaataagtgttagctcttattattgttactattatatctccccatccctacttaagacactagtttgaagaataaaataaactttggttcaggaataaccaaacctaagcaactgaaggcactaagggtaggctatgtgttagcctgtgttattgttcataaatagtaattgccctggtctggaagaggattctatatcctaccccattgtagtctagcatggtatgtgacttgctttggccagtgaaacagagtgaaaatgatgtatgtcaattttaggcagaaacgtccagagccagcacttggtttgccatgttctccgtgtttcttctgctcctagatgcagcagtattccagatagaggccgcactatgagcctgaattccaggataaaaacaacatggaatagaacttagccagcacagagtacacatgtgctgtaaatgagaaatacccctttgttattgtaaatcactgagattttgaggttgtctgttactgcagcataatctagcctaatataaacaccaaactaatatactcctctaccatagtaatttatttcttgttctttctcctcctccttcctctacttcagggtttagcgaccttttgcctgcctgtttttgtaaggcctgaaagctaaacatagttttacatttttagatggttgaaaaaatcaaaaggagaataatagttcatgatgtaaaaattatataaaatttaaataaatgtcggcatccttaaataaagttttattggaacaca

SEQ ID NO: 122725 - DNA, 2874 bp, Artificial Sequence
  derived and/or modified sequence
atgaactttgctgagcgggagggcagcaagcgctactgcatccagaccaagcacgtggccatcctgtgtgctgtggtggtgggcgtgggcctcatcgtgggcctggccgtgggcctgaccaggagctgtgacagcagtggagatggcggccctggaacagccccagcccccagccacctgcccagcagcacagccagccccagcggccccccagcccaggaccaggacatctgcccagcctctgaagatgaaagtggccagtggaagaacttccggctgcctgactttgtgaaccctgtgcactatgacctgcacgtgaagcccctgctggaggaggacacctacacaggcaccgtgtccatcagcatcaacctgagcgcccccacccgctacctgtggctgcacctgcgggagacccgcatcacccggctgcctgagctgaagaggccttctggggaccaggtgcaggtgcggcgctgctttgagtacaagaagcaggagtatgtggtggtggaggccgaggaggagctgacccccagcagtggagatggcctgtacctgctgaccatggagtttgctggctggctgaatggcagcctggtgggcttctaccgcaccacctacacagaaaatggccaggtgaagagcatcgtggccacagaccacgagcccacagatgccaggaagagcttcccctgctttgatgagcccaacaagaaggccacctacaccatcagcatcacccaccccaaggagtatggagccctgagcaacatgcctgtggccaaggaggagagcgtggatgacaagtggaccaggaccacctttgagaagtctgtgcccatgagcacctacctggtgtgctttgctgtgcaccagtttgacagcgtgaagaggatcagcaacagcggcaagcccctgaccatctacgtgcagcctgagcagaagcacacagcagaatatgctgccaacatcaccaagtctgtgtttgactactttgaggagtactttgccatgaactacagcctgcccaagctggacaagatcgccatcccagactttggcaccggggccatggagaactggggcctcatcacctaccgggagaccaacctgctgtatgaccccaaggagagcgccagcagcaaccagcagagggtggccaccgtggtggcccacgagctggtgcaccagtggtttggaaatattgtgaccatggactggtgggaggacctgtggctgaatgaaggatttgccagcttctttgagttcctgggcgtgaaccacgccgagacagactggcagatgagggaccagatgctgctggaggatgtgctgcctgtgcaggaggatgacagcctgatgagcagccaccccatcatcgtgacagtgaccaccccagatgagatcacctctgtgtttgatggcatctcctacagcaagggcagcagcatcctgaggatgctggaggactggatcaagccagagaacttccagaagggctgccagatgtacctggagaagtaccagttcaagaatgccaagaccagtgacttctgggccgccctggaggaggccagccggctgcctgtgaaggaggtgatggacacctggacccggcagatgggctaccctgtgctgaatgtgaatggagtgaagaacatcacccagaagcgcttcctgctggacccccgggccaaccccagccagcccccaagtgacctgggctacacctggaacatccctgtgaagtggacagaggacaacatcaccagctctgtgctcttcaacagaagtgagaaggagggcatcaccctgaacagcagcaaccccagcggaaatgccttcctgaagatcaacccagaccacatcggcttctacagagtgaactatgaggtggccacctgggacagcatcgccacagccctgagcctgaaccacaagaccttcagcagcgctgaccgggccagcctgattgatgatgcctttgccctggcccgggcccagctgctggactacaaggtggccctgaacctgaccaagtacctgaagcgggaggagaacttcctgccctggcagagggtcatctctgctgtgacctacatcatctccatgtttgaagatgacaaggagctgtaccccatgattgaggagtacttccagggccaggtgaagcccatcgctgacagcctgggctggaatgatgctggggaccacgtgaccaagctgctgcggagctctgtgctgggctttgcctgcaagatgggagaccgggaggccctgaacaatgccagcagcctgtttgagcagtggctgaatggaacagtgtccctgcctgtgaacctgcggctgctggtgtaccgctatggcatgcagaacagcggaaatgagatctcctggaactacaccctggagcagtaccagaagaccagcctggcccaggagaaggagaagctgctgtatggcctggcctctgtgaagaatgtgaccctgctgagccgctacctggacctgctgaaggacaccaacctgatcaagacccaggatgtgttcaccgtcatccgctacatctcctacaacagctatggcaagaacatggcctggaactggatccagctgaactgggactacctggtgaaccgctacaccctgaacaacagaaacctgggccgcatcgtgaccatcgccgagcccttcaacacagagctgcagctgtggcagatggagagcttctttgccaagtacccccaggccggggccggggagaagccccgggagcaggtgctggagaccgtgaagaacaacatcgagtggctgaagcagcacaggaacaccatccgggagtggttcttcaacctgctggagagcggctag

SEQ ID NO: 122726 - DNA, 2874 bp, Artificial Sequence
  derived and/or modified sequence
atgaacttcgccgagcgggagggcagcaagcggtactgcatccagaccaaacacgtggcaatactgtgcgctgttgtagtgggtgtgggattgatcgttggcctggccgtgggactaacacgctcatgcgatagtagcggagatgggggtccaggaacagcacccgctccatcacacctaccaagtagtacagcttcacctagcggaccccccgcgcaagatcaagatatctgtcctgcctccgaggatgagagtggtcagtggaagaatttccgcttacctgattttgtgaaccccgtgcactacgacctacatgttaagccactgcttgaggaagacacgtacaccggaaccgtgtccatctccattaatttgtccgccccaacacggtacctgtggctccatcttagggagactcggattacacggctgcccgaattaaagagaccttcaggtgaccaggtccaggtgcgccggtgttttgaatataagaagcaggagtacgtggtggtggaggcagaagaggaactgactccctcctctggtgacggcctgtacctgctaacaatggaattcgctggatggcttaacgggtctttagtgggattttacagaacaacctacaccgaaaacggccaggtaaagagtattgtagccactgaccacgagcctactgatgccaggaagtcgtttccctgctttgatgagcccaacaaaaaagctacttatacaatttctatcacccatccaaaggaatacggtgccttaagtaacatgcctgttgctaaggaggagtcagtggacgataaatggacaagaacaacctttgaaaagagcgtgcccatgtcaacctatctggtctgttttgctgttcatcagtttgacagcgttaaaagaatcagcaactccggaaagcccctgaccatatacgtgcagcccgaacaaaaacacacagcagagtacgcagccaatatcaccaaaagcgtattcgactatttcgaggaatattttgccatgaattactccttgcctaaactcgacaagatagccattcccgacttcggaaccggcgctatggagaattgggggcttatcacctaccgggaaacaaacttgctgtacgaccccaaagaaagtgcctcaagcaaccagcagcgggtggccaccgtcgtggctcacgagctcgtgcatcaatggttcggtaatatcgtgacaatggattggtgggaggacctctggctcaacgaaggctttgccagcttcttcgaatttcttggagtcaatcacgcggagacagattggcagatgcgtgatcagatgctgttggaagatgtgttaccggtacaggaagatgattctctgatgagtagtcatccaattattgtaacagtgaccacccccgacgagatcaccagcgtgtttgatggcatttcctactccaaaggttcaagtattctcaggatgctggaggattggattaagcctgagaactttcagaaaggctgccagatgtacttagagaagtatcagtttaagaatgcaaaaaccagcgacttttgggctgccctagaggaagccagtcggctgcctgtcaaggaagttatggatacatggacacgacagatgggctatccagtgctgaatgtcaacggggttaagaacatcacccagaaacgtttcctcttagacccccgggccaatccctcccagccaccaagcgatcttgggtatacctggaatattccagtgaagtggacggaggataacatcaccagctccgttttattcaaccgctctgaaaaggaaggcattacactcaacagctctaatcctagtggtaatgcatttcttaagataaatccagatcacatcggcttctatcgggtaaactacgaggtggcaacctgggacagtattgcaactgccctgtcattaaaccataaaacttttagcagtgcagacagagcctctctgatcgacgatgcatttgcgctggcacgggcccagctgcttgactacaaagtggcgctgaaccttactaagtatctgaaacgggaagaaaatttcttaccctggcagcgggtgatctcagccgtcacatacatcattagcatgttcgaagacgataaggaactctacccaatgattgaggagtattttcagggccaggttaaacctatcgcagactccctgggctggaacgacgccggtgaccacgtgactaagctcctgaggtcctcagtgctgggattcgcctgcaaaatgggcgatcgagaggctcttaataatgcgtcaagccttttcgagcaatggcttaatgggacggtcagcttgcccgtcaacctacgcctcctagtttatcggtatgggatgcagaacagcggcaacgagatctcatggaactatacactggagcagtaccagaagacatcccttgcccaggagaaagaaaagctgttatacgggctggcatctgtcaagaatgttacattgctttcacgctacctagacctgctgaaagatactaatctaatcaagacccaggacgtgttcactgtaatcagatatatctcttacaatagttacggcaagaacatggcatggaactggatccagctgaattgggactacctggtaaatcgctacacactcaacaaccgaaacttaggtaggatcgtaaccattgcggagccttttaacaccgaactccagttatggcagatggaaagctttttcgcaaagtatccacaagccggcgccggagagaagccacgcgagcaggtgctggagaccgtgaaaaacaatatcgagtggctgaagcagcaccgaaacacaatccgggaatggttcttcaacctattagaatcaggatag

SEQ ID NO: 122727 - DNA, 2874 bp, Artificial Sequence
  derived and/or modified sequence
atgaacttcgcagaacgtgagggtagcaaacggtactgtatacagaccaagcatgtagccattctttgcgccgtagtggttggagttggcctgattgtgggactcgccgtggggctgacaagatcttgcgattcctccggggacggcggacccggtaccgcacccgcaccatcacacctgcccagttcaacagctagccccagcggacctcccgcacaggaccaggacatttgccccgcttcagaggacgagtcaggccaatggaaaaactttagactgcccgattttgtgaatccagtgcattatgatcttcatgtcaagcccttactggaggaagatacatacaccggaactgtcagtatttccatcaacctctcggcacctacgaggtacctctggctgcatctgagggagacgcggatcacacggttgcctgagcttaagcgtccctctggggaccaggtgcaggtgagaaggtgttttgaatacaaaaagcaggagtatgtcgtcgtggaggctgaagaggaacttactccctcctccggtgatggcctgtacttgcttactatggaatttgctggatggctgaacggttccctggtgggcttttaccgaacgacgtatacggaaaacggccaggtcaagagtattgtagccactgatcatgagcctaccgacgcaaggaagagcttcccttgctttgacgagcccaataaaaaggccacttacacaatttctataacccatccgaaagaatacggggcactttctaatatgcccgtggcaaaagaagagtccgtggacgacaagtggacccggactaccttcgagaagtcagtgcccatgagcacatacctggtgtgttttgcagttcatcaatttgactccgtcaagcggatctcaaactccggcaagccactcacaatttatgtccaacccgagcagaagcataccgcagagtatgccgctaacattacgaagagcgtgtttgattatttcgaagagtacttcgccatgaactacagtctgcccaagctcgacaaaatagcaattcccgattttggtacaggcgctatggagaattggggcctgattacttatagggagaccaacctcctgtatgatcccaaagagagcgctagtagtaaccagcagcgagttgccaccgtcgtggcccacgaactcgtgcatcagtggtttgggaatatagtgacaatggattggtgggaagacctctggttaaacgagggctttgcatcctttttcgagttcctcggggtaaatcacgctgaaacagattggcagatgagagatcagatgctgctagaggatgtcctgcccgttcaggaggatgactctttaatgagctcccatcctatcattgtgacagtgaccacccctgacgagatcacctcagtattcgacggtatctcctactccaaggggtcctctatcctccgtatgctggaagattggatcaagcccgagaatttccagaaaggatgtcagatgtacttggagaagtatcaatttaagaacgctaaaacatcggacttttgggcagcgctcgaggaagcgtcgagattacccgtgaaagaggtcatggacacatggacacgacagatgggatatcctgtactgaacgtgaacggggtgaagaacattactcaaaagaggtttctgctcgatccacgggcaaatccaagtcaaccaccatctgacttaggttatacctggaatattcctgtgaagtggaccgaagataatataacaagctctgtgcttttcaacagaagcgagaaggaagggatcacccttaacagcagcaacccatccggcaatgcctttctgaagatcaatccagatcacatagggttctaccgcgtcaactacgaagtggcaacatgggacagcatcgccacggccctgtctctcaatcataaaacatttagctctgctgacagggcctcccttatcgacgacgccttcgccctggcccgagcgcagctgcttgactacaaggtggccctgaacttgaccaagtacctgaaaagggaggaaaacttcttaccctggcagcgggttatctccgccgtcacatatattatatctatgttcgaggacgataaagaattgtatccgatgatcgaggagtactttcaagggcaggtaaagccaatcgcagattctcttggctggaacgatgccggagaccacgtcaccaagctgttgcgaagctctgtcttgggcttcgcctgcaagatgggcgatcgtgaggccttaaacaatgctagctctcttttcgagcagtggcttaacggaaccgtctctttgccagttaacttacgcttgttggtgtatcgttatggcatgcagaattccgggaatgagatctcttggaactacaccctagagcagtaccagaagacctccttggcccaagaaaaagagaagctcctctacgggttagcatctgtcaagaatgtgacgcttttaagccggtacctcgacctattgaaggatacaaacttaattaagacacaagatgtattcacggttattaggtacatttcatacaattcctatggcaagaacatggcctggaattggatccagcttaactgggactatttagttaaccggtacacacttaataaccggaacctggggagaatcgtgactatcgctgaaccttttaataccgagctgcagctctggcagatggaatcatttttcgcgaagtacccccaggcaggcgctggggaaaagcctagggagcaggtgctagagactgtgaaaaataacatagagtggctgaagcagcatcggaacacaatcagggaatggttcttcaatctgctcgaaagcggatag

SEQ ID NO: 122728 - DNA, 2874 bp, Artificial Sequence
  derived and/or modified sequence
atgaacttcgccgagagagagggcagcaagagatactgcatccagaccaagcacgtggccatcctgtgcgccgtggtggtgggcgtgggcctgatcgtgggcctggccgtgggcctgaccagaagctgcgacagcagcggcgacggcggccccggcaccgcccccgcccccagccacctgcccagcagcaccgccagccccagcggcccccccgcccaggaccaggacatctgccccgccagcgaggacgagagcggccagtggaagaacttcagactgcccgacttcgtgaaccccgtgcactacgacctgcacgtgaagcccctgctggaggaggacacctacaccggcaccgtgagcatcagcatcaacctgagcgcccccaccagatacctgtggctgcacctgagagagaccagaatcaccagactgcccgagctgaagagacccagcggcgaccaggtgcaggtgagaagatgcttcgagtacaagaagcaggagtacgtggtggtggaggccgaggaggagctgacccccagcagcggcgacggcctgtacctgctgaccatggagttcgccggctggctgaacggcagcctggtgggcttctacagaaccacctacaccgagaacggccaggtgaagagcatcgtggccaccgaccacgagcccaccgacgccagaaagagcttcccctgcttcgacgagcccaacaagaaggccacctacaccatcagcatcacccaccccaaggagtacggcgccctgagcaacatgcccgtggccaaggaggagagcgtggacgacaagtggaccagaaccaccttcgagaagagcgtgcccatgagcacctacctggtgtgcttcgccgtgcaccagttcgacagcgtgaagagaatcagcaacagcggcaagcccctgaccatctacgtgcagcccgagcagaagcacaccgccgagtacgccgccaacatcaccaagagcgtgttcgactacttcgaggagtacttcgccatgaactacagcctgcccaagctggacaagatcgccatccccgacttcggcaccggcgccatggagaactggggcctgatcacctacagagagaccaacctgctgtacgaccccaaggagagcgccagcagcaaccagcagagagtggccaccgtggtggcccacgagctggtgcaccagtggttcggcaacatcgtgaccatggactggtgggaggacctgtggctgaacgagggcttcgccagcttcttcgagttcctgggcgtgaaccacgccgagaccgactggcagatgagagaccagatgctgctggaggacgtgctgcccgtgcaggaggacgacagcctgatgagcagccaccccatcatcgtgaccgtgaccacccccgacgagatcaccagcgtgttcgacggcatcagctacagcaagggcagcagcatcctgagaatgctggaggactggatcaagcccgagaacttccagaagggctgccagatgtacctggagaagtaccagttcaagaacgccaagaccagcgacttctgggccgccctggaggaggccagcagactgcccgtgaaggaggtgatggacacctggaccagacagatgggctaccccgtgctgaacgtgaacggcgtgaagaacatcacccagaagagattcctgctggaccccagagccaaccccagccagccccccagcgacctgggctacacctggaacatccccgtgaagtggaccgaggacaacatcaccagcagcgtgctgttcaacagaagcgagaaggagggcatcaccctgaacagcagcaaccccagcggcaacgccttcctgaagatcaaccccgaccacatcggcttctacagagtgaactacgaggtggccacctgggacagcatcgccaccgccctgagcctgaaccacaagaccttcagcagcgccgacagagccagcctgatcgacgacgccttcgccctggccagagcccagctgctggactacaaggtggccctgaacctgaccaagtacctgaagagagaggagaacttcctgccctggcagagagtgatcagcgccgtgacctacatcatcagcatgttcgaggacgacaaggagctgtaccccatgatcgaggagtacttccagggccaggtgaagcccatcgccgacagcctgggctggaacgacgccggcgaccacgtgaccaagctgctgagaagcagcgtgctgggcttcgcctgcaagatgggcgacagagaggccctgaacaacgccagcagcctgttcgagcagtggctgaacggcaccgtgagcctgcccgtgaacctgagactgctggtgtacagatacggcatgcagaacagcggcaacgagatcagctggaactacaccctggagcagtaccagaagaccagcctggcccaggagaaggagaagctgctgtacggcctggccagcgtgaagaacgtgaccctgctgagcagatacctggacctgctgaaggacaccaacctgatcaagacccaggacgtgttcaccgtgatcagatacatcagctacaacagctacggcaagaacatggcctggaactggatccagctgaactgggactacctggtgaacagatacaccctgaacaacagaaacctgggcagaatcgtgaccatcgccgagcccttcaacaccgagctgcagctgtggcagatggagagcttcttcgccaagtacccccaggccggcgccggcgagaagcccagagagcaggtgctggagaccgtgaagaacaacatcgagtggctgaagcagcacagaaacaccatcagagagtggttcttcaacctgctggagagcggctag

SEQ ID NO: 122729 - protein, 502 aa, Artificial Sequence
  derived and/or modified sequence
MKGEITLSQWIPLMEENCRKCSETAKVCLPKNFSIKEIFDKAISARKINRPMLQAALMLRKKGFTTAILTNTWLDDRAERDGLAQLMCELKMHFDFLIESCQVGMVKPEPQIYKFLLDTLKASPSEVVFLDDIGANLKPARDLGMVTILVQDTDTALKELEKVTGIQLLNTPAPLPTSCNPSDMSHGYVTVKPRVRLHFVELGSGPAVCLCHGFPESWYSWRYQIPALAQAGYRVLAMDMKGYGESSAPPEIEEYCMEVLCKEMVTFLDKLGLSQAVFIGHDWGGMLVWYMALFYPERVRAVASLNTPFIPANPNMSPLESIKANPVFDYQLYFQEPGVAEAELEQNLSRTFKSLFRASDESVLSMHKVCEAGGLFVNSPEEPSLSRMVTEEEIQFYVQQFKKSGFRGPLNWYRNMERNWKWACKSLGRKILIPALMVTAEKDFVLVPQMSQHMEDWIPHLKRGHIEDCGHWTQMDKPTEVNQILIKWLDSDARNPPVVSKM

SEQ ID NO: 122730 - protein, 489 aa, Artificial Sequence
  derived and/or modified sequence
MEENCRKCSETAKVCLPKNFSIKEIFDKAISARKINRPMLQAALMLRKKGFTTAILTNTWLDDRAERDGLAQLMCELKMHFDFLIESCQVGMVKPEPQIYKFLLDTLKASPSEVVFLDDIGANLKPARDLGMVTILVQDTDTALKELEKVTGIQLLNTPAPLPTSCNPSDMSHGYVTVKPRVRLHFVELGSGPAVCLCHGFPESWYSWRYQIPALAQAGYRVLAMDMKGYGESSAPPEIEEYCMEVLCKEMVTFLDKLGLSQAVFIGHDWGGMLVWYMALFYPERVRAVASLNTPFIPANPNMSPLESIKANPVFDYQLYFQEPGVAEAELEQNLSRTFKSLFRASDESVLSMHKVCEAGGLFVNSPEEPSLSRMVTEEEIQFYVQQFKKSGFRGPLNWYRNMERNWKWACKSLGRKILIPALMVTAEKDFVLVPQMSQHMEDWIPHLKRGHIEDCGHWTQMDKPTEVNQILIKWLDSDARNPPVVSKM

SEQ ID NO: 122731 - protein, 502 aa, Artificial Sequence [sequence omitted]

SEQ ID NO: 122732 - protein, 555 aa, Artificial Sequence
  derived and/or modified sequence
MTLRAAVFDLDGVLALPAVFGVLGRTEEALALPRGLLNDAFQKGGPEGATTRLMKGEITLSQWIPLMEENCRKCSETAKVCLPKNFSIKEIFDKAISARKINRPMLQAALMLRKKGFTTAILTNTWLDDRAERDGLAQLMCELKMHFDFLIESCQVGMVKPEPQIYKFLLDTLKASPSEVVFLDDIGANLKPARDLGMVTILVQDTDTALKELEKVTGIQLLNTPAPLPTSCNPSDMSHGYVTVKPRVRLHFVELGSGPAVCLCHGFPESWYSWRYQIPALAQAGYRVLAMDMKGYGESSAPPEIEEYCMEVLCKEMVTFLDKLGLSQAVFIGHDWGGMLVWYMALFYPERVRAVASLNTPFIPANPNMSPLESIKANPVFDYQLYFQEPGVAEAELEQNLSRTFKSLFRASDESVLSMHKVCEAGGLFVNSPEEPSLSRMVTEEEIQFYVQQFKKSGFRGPLNWYRNMERNWKWACKSLGRKILIPALMVTAEKDFVLVPQMSQHMEDWIPHLKRGHIEDCGHWTQMDKPTEVNQILIKWLDSDARNPPVVSKM

SEQ ID NO: 122733 - DNA, 1509 bp, Artificial Sequence
  derived and/or modified sequence
atgactttgcgcgctgccgtttttgacctggacggggttcttgcactgcccgccgtgtttggggtgttgggtcgtaccgaggaggcgctcgcattgccccgtggactgctcaatgacgccttccagaagggtggcccggagggggcaaccactaggctaatgaagggtgaaatcactttgtctcaatggatccccctcatggaggagaattgtaggaagtgctccgagacagccaaagtgtgcctgcccaaaaacttttcaattaaggagattttcgacaaagctattagtgctcgtaaaatcaacagacccatgctccaagccgcactgatgctacggaaaaaggccttctgcagcggcttcacaaccgccatactgaccaatacatggctggacgatagggccgaaagagatggcctggcccagctcatgtgcgagctgaaaatgcattttgactttttaatcgagtcctgccaggtgggcatggtgaagcctgagccccagatctataagttcttgctcgacacacttaaggcgtcaccctctgaagtggtgttccttgatgacatcggagcgaacttgaagcctgcccgggacctcggtatggtgacgatactggtgcaagataccgacacagctcttaaggaactcgaaaaggttacaggaattcaactcttgaatacgccggcgccattacctacaagttgtaacccctctgatatgagccacggttatgttactgttaagccccgggtgcggcttcacttcgtcgagctgggttcaggcccagccgtctgtctctgccacgggtttcctgagtcatggtacagctggcgataccagattcctgcgctcgcccaagccgggtatcgcgttctcgcaatggacatgaagggttatggagagagctcagccccccccgagatcgaagagtactgtatggaggtcctctgcaaggagagcattaaggctaaccccgtcttcgactaccagctctacttccaggaacctggcgtggcggaggctgaattggagcaaaacctgtctcggacgttcaagtctttgttcagggcctccgatgagtctgtactgtccatgcacaaagtttgtgaagcagggggacttttcgtgaacagcccggaagagccttctctctcaaggatggttacagaggaggagatacagttttatgttcagcagttcaaaaagtcagggtttagaggcccccttaattggtacaggaacatggagcgcaattggaagtgggcatgtaagtcgctcggacggaaaatactgataccagccttgatggtgacagccgaaaaggactttgtactggttccacagatgagtcagcacatggaggactggataccccaccttaaacgtggccacatcgaagactgcggccattggacccagatggataaacccactgaggtgaatcaaattctgatcaagtggctggactcagatgctagaaatccaccagtggtgagtaagatgtag

SEQ ID NO: 122734 - DNA, 1668 bp, Artificial Sequence
  derived and/or modified sequence
atgactctgagggccgcggtattcgacctggacggggtcctagcgctgccggctgtgtttggcgtccttggtcgcacggaagaggctctagcattacccagaggcctgttaaatgacgcattccagaaaggcggacctgagggcgccactacccgcttgatgaaaggggaaattaccctgtctcagtggatcccactcatggaggaaaattgccgtaagtgcagcgagaccgcaaaggtgtgtctgcccaagaacttttctattaaagagatatttgacaaagccatctccgcccggaaaatcaacagacctatgctccaagccgctctgatgcttagaaagaagggattcaccacagctatactgaccaacacgtggctggacgatcgggctgaacgagacggcctcgctcagctcatgtgtgaactaaaaatgcacttcgacttcctgatcgaaagctgccaggtgggaatggtgaaaccagaaccccagatttacaagtttttactggatactctgaaagctagcccaagcgaagttgtgtttctcgatgacattggggctaatctcaagcctgccagagatctggggatggtaacaatcctcgtgcaggacaccgacaccgccctcaaggaactggaaaaagtcacaggtatccagcttctaaatacacctgccccactcccgaccagctgtaacccctcggacatgtcccacggttacgtgacagtgaagccccgtgtgaggctgcacttcgtcgagttgggtagtggtcctgccgtgtgcctgtgccatggttttccagagagctggtacagttggcgatatcagattcccgccctagcccaggctggctatcgtgtcctcgccatggacatgaagggttatggcgagagctctgccccacctgaaatcgaggaatattgtatggaggttttgtgcaaagagatggtgacctttctggataagttgggactctcgcaggccgtgttcatagggcatgactggggcgggatgctcgtatggtatatggctttgttttaccctgagcgggtacgggccgttgcaagcctgaacacccctttcatcccagctaatccaaacatgagcccactggagtcgattaaggctaatcctgttttcgattaccagctctactttcaagagcctggtgtggccgaggctgagctggaacagaaccttagcaggacctttaagagccttttccgcgctagtgacgaaagtgtacttagcatgcacaaggtctgcgaagcaggaggactcttcgttaacagtccagaggaaccgtcactgtcccggatggtgacagaggaggagatccagttctatgtccagcagttcaagaaatcgggctttcgcgggccgctgaattggtatcgaaatatggaaagaaactggaagtgggcatgtaaatctttgggacggaagatcttgattcccgcccttatggtaactgctgaaaaagattttgtgctcgtgccccaaatgtcccaacatatggaggattggattccccacctaaaacgcggtcatatagaagattgtggccactggacccagatggacaagcctaccgaggtgaaccagatcctcatcaagtggttggactcagacgcccgaaacccacccgtagtgtctaaaatgtag

SEQ ID NO: 122735 - DNA, 1509 bp, Artificial Sequence
  derived and/or modified sequence
atgaccctgcgggctgctgtgtttgacctggatggagtgctggccctgcctgctgtgtttggagtgctgggccgcacagaggaggccctggccctgccccggggcctgctgaatgatgccttccagaagggcggccctgagggcgccaccacccggctgatgaagggggagatcaccctgagccagtggatccccctgatggaggagaactgcaggaaatgttctgaaacagccaaggtgtgcctgcccaagaacttcagcatcaaggagatctttgacaaggccatcagcgccaggaagatcaaccggcccatgctgcaggccgccctgatgctgaggaagaaggccttctgcagcggcttcaccacagccatcctgaccaacacctggctggatgacagagctgagagagatggcctggcccagctgatgtgtgagctgaagatgcactttgacttcctgattgagagctgccaggtgggcatggtgaagccagagccccagatctacaagttcctgctggacaccctgaaggccagccccagcgaggtggtgttcctggatgacatcggggccaacctgaagccagcccgggacctgggcatggtgaccatcctggtgcaggacacagacacagccctgaaggagctggagaaggtgacaggcatccagctgctgaacaccccagcccccctgcccaccagctgcaaccccagcgacatgagccacggctacgtgacagtgaagccccgggtgcggctgcactttgtggagctgggcagcggccctgctgtgtgcctgtgccacggcttccctgagagctggtacagctggagataccagatcccagccctggcccaggccggctacagagtgctggccatggacatgaagggctacggggagagcagcgcccctcctgagattgaggagtactgcatggaggtgctgtgcaaggagagcatcaaggccaaccctgtgtttgactaccagctgtacttccaggagcccggggtggccgaggccgagctggagcagaacctgagcaggaccttcaagagcctcttccgggccagtgatgagagcgtgctgtccatgcacaaggtgtgtgaggccggcggcctgtttgtgaacagccctgaggagcccagcctgagcaggatggtgacagaggaggagatccagttctacgtgcagcagttcaagaagagcggcttccggggccccctgaactggtacagaaacatggagaggaactggaagtgggcctgcaagagcctgggcaggaagatcctgatcccagccctgatggtgacagctgagaaggactttgtgctggtgccccagatgagccagcacatggaggactggatcccccacctgaagaggggccacatcgaggactgtggccactggacccagatggacaagcccacagaggtgaaccagatcctgatcaagtggctggacagtgatgccaggaacccccctgtggtgtccaagatgtag

SEQ ID NO: 122736 - DNA, 1668 bp, Artificial Sequence
  derived and/or modified sequence
atgaccctgcgggctgctgtgtttgacctggatggagtgctggccctgcctgctgtgtttggagtgctgggccgcacagaggaggccctggccctgccccggggcctgctgaatgatgccttccagaagggcggccctgagggcgccaccacccggctgatgaagggggagatcaccctgagccagtggatccccctgatggaggagaactgcaggaaatgttctgaaacagccaaggtgtgcctgcccaagaacttcagcatcaaggagatctttgacaaggccatcagcgccaggaagatcaaccggcccatgctgcaggccgccctgatgctgaggaagaagggcttcaccacagccatcctgaccaacacctggctggatgacagagctgagagagatggcctggcccagctgatgtgtgagctgaagatgcactttgacttcctgattgagagctgccaggtgggcatggtgaagccagagccccagatctacaagttcctgctggacaccctgaaggccagccccagcgaggtggtgttcctggatgacatcggggccaacctgaagccagcccgggacctgggcatggtgaccatcctggtgcaggacacagacacagccctgaaggagctggagaaggtgacaggcatccagctgctgaacaccccagcccccctgcccaccagctgcaaccccagcgacatgagccacggctacgtgacagtgaagccccgggtgcggctgcactttgtggagctgggcagcggccctgctgtgtgcctgtgccacggcttccctgagagctggtacagctggagataccagatcccagccctggcccaggccggctacagagtgctggccatggacatgaagggctacggggagagcagcgcccctcctgagattgaggagtactgcatggaggtgctgtgcaaggagatggtgaccttcctggacaagctgggcctgagccaggccgtgttcatcggccatgactggggcggcatgctggtgtggtacatggccctcttctacccagagcgggtgcgggctgtggccagcctgaacacccccttcatcccagccaaccccaacatgagccccctggagagcatcaaggccaaccctgtgtttgactaccagctgtacttccaggagcccggggtggccgaggccgagctggagcagaacctgagcaggaccttcaagagcctcttccgggccagtgatgaatctgtgctgtccatgcacaaggtgtgtgaggccggcggcctgtttgtgaacagccctgaggagcccagcctgagcaggatggtgacagaggaggagatccagttctacgtgcagcagttcaagaagagcggcttccggggccccctgaactggtacagaaacatggagaggaactggaagtgggcctgcaagagcctgggcaggaagatcctgatcccagccctgatggtgacagctgagaaggactttgtgctggtgccccagatgagccagcacatggaggactggatcccccacctgaagaggggccacatcgaggactgtggccactggacccagatggacaagcccacagaggtgaaccagatcctgatcaagtggctggacagtgatgccagaaatcctcctgtggtgtccaagatgtag

SEQ ID NO: 122737 - DNA, 1509 bp, Artificial Sequence
  derived and/or modified sequence
atgaccctgcgggccgccgtgttcgacctggacggcgtgctggcccttccagccgtgttcggtgttctaggtagaacggaggaagctcttgctctaccccgaggcttactcaacgatgccttccagaagggcggccctgaaggcgcgacaacaagactgatgaagggcgaaatcacactgtcgcagtggatccccctgatggaagagaattgtagaaaatgttccgaaacggcaaaggtatgcctccccaaaaacttctccatcaaagagatcttcgacaaagcgataagcgcaaggaagatcaatagaccaatgttacaggctgccctgatgctgaggaaaaaagcattctgtagcggctttaccaccgccatcctgaccaacacctggctcgacgatagagccgaacgcgacggactcgcgcagctcatgtgtgaactcaagatgcacttcgactttctcatagagagttgccaggtgggtatggtcaagccggaaccacagatttataaattccttttagacactctgaaagcctctcctagcgaagtggtgttcctcgatgacattggcgctaatcttaagcctgcgcgggacctaggcatggtcaccatacttgtgcaggataccgatacagctctcaaggagctcgagaaagtcacagggatccagctgctgaatactccagcccccctgcccacgtcctgtaaccccagcgatatgtcacatggatacgtcaccgtcaaaccccgagtgagactgcactttgtcgagttgggtagcgggcctgcagtgtgcctctgtcatggattccctgaatcttggtactcttggcgttaccagattccagcactggcccaagccggttacagagtgttggctatggatatgaaaggatacggtgagtcaagtgctccaccagaaattgaagagtactgtatggaagtgctttgtaaggagtccattaaggccaatcccgtatttgattaccagctctactttcaggagccgggggttgcagaagctgaactggagcagaatctgagtcggacattcaaatccctattccgtgcatcagacgagtctgtgctcagcatgcacaaggtgtgtgaggcgggcggactcttcgttaactctcctgaggagccctccctatcccgtatggtcaccgaagaggagattcagttttacgtgcagcaattcaagaagtccgggtttagaggccctctgaactggtatcgcaatatggagcgcaattggaaatgggcttgtaagtccctcggaagaaaaatcctcatccccgccctgatggtgaccgccgaaaaagacttcgtcctggtgcctcagatgtcacaacatatggaagattggattccccatttaaaacggggccacatcgaagactgtggccactggacccagatggacaaaccaaccgaagtgaaccaaatcctaatcaaatggctggacagcgacgcacgtaacccccccgtggtgtccaagatgtag

SEQ ID NO: 122738 - DNA, 1668 bp, Artificial Sequence
  derived and/or modified sequence
atgaccctgcgggccgccgtgttcgacctggacggcgtgctggccctgcccgccgtgttcggcgtgctggggcggaccgaagaggccctggcacttccgagaggtttgctgaatgatgcttttcagaagggggggcctgagggtgcaacaacacgactcatgaaaggggaaattacactgtcacagtggatcccactgatggaggagaactgccgaaaatgcagtgagacagcaaaggtttgtttaccgaagaatttcagtattaaggaaatatttgacaaagcgatcagtgcacgaaagataaatagacccatgcttcaagcagcactcatgctgcgtaagaagggatttacgacagctattttaacgaacacttggcttgatgatagggccgagcgggacggcctcgcccaactgatgtgcgaactgaagatgcactttgatttcctgatcgaatcatgtcaagtgggtatggtgaagcccgagcctcaaatctacaaattcctcctcgacacgctgaaggccagcccttcagaggtagtttttctggacgatataggggctaatcttaagcctgcccgcgacctgggtatggtgacgatcttggtccaggatacagacaccgccctgaaagagctcgaaaaggtaacaggtattcagttgctcaatactcccgccccactgcccacatcctgtaacccatctgatatgtcacatgggtatgtaaccgtcaagccccgagtgagattgcatttcgttgagctcggttcgggacctgctgtgtgcctctgccacggcttccccgaaagctggtacagctggcgatatcaaatcccggccttagcccaagccggttaccgagtgctggcgatggatatgaaaggctacggcgagtcctcagcaccccccgaaattgaagaatattgcatggaggtcttgtgtaaagaaatggtaacttttctagacaagctgggacttagccaggctgtgttcattggccacgattggggcggcatgctcgtttggtacatggctctgttctatcccgaacgcgttcgcgccgttgcctcactcaatactccattcatcccggcaaaccccaacatgtctccccttgagagcattaaagccaatcctgtgttcgattatcagctctattttcaggaacccggcgtggctgaagcggagctggagcagaatctgtcccggactttcaaatccctgtttcgtgcgtcagacgaatctgttctttctatgcacaaagtttgtgaggctggtggcctttttgtcaacagccctgaagagccatccttgtctcgcatggtgaccgaggaggagattcagttctacgtccagcaattcaaaaagtctgggtttaggggccctctgaattggtatcgcaatatggaacgcaattggaagtgggcctgtaaaagtctcggacggaagatcctcatccccgccctgatggttaccgccgagaaggatttcgtccttgtaccccagatgtctcaacacatggaagactggattccccacctcaagaggggccatatcgaggactgcggacactggactcagatggataaacctactgaggtcaatcagatcctcatcaaatggctggatagcgatgccaggaaccctcctgttgtttcaaagatgtag

SEQ ID NO: 122739 - DNA, 1509 bp, Artificial Sequence
  derived and/or modified sequence
atgacactaagagcagcagtattcgacctggatggagttctcgctttacctgccgtgttcggcgtcctggggcgaacagaagaagccctggccctgccaagaggattgcttaacgacgcctttcagaaaggaggacccgaaggtgctactactcgcctgatgaaaggggaaatcaccctgagccaatggattcctctgatggaagagaactgtaggaagtgctctgaaaccgccaaggtttgcctgccgaagaacttctctattaaggaaatctttgataaggccatatccgcaaggaaaattaataggccgatgctgcaggctgccctgatgctgagaaagaaagcgttttgttccgggttcaccaccgctatactgacgaacacctggcttgacgatagagctgaaagggacggtcttgcccagttaatgtgcgagctgaagatgcacttcgatttcctcatcgagtcctgccaggtgggtatggttaagcctgaacctcagatctataagtttctcctggacaccctaaaggcctcgcccagcgaggtggtgttcttggatgatataggcgcaaatcttaaaccagccagagatctcggaatggtgaccatcttggtgcaagacaccgatacagcattaaaggaacttgagaaggtaaccggcatacagttgctcaatacgcccgcacccctgccaactagctgcaacccctcagatatgtcgcatggctacgtgactgtgaagccccgagtcagactgcactttgtcgagctgggaagcggacccgctgtatgcctgtgccatggatttcccgagtcatggtactcatggcgctatcagattccggcacttgcccaggccggttatagggtactcgccatggacatgaagggctacggtgaaagctcagcccctccagaaattgaagaatattgcatggaggttctctgtaaagagagtataaaggcgaatcctgtgttcgactatcaactgtacttccaggagcccggagtggcggaggccgaactcgaacagaatttgtcacgcacctttaagtccttgttccgggcttcagatgagtcggtgctgtcaatgcataaagtgtgtgaggcgggtggcctcttcgtcaatagcccagaagagccatccctaagtcgaatggtgacagaggaagagatccaattttatgtgcagcagtttaagaagagcgggttccggggtcccctcaattggtatcggaatatggaacggaactggaaatgggcttgcaaaagtctggggcgaaaaattctgattccagcactaatggtaacagccgagaaggactttgtgctggtgcctcaaatgagtcagcatatggaggactggataccacatttaaagagagggcatattgaggattgcggccactggacccaaatggataagccgacagaggtgaaccaaatcctgatcaagtggttggacagtgacgcaagaaaccccccagtggtcagtaaaatgtag

SEQ ID NO: 122740 - DNA, 1668 bp, Artificial Sequence
  derived and/or modified sequence
atgaccctgcgcgcagccgtgttcgatttggacggggtgctggcgctccccgctgtgtttggtgtgttaggtcgcacagaggaagctttagcgctgcctcggggtcttctcaacgatgcctttcagaagggcggtcctgagggtgcaactactaggttaatgaagggggaaattacattaagtcaatggattccactcatggaggaaaattgtcgaaagtgcagtgagaccgctaaggtgtgtcttccaaaaaacttttctatcaaggagatcttcgacaaagccatttcagcacggaaaattaacaggccaatgttgcaggccgctctgatgctgcgaaagaagggatttacgacagctatccttactaacacatggctggacgacagagccgagagggacgggttggcgcaattgatgtgcgaactgaaaatgcactttgactttttgatcgagtcttgccaggtgggaatggtaaagccggaacctcagatatataaatttttactggatactctcaaggccagtcccagcgaggtggtgtttctggatgatatcggcgctaacctgaaacccgctagggacctcgggatggtgacaatactggtgcaggatacggacaccgccctgaaggagctggagaaggtcactggcatacaattattgaacacaccagcccctttaccaacatcctgtaacccttccgatatgtcccacgggtatgtgaccgtcaagccacgagtccgtctgcattttgtggagcttggatctggtcccgcagtgtgcctttgccacggattcccagaaagctggtatagttggaggtatcagattcccgcacttgcacaagctggatatagggtgcttgccatggatatgaaagggtacggggagtcctccgcaccaccggagattgaggaatattgcatggaggtactctgtaaagagatggtgacctttctggataaactcggcctgtcacaagccgtcttcattggccacgactggggtggcatgcttgtttggtatatggccctgttttaccccgaacgcgtgagggcagtggcaagtttgaatacacctttcattccggcaaatcctaacatgagccctctggagtctattaaggccaatcctgtcttcgattaccaactctactttcaggagcccggtgtcgctgaggctgagctggagcagaatttatcaagaaccttcaagtccttattccgggcttccgatgagtcagtgctgtccatgcacaaagtttgtgaagcaggaggactcttcgtcaattcgcctgaggagccgagtcttagccgcatggtgacggaagaagagattcagttctacgtgcaacagttcaagaagagtggctttcgcggtcccttaaattggtaccgcaatatggagcggaattggaagtgggcctgcaagagcctcggcaggaagatcctgatcccagctctgatggtcaccgccgaaaaggacttcgtactggtcccacagatgtcacagcacatggaagattggattcctcacctgaagaggggccacattgaggactgtgggcactggactcagatggacaaaccaacggaggtgaatcagatccttatcaagtggctagatagtgatgctcgcaatcctcccgttgtcagcaagatgtag

SEQ ID NO: 122741 - DNA, 1509 bp, Artificial Sequence
  derived and/or modified sequence
atgaccctgagagccgccgtgttcgacctggacggcgtgctggccctgcccgccgtgttcggcgtgctgggcagaaccgaggaggccctggccctgcccagaggcctgctgaacgacgccttccagaagggcggccccgagggcgccaccaccagactgatgaagggcgagatcaccctgagccagtggatccccctgatggaggagaactgcagaaagtgcagcgagaccgccaaggtgtgcctgcccaagaacttcagcatcaaggagatcttcgacaaggccatcagcgccagaaagatcaacagacccatgctgcaggccgccctgatgctgagaaagaaggccttctgcagcggcttcaccaccgccatcctgaccaacacctggctggacgacagagccgagagagacggcctggcccagctgatgtgcgagctgaagatgcacttcgacttcctgatcgagagctgccaggtgggcatggtgaagcccgagccccagatctacaagttcctgctggacaccctgaaggccagccccagcgaggtggtgttcctggacgacatcggcgccaacctgaagcccgccagagacctgggcatggtgaccatcctggtgcaggacaccgacaccgccctgaaggagctggagaaggtgaccggcatccagctgctgaacacccccgcccccctgcccaccagctgcaaccccagcgacatgagccacggctacgtgaccgtgaagcccagagtgagactgcacttcgtggagctgggcagcggccccgccgtgtgcctgtgccacggcttccccgagagctggtacagctggagataccagatccccgccctggcccaggccggctacagagtgctggccatggacatgaagggctacggcgagagcagcgccccccccgagatcgaggagtactgcatggaggtgctgtgcaaggagagcatcaaggccaaccccgtgttcgactaccagctgtacttccaggagcccggcgtggccgaggccgagctggagcagaacctgagcagaaccttcaagagcctgttcagagccagcgacgagagcgtgctgagcatgcacaaggtgtgcgaggccggcggcctgttcgtgaacagccccgaggagcccagcctgagcagaatggtgaccgaggaggagatccagttctacgtgcagcagttcaagaagagcggcttcagaggccccctgaactggtacagaaacatggagagaaactggaagtgggcctgcaagagcctgggcagaaagatcctgatccccgccctgatggtgaccgccgagaaggacttcgtgctggtgccccagatgagccagcacatggaggactggatcccccacctgaagagaggccacatcgaggactgcggccactggacccagatggacaagcccaccgaggtgaaccagatcctgatcaagtggctggacagcgacgccagaaacccccccgtggtgagcaagatgtag

SEQ ID NO: 122742 - DNA, 1668 bp, Artificial Sequence
  derived and/or modified sequence
atgaccctgagagccgccgtgttcgacctggacggcgtgctggccctgcccgccgtgttcggcgtgctgggcagaaccgaggaggccctggccctgcccagaggcctgctgaacgacgccttccagaagggcggccccgagggcgccaccaccagactgatgaagggcgagatcaccctgagccagtggatccccctgatggaggagaactgcagaaagtgcagcgagaccgccaaggtgtgcctgcccaagaacttcagcatcaaggagatcttcgacaaggccatcagcgccagaaagatcaacagacccatgctgcaggccgccctgatgctgagaaagaagggcttcaccaccgccatcctgaccaacacctggctggacgacagagccgagagagacggcctggcccagctgatgtgcgagctgaagatgcacttcgacttcctgatcgagagctgccaggtgggcatggtgaagcccgagccccagatctacaagttcctgctggacaccctgaaggccagccccagcgaggtggtgttcctggacgacatcggcgccaacctgaagcccgccagagacctgggcatggtgaccatcctggtgcaggacaccgacaccgccctgaaggagctggagaaggtgaccggcatccagctgctgaacacccccgcccccctgcccaccagctgcaaccccagcgacatgagccacggctacgtgaccgtgaagcccagagtgagactgcacttcgtggagctgggcagcggccccgccgtgtgcctgtgccacggcttccccgagagctggtacagctggagataccagatccccgccctggcccaggccggctacagagtgctggccatggacatgaagggctacggcgagagcagcgccccccccgagatcgaggagtactgcatggaggtgctgtgcaaggagatggtgaccttcctggacaagctgggcctgagccaggccgtgttcatcggccacgactggggcggcatgctggtgtggtacatggccctgttctaccccgagagagtgagagccgtggccagcctgaacacccccttcatccccgccaaccccaacatgagccccctggagagcatcaaggccaaccccgtgttcgactaccagctgtacttccaggagcccggcgtggccgaggccgagctggagcagaacctgagcagaaccttcaagagcctgttcagagccagcgacgagagcgtgctgagcatgcacaaggtgtgcgaggccggcggcctgttcgtgaacagccccgaggagcccagcctgagcagaatggtgaccgaggaggagatccagttctacgtgcagcagttcaagaagagcggcttcagaggccccctgaactggtacagaaacatggagagaaactggaagtgggcctgcaagagcctgggcagaaagatcctgatccccgccctgatggtgaccgccgagaaggacttcgtgctggtgccccagatgagccagcacatggaggactggatcccccacctgaagagaggccacatcgaggactgcggccactggacccagatggacaagcccaccgaggtgaaccagatcctgatcaagtggctggacagcgacgccagaaacccccccgtggtgagcaagatgtag

SEQ ID NO: 122743 - DNA, 2064 bp, Artificial Sequence
  derived and/or modified sequence
aggttagctgcgtgtccgggtgctaggctgcagacccgccgccatgacgctgcgcgcggccgtcttcgaccttgacggggtgctggcgctgccagcggtgttcggcgtcctcggccgcacggaggaggccctggcgctgcccagagggtgccactacccggcttatgaaaggagagatcacactttcccagtggataccactcatggaagaaaactgcaggaagtgctccgagaccgctaaagtctgcctccccaagaatttctccataaaagaaatctttgacaaggcgatttcagccagaaagatcaaccgccccatgctccaggcagctctcatgctcaggaagaaaggattcactactgccatcctcaccaacacctggctggacgaccgtgctgagagagatggcctggcccagctgatgtgtgagctgaagatgcactttgacttcctgatagagtcgtgtcaggtgggaatggtcaaacctgaacctcagatctacaagtttctgctggacaccctgaaggccagccccagtgaggtcgtttttttggatgacatcggggctaatctgaagccagcccgtgacttgggaatggtcaccatcctggtccaggacactgacacggccctgaaagaactggagaaagtgaccggaatccagcttctcaataccccggcccctctgccgacctcttgcaatccaagtgacatgagccatgggtacgtgacagtaaagcccagggtccgtctgcattttgtggagctgggctccggccctgctgtgtgcctctgccatggatttcccgagagttggtattcttggaggtaccagatccctgctctggcccaggcaggttaccgggtcctagctatggacatgaaaggctatggagagtcatctgctcctcccgaaatagaagaatattgcatggaagtgttatgtaaggagatggtaaccttcctggataaactgggcctctctcaagcagtgttcattggccatgactggggtggcatgctggtgtggtacatggctctcttctaccccgagagagtgagggcggtggccagtttgaatactcccttcataccagcaaatcccaacatgtcccctttggagagtatcaaagccaacccagtatttgattaccagctctacttccaagaaccaggagtggctgaggctgaactggaacagaacctgagtcggactttcaaaagcctcttcagagcaagcgatgagagtgttttatccatgcataaagtctgtgaagcgggaggactttttgtaaatagcccagaagagcccagcctcagcaggatggtcactgaggaggaaatccagttctatgtgcagcagttcaagaagtctggtttcagaggtcctctaaactggtaccgaaacatggaaaggaactggaagtgggcttgcaaaagcttgggacggaagatcctgattccggccctgatggtcacggcggagaaggacttcgtgctcgttcctcagatgtcccagcacatggaggactggattccccacctgaaaaggggacacattgaggactgtgggcactggacacagatggacaagccaaccgaggtgaatcagatcctcattaagtggctggattctgatgcccggaacccaccggtggtctcaaagatgtagaacgcagcgtgtgcccacgctcagcaggtgtgccatccttccacctgctggggcaccattcttagtatacagaggtggccttacacacatcttgcatggatggcagcattgttctgaaggggtttgcagaaaaaaaagattttctttacataaagtgaatcaaatttgacattattttagatcccagagaaatcaggtgtgattagttctccaggcatgaatgcatcgtccctttatctgtaagaacccttagtgtcctgtagggggacagaatggggtggccaggtggtgatttctctttgaccaatgcatagtttggcagaaaaatcagccgttcatttagaagaatcttagcagagattgggatgccttactcaataaagctaagatg

SEQ ID NO: 122744 - DNA, 1930 bp, Artificial Sequence
  derived and/or modified sequence
gtgctaggctgcagacccgccgccatgacgctgcgcgcggccgtcttcgaccttgacggggtgctggcgctgccagcggtgttcggcgtcctcggccgcacggaggaggccctggcgctgcccagaggacttctgaatgatgctttccagaaagggggaccagagggtgccactacccggcttatgaaaggagagatcacactttcccagtggataccactcatggaagaaaactgcaggaagtgctccgagaccgctaaagtctgcctccccaagaatttctccataaaagaaatctttgacaaggcgatttcagccagaaagatcaaccgccccatgctccaggcagctctcatgctcaggaagaaagctttttgctcaggattcactactgccatcctcaccaacacctggctggacgaccgtgctgagagagatggcctggcccagctgatgtgtgagctgaagatgcactttgacttcctgatagagtcgtgtcaggtgggaatggtcaaacctgaacctcagatctacaagtttctgctggacaccctgaaggccagccccagtgaggtcgtttttttggatgacatcggggctaatctgaagccagcccgtgacttgggaatggtcaccatcctggtccaggacactgacacggccctgaaagaactggagaaagtgaccggaatccagcttctcaataccccggcccctctgccgacctcttgcaatccaagtgacatgagccatgggtacgtgacagtaaagcccagggtccgtctgcattttgtggagctgggctccggccctgctgtgtgcctctgccatggatttcccgagagttggtattcttggaggtaccagatccctgctctggcccaggcaggttaccgggtcctagctatggacatgaaaggctatggagagtcatctgctcctcccgaaatagaagaatattgcatggaagtgttatgtaaggagagtatcaaagccaacccagtatttgattaccagctctacttccaagaaccaggagtggctgaggctgaactggaacagaacctgagtcggactttcaaaagcctcttcagagcaagcgatgagagtgttttatccatgcataaagtctgtgaagcgggaggactttttgtaaatagcccagaagagcccagcctcagcaggatggtcactgaggaggaaatccagttctatgtgcagcagttcaagaagtctggtttcagaggtcctctaaactggtaccgaaacatggaaaggaactggaagtgggcttgcaaaagcttgggacggaagatcctgattccggccctgatggtcacggcggagaaggacttcgtgctcgttcctcagatgtcccagcacatggaggactggattccccacctgaaaaggggacacattgaggactgtgggcactggacacagatggacaagccaaccgaggtgaatcagatcctcattaagtggctggattctgatgcccggaacccaccggtggtctcaaagatgtagaacgcagcgtgtgcccacgctcagcaggtgtgccatccttccacctgctggggcaccattcttagtatacagaggtggccttacacacatcttgcatggatggcagcattgttctgaaggggtttgcagaaaaaaaagattttctttacataaagtgaatcaaatttgacattattttagatcccagagaaatcaggtgtgattagttctccaggcatgaatgcatcgtccctttatctgtaagaacccttagtgtcctgtagggggacagaatggggtggccaggtggtgatttctctttgaccaatgcatagtttggcagaaaaatcagccgttcatttagaagaatcttagcagagattgggatgccttactcaataaagctaagatgactatg

SEQ ID NO: 122745 - DNA, 3140 bp, Artificial Sequence
  derived and/or modified sequence
attccaagtccagcaagttcgcagggagctgtcagtccgtccaggaaggcccgggcctgggtttgcctcttcaagcagctactgcaggggcgtggggagggggcataagagactttggactttcctttgagacagtagaaagcgttacatccagaggcgagattctagcctggggtccccgccttcccggcctcctcttcctctccctctgactccctttcctgtgcccctccccctgcctctttcccggccagagtccagccttaacccgggcagagggcggagtcccgttaagggggtgtggggaggaggcggggccagggcaggggcggggcagagccgggccaagctgggcgggtcatgcgccctggccttcgcgcatctcccaggttagctgcgtgtccgggtgctaggctgcagacccgccgccatgacgctgcgcgcggccgtcttcgaccttgacggggtgctggcgctgccagcggtgttcggcgtcctcggccgcacggaggaggccctggcgctgcccagaggacttctgaatgatgctttccagaaagggggaccagagggtgccactacccggcttatgaaaggagagatcacactttcccagtggataccactcatggaagaaaactgcaggaagtgctccgagaccgctaaagtctgcctccccaagaatttctccataaaagaaatctttgacaaggcgatttcagccagaaagatcaaccgccccatgctccaggcagctctcatgctcaggaagaaaggattcactactgccatcctcaccaacacctggctggacgaccgtgctgagagagatggcctggcccagctgatgtgtgagctgaagatgcactttgacttcctgatagagtcgtgtcaggtgggaatggtcaaacctgaacctcagatctacaagtttctgctggacaccctgaaggccagccccagtgaggtcgtttttttggatgacatcggggctaatctgaagccagcccgtgacttgggaatggtcaccatcctggtccaggacactgacacggccctgaaagaactggagaaagtgaccggaatccagcttctcaataccccggcccctctgccgacctcttgcaatccaagtgacatgagccatgggtacgtgacagtaaagcccagggtccgtctgcattttgtggagctgggctccggccctgctgtgtgcctctgccatggatttcccgagagttggtattcttggaggtaccagatccctgctctggcccaggcaggttaccgggtcctagctatggacatgaaaggctatggagagtcatctgctcctcccgaaatagaagaatattgcatggaagtgttatgtaaggagatggtaaccttcctggataaactgggcctctctcaagcagtgttcattggccatgactggggtggcatgctggtgtggtacatggctctcttctaccccgagagagtgagggcggtggccagtttgaatactcccttcataccagcaaatcccaacatgtcccctttggagagtatcaaagccaacccagtatttgattaccagctctacttccaagaaccaggagtggctgaggctgaactggaacagaacctgagtcggactttcaaaagcctcttcagagcaagcgatgagagtgttttatccatgcataaagtctgtgaagcgggaggactttttgtaaatagcccagaagagcccagcctcagcaggatggtcactgaggaggaaatccagttctatgtgcagcagttcaagaagtctggtttcagaggtcctctaaactggtaccgaaacatggaaaggaactggaagtgggcttgcaaaagcttgggacggaagatcctgattccggccctgatggtcacggcggagaaggacttcgtgctcgttcctcagatgtcccagcacatggaggactggattccccacctgaaaaggggacacattgaggactgtgggcactggacacagatggacaagccaaccgaggtgaatcagatcctcattaagtggctggattctgatgcccggaacccaccggtggtctcaaagatgtagaacgcagcgtgtgcccacgctcagcaggtgtgccatccttccacctgctggggcaccattcttagtatacagaggtggccttacacacatcttgcatggatggcagcattgttctgaaggggtttgcagaaaaaaaagattttctttacataaagtgaatcaaatttgacattattttagatcccagagaaatcaggtgtgattagttctccaggcatgaatgcatcgtccctttatctgtaagaacccttagtgtcctgtagggggacagaatggggtggccaggtggtgatttctctttgaccaatgcatagtttggcagaaaaatcagccgttcatttagaagaatcttagcagagattgggatgccttactcaataaagctaagatgactatgctgctggctgtctttgttcttggagaggtggagtgactgttcacggagaatgcacggcatggggatgaaccctttccctctgcttttgagccctgttctgggctccaaggtgctgtatgatctaggccgtgctggccaggagacaatcctatggggatggcagtggtgtcttgtgctctgtcccctagagcagtcactggccacaggtagccacctgcctttctcccggcttccctagcagagtttgctcaggcacaaatgtgcacctggagcatttgaaatgtgctagtgaggctgaggaagagaattttaaatttcattgaattgtaatcagtttaaagttaaatagcagcagctgccatgaggctcaggcagatccagctcatcttcccctctgccccctcctccctatcttcccctctaccctctcctgcctcctgtcacatccggttaggctcccatctcactgatgtgtctcctgcagtggtctctcccctgccctgcttccagccccagagtcctggagcagcagcctcctcacgggtcttgccgcccacatggttggatcctgaaactcgcagggcctcccccaactgcccctgcccacccccagcccggccccatcaccctccaattcctaaccgc

SEQ ID NO: 122746 - protein, 287 aa, Artificial Sequence
  derived and/or modified sequence
MRDRLPDLTACRKNDDGDTVVVVEKDHFMDDFFHQVEEIRNSIDKITQYVEEVKKNHSIILSAPNPEGKIKEELEDLNKEIKKTANKIRAKLKAIEQSFDQDESGNRTSVDLRIRRTQHSVLSRKFVEAMAEYNEAQTLFRERSKGRIQRQLEITGRTTTDDELEEMLESGKPSIFTSDIISDSQITRQALNEIESRHKDIMKLETSIRELHEMFMDMAMFVETQGEMINNIERNVMNATDYVEHAKEETKKAIKYQSKARRKLMFIIICVIVLLVILGIILATTLS

SEQ ID NO: 122747 - DNA, 864 bp, Artificial Sequence
  derived and/or modified sequence
atgagagacagactgcccgacctgaccgcctgcagaaagaacgacgacggcgacaccgtggtggtggtggagaaggaccacttcatggacgacttcttccaccaggtggaggagatcagaaacagcatcgacaagatcacccagtacgtggaggaggtgaagaagaaccacagcatcatcctgagcgcccccaaccccgagggcaagatcaaggaggagctggaggacctgaacaaggagatcaagaagaccgccaacaagatcagagccaagctgaaggccatcgagcagagcttcgaccaggacgagagcggcaacagaaccagcgtggacctgagaatcagaagaacccagcacagcgtgctgagcagaaagttcgtggaggccatggccgagtacaacgaggcccagaccctgttcagagagagaagcaagggcagaatccagagacagctggagatcaccggcagaaccaccaccgacgacgagctggaggagatgctggagagcggcaagcccagcatcttcaccagcgacatcatcagcgacagccagatcaccagacaggccctgaacgagatcgagagcagacacaaggacatcatgaagctggagaccagcatcagagagctgcacgagatgttcatggacatggccatgttcgtggagacccagggcgagatgatcaacaacatcgagagaaacgtgatgaacgccaccgactacgtggagcacgccaaggaggagaccaagaaggccatcaagtaccagagcaaggccagaagaaagctgatgttcatcatcatctgcgtgatcgtgctgctggtgatcctgggcatcatcctggccaccaccctgagctag

SEQ ID NO: 122748 - DNA, 864 bp, Artificial Sequence
  derived and/or modified sequence
atgcgcgacagactgcccgatctcaccgcctgcagaaagaatgacgatggggacacagttgtagtagtcgaaaaggaccatttcatggatgacttctttcatcaagtggaggagatcagaaacagtatcgataaaattactcagtacgtcgaggaagtcaaaaaaaatcattctataattctaagcgcaccgaaccccgagggaaaaatcaaggaggaactggaggatctgaataaggagatcaaaaagacagctaataagataagggccaagcttaaggccatcgagcagagtttcgatcaggacgaaagcggcaatcgcacatccgtagatcttcgcatcagacggacccagcactcggtgctcagccgcaaattcgtagaggcgatggccgaatacaatgaagcccagacacttttccgcgagcggagtaagggccggattcaacgtcaattagagatcactggccgcacaactaccgacgacgaactggaggagatgctggaaagcggaaagccgtctatttttacgtccgacattatttcagattctcagattaccagacaagcattaaatgaaatcgaaagtcgccacaaagacattatgaaactcgagacgagtattcgcgaattacacgagatgttcatggatatggctatgtttgtcgagactcagggggaaatgatcaacaacattgaacggaatgtcatgaacgctaccgactatgtggaacacgctaaggaggaaactaaaaaggcaatcaagtaccagagcaaagcaaggcgcaagttaatgttcatcatcatatgcgtgatagtactgcttgtgattcttggcataatcctggcaacaacactgtcctag

SEQ ID NO: 122749 - DNA, 864 bp, Artificial Sequence
  derived and/or modified sequence
atgagggaccggctgcctgacctgacagcctgcaggaagaatgatgatggagacacagtggtggtggtggagaaggaccacttcatggatgacttcttccaccaggtggaggagatccggaacagcattgacaagatcacccagtatgtggaggaggtgaagaagaaccacagcatcatcctgagcgcccccaaccctgagggcaagatcaaggaggagctggaggacctgaacaaggagatcaagaagacagccaacaagatccgggccaagctgaaggccatcgagcagagctttgaccaggatgagagcggcaacagaacatctgtggacctgcgcatccggaggacccagcacagcgtgctgagcaggaagtttgtggaggccatggccgagtacaatgaggcccagaccctcttccgggagaggagcaagggccgcatccagaggcagctggagatcactggaagaaccaccacagatgatgagctggaggagatgctggagagcggcaagcccagcatcttcaccagtgacatcatcagtgacagccagatcacccggcaggccctgaatgaaattgagagccgccacaaggacatcatgaagctggagaccagcatccgggagctgcacgagatgttcatggacatggccatgtttgtggagacccagggcgagatgatcaacaacatcgagagaaatgtgatgaatgccacagattatgtggagcacgccaaggaggagaccaagaaggccatcaagtaccagagcaaggcccggaggaagctgatgttcatcatcatctgtgtgattgtgctgctggtgatcctgggcatcatcctggccaccaccctgtcctag

SEQ ID NO: 122750 - DNA, 864 bp, Artificial Sequence
  derived and/or modified sequence
atgcgggaccggctgcccgacctgaccgcctgccggaagaacgacgacggagatacagtcgtggtggtggagaaggatcacttcatggatgacttctttcatcaggtggaggagattagaaatagtattgataagatcacccagtacgtagaagaggttaagaaaaatcattccatcatcctgagcgcacccaacccagaaggcaaaatcaaagaagagctcgaagacctgaataaagagatcaagaagactgcaaacaaaataagagccaagttgaaggctattgagcaatcatttgatcaagacgaatcagggaaccgtacctccgtcgatctgcgtatacgtaggacccaacactccgtcctgtcccggaaatttgtagaggcaatggccgaatataatgaggcgcagactttattccgcgaacgatccaaaggcagaatccagcggcaattagaaataactgggcgcactaccaccgatgacgaattggaggagatgcttgaatctggtaaaccgtccatctttaccagcgatattatttctgacagtcagattacacgtcaggcactcaacgagatcgagagtaggcacaaggacattatgaaactagaaaccagcatccgtgagcttcatgaaatgtttatggacatggccatgttcgtagagacgcagggagaaatgataaacaacatcgaacgcaacgtgatgaacgcaacagactatgttgaacacgccaaggaagagacaaaaaaagctattaagtaccaatccaaggccagacgcaagctgatgtttatcatcatttgtgtcatagtgctgctggtcattttgggcatcatcctggccactacactgtcttag

SEQ ID NO: 122751 - DNA, 864 bp, Artificial Sequence
  derived and/or modified sequence
atgcgcgatagactcccagatctgactgcctgtcgaaaaaatgatgatggcgatacagtcgtagtggtagagaaagaccattttatggacgacttctttcaccaggtggaggagattcggaactccattgacaagattacccagtacgtcgaagaagtgaagaagaaccattccattattctatctgctccgaaccccgaaggcaagattaaagaagaactcgaggacctcaacaaagagataaagaagacagccaacaagatccgggcaaaactcaaagccattgagcagtcctttgaccaggatgagagcgggaaccgaacctcagttgatttgagaatcagacggacacagcactccgtcctgagtcgtaaatttgtcgaagccatggcagaatataatgaggcacaaacactctttcgcgagcgtagcaagggcaggatacagcggcaacttgaaattaccggaaggacaacaacggatgacgagctggaggagatgcttgagtccggaaagccaagcatctttacaagcgacatcatctctgatagtcagatcacaaggcaggctctaaatgagatagaaagcagacacaaggacatcatgaaactggaaacaagtattcgcgaactacacgaaatgtttatggacatggcaatgttcgttgaaacacagggagaaatgatcaacaacatagagcggaacgtaatgaacgccactgattacgtggaacatgcgaaagaggagacgaaaaaagccataaagtatcagtctaaggcaagacggaagttaatgttcatcattatctgtgtgattgtgctcctggttatcttgggaatcatcctggctaccaccctgtcctag

SEQ ID NO: 122752 - DNA, 3331 bp, Artificial Sequence
  derived and/or modified sequence
gcagagcgcgcggggcgcggttgccgtggcagcgccggctccagggagggctgctggcgccgggccgggaccgcggggcctgaggcggagaccggagagcccgaggcccggccggaggcagctcgggacaggcttgagcggcggggcgcgctgcccggccggcggggatgcgggaccggctgccagacctgacggcgtgtaggaagaatgatgatggagacacagttgttgtggttgagaaagatcatttcatggatgatttcttccatcaggtggaggagattagaaacagtattgataaaataactcaatatgttgaagaagtaaagaaaaaccacagcatcattctttctgcaccaaacccggaaggaaaaataaaagaagagcttgaagatctgaacaaagaaatcaagaaaactgcgaataaaattcgagccaagttaaaggctattgaacaaagttttgatcaggatgagagtgggaaccggacttcagtggatcttcggatacgaagaacccagcattcggtgctgtctcggaagtttgtggaagccatggcggagtacaatgaggcacagactctgtttcgggagcggagcaaaggccgcatccagcgccagctggagataactgggagaaccaccacagacgacgagctagaagagatgctggagagcgggaagccatccatcttcacttccgacattatatcagattcacaaattactagacaagctctcaatgaaatcgagtcacgtcacaaggacatcatgaagctggagaccagcatccgagagttgcatgagatgttcatggacatggctatgtttgtggagactcagggtgaaatgatcaacaacatagaaagaaatgttatgaatgccacagactatgtagaacacgctaaagaagaaacaaaaaaagctatcaaatatcagagcaaggcaagaaggaaattgatgttcattattatttgtgtaattgttttgcttgtgatccttggaattatcctagcaacaacattgtcctagcaaccatatcccaagagccatttatccttgagactcagaccacatctgcaaccaaatcagcatcctgtcatttcgtgaatgaatctcagacgctgtaacccggcatcgagtgctgaccttgtaatgtatgagttcacggaagaagcacaaccgaacgtcttgttcagtgacagcgccgtaagcacagtgggtgtgatgcgtgaccctgaatgacacactacagaatgtgagcagtgtgagacttctctcactggccttgaaataagaaaatattgaacattttaatattaaaaatatttcagtgttaacaaatgtgcatgaagtttaattaggaaggaatgctttatgttatgaaggcttttttttttttttttgagacggagtctcgctttgtcatccaggctggagtgcagtggtgcgatctcagctcactgcaacctcggcctcccgggttcaagcaattctcctgcctcagcctcccgagtagctgggattacaggcatgggccaccacacccagctaattttttgtgttttctttttagtagagacggggttttaccatgctggccaggctggcctcaaactcctgaccttgtgatccacccacctcagcctcccaaagtgctgggattacaggcgtgagtcaccgggcaggctgttctgaagcttttagatctcaggtctaaggcttcctttccctccctctcccagctagtttgtgctaattaagagaccttttatactgttttattgcctgtttgaagaaataatttttatcacgtttttgtaagatatctataattttaaatgtttataaattgtttaatttattagcatcttaatgtaccccatttttatatactgaatgtggccttttgagtgaaataggaagcttcatggtgttggagccacctttgtacagttgtttaaagtttcccattgtcacggaaaacattggctgcaaagcccctcaaagccctcaagtgccttctgtgagtttaaatgtgctggtgccctccagaaaagcctcggcctcagctccgtttccgcctgttccctcccccaggataatgaatggttactgcactgtaaagaccgtggtctcttttcactaaataggagattcgagtttcccagtttacatgaatgaagtctgaatttaagacggtgatgaaactgaggttcagtactctcgggactcgaggaaattattcctgagacatggagtaattcttacaaatttaaactattgtacagatccacatacatgttgttaagtacctaatgttttgctgaacttttaaaagttaatttccaaaatgtatagggattcatgataattaaacctttttattgctcatttttttagtagaagaatatcacttatttttagacttgtaaaatgtatgaactggtgagcggacatctgttaagagagtcactagtcagaatgttaaaggagtgcatgcaggatgccccaaatgtcgtgaactcttgttactcctgtatgtagtagtgtaagcatgtgacttttaacaccatttggtttgaaactaatgtagagatgcctgattccaaacaggtgtggagaatattgaatggctcagaagccgcgtcccttacttaacacaattccgaatctccctcatccatgatgcgtccattggatcactcgctggtggtcactgtgtggcagttactaggggaattctgcctctgactgttctttttcttttggtctttaaacaccctgtcgtgggatgtgctcactgatttgtggctatgttgaaggtatcacttgtcttgagggttttcaatatttcaggatcatgctggtggcaaaaggactccacgcctctgtggaatcatgtccacagggggacctgcctcccgtgatgtcccacctttccttcaaggtctgtcatatgagtcctccccttttacaacacttattatggtatttttcaagttattcttcttagatttgcagtacctactgaaatttgtgtttttatagttgaagttaggaaaatgctatttgatttgtatttagatatttaagtcacttgtccaatgatgtgtatgtctaagcctcatgtaccgatttgaagtcagacttaaaaatgtatttacagattcacttgagactttttaatcggttcttcaaatatttcatgtttacattaaaaatttccagagaagcataaaagtattcactttcctgccttgtcatttctggaaagattttggggagatattttattgcatattaattaataaattgttctactaggaaaa

SEQ ID NO: 122753 - protein, 1342 aa, Artificial Sequence
  derived and/or modified sequence
MRANDALQVLGLLFSLARGSEVGNSQAVCPGTLNGLSVTGDAENQYQTLYKLYERCEVVMGNLEIVLTGHNADLSFLQWIREVTGYVLVAMNEFSTLPLPNLRVVRGTQVYDGKFAIFVMLNYNTNSSHALRQLRLTQLTEILSGGVYIEKNDKLCHMDTIDWRDIVRDRDAEIVVKDNGRSCPPCHEVCKGRCWGPGSEDCQTLTKTICAPQCNGHCFGPNPNQCCHDECAGGCSGPQDTDCFACRHFNDSGACVPRCPQPLVYNKLTFQLEPNPHTKYQYGGVCVASCPHNFVVDQTSCVRACPPDKMEVDKNGLKMCEPCGGLCPKACEGTGSGSRFQTVDSSNIDGFVNCTKILGNLDFLITGLNGDPWHKIPALDPEKLNVFRTVREITGYLNIQSWPPHMHNFSVFSNLTTIGGRSLYNRGFSLLIMKNLNVTSLGFRSLKEISAGRIYISANRQLCYHHSLNWTKVLRGPTEERLDIKHNRPRRDCVAEGKVCDPLCSSGGCWGPGPGQCLSCRNYSRGGVCVTHCNFLNGEPREFAHEAECFSCHPECQPMEGTATCNGSGSDTCAQCAHFRDGPHCVSSCPHGVLGAKGPIYKYPDVQNECRPCHENCTQGCKGPELQDCLGQTLVLIGKTHLTMALTVIAGLVVIFMMLGGTFLYWRGRRIQNKRAMRRYLERGESIEPLDPSEKANKVLARIFKETELRKLKVLGSGVFGTVHKGVWIPEGESIKIPVCIKVIEDKSGRQSFQAVTDHMLAIGSLDHAHIVRLLGLCPGSSLQLVTQYLPLGSLLDHVRQHRGALGPQLLLNWGVQIAKGMYYLEEHGMVHRNLAARNVLLKSPSQVQVADFGVADLLPPDDKQLLYSEAKTPIKWMALESIHFGKYTHQSDVWSYGVTVWELMTFGAEPYAGLRLAEVPDLLEKGERLAQPQICTIDVYMVMVKCWMIDENIRPTFKELANEFTRMARDPPRYLVIKRESGPGIAPGPEPHGLTNKKLEEVELEPELDLDLDLEAEEDNLATTTLGSALSLPVGTLNRPRGSQSLLSPSSGYMPMNQGNLGESCQESAVSGSSERCPRPVSLHPMPRGCLASESSEGHVTGSEAELQEKVSMCRSRSRSRSPRPRGDSAYHSQRHSLLTPVTPLSPPGLEEEDVNGYVMPDTHLKGTPSSREGTLSSVGLSSVLGTEEEDEDEEYEYMNRRRRHSPPHPPRPSSLEELGYEYMDVGSDLSASLGSTQSCPLHPVPIMPTAGTTPDEDYEYMNRQRDGGGPGGDYAAMGACPASEQGYEEMRAFQGPGHQAPHVHYARLKTLRSLEATDSAFDNPDYWHSRLFPKANAQRT

SEQ ID NO: 122754 - protein, 331 aa, Artificial Sequence
  derived and/or modified sequence
MRANDALQVLGLLFSLARGSEVGNSQAVCPGTLNGLSVTGDAENQYQTLYKLYERCEVVMGNLEIVLTGHNADLSFLQWIREVTGYVLVAMNEFSTLPLPNLRVVRGTQVYDGKFAIFVMLNYNTNSSHALRQLRLTQLTEILSGGVYIEKNDKLCHMDTIDWRDIVRDRDAEIVVKDNGRSCPPCHEVCKGRCWGPGSEDCQTLTKTICAPQCNGHCFGPNPNQCCHDECAGGCSGPQDTDCFACRHFNDSGACVPRCPQPLVYNKLTFQLEPNPHTKYQYGGVCVASCPHNFVVDQTSCVRACPPDKMEVDKNGLKMCEPCGGLCPKVF

SEQ ID NO: 122755 - protein, 1283 aa, Artificial Sequence
  derived and/or modified sequence
MGNLEIVLTGHNADLSFLQWIREVTGYVLVAMNEFSTLPLPNLRVVRGTQVYDGKFAIFVMLNYNTNSSHALRQLRLTQLTEILSGGVYIEKNDKLCHMDTIDWRDIVRDRDAEIVVKDNGRSCPPCHEVCKGRCWGPGSEDCQTLTKTICAPQCNGHCFGPNPNQCCHDECAGGCSGPQDTDCFACRHFNDSGACVPRCPQPLVYNKLTFQLEPNPHTKYQYGGVCVASCPHNFVVDQTSCVRACPPDKMEVDKNGLKMCEPCGGLCPKACEGTGSGSRFQTVDSSNIDGFVNCTKILGNLDFLITGLNGDPWHKIPALDPEKLNVFRTVREITGYLNIQSWPPHMHNFSVFSNLTTIGGRSLYNRGFSLLIMKNLNVTSLGFRSLKEISAGRIYISANRQLCYHHSLNWTKVLRGPTEERLDIKHNRPRRDCVAEGKVCDPLCSSGGCWGPGPGQCLSCRNYSRGGVCVTHCNFLNGEPREFAHEAECFSCHPECQPMEGTATCNGSGSDTCAQCAHFRDGPHCVSSCPHGVLGAKGPIYKYPDVQNECRPCHENCTQGCKGPELQDCLGQTLVLIGKTHLTMALTVIAGLVVIFMMLGGTFLYWRGRRIQNKRAMRRYLERGESIEPLDPSEKANKVLARIFKETELRKLKVLGSGVFGTVHKGVWIPEGESIKIPVCIKVIEDKSGRQSFQAVTDHMLAIGSLDHAHIVRLLGLCPGSSLQLVTQYLPLGSLLDHVRQHRGALGPQLLLNWGVQIAKGMYYLEEHGMVHRNLAARNVLLKSPSQVQVADFGVADLLPPDDKQLLYSEAKTPIKWMALESIHFGKYTHQSDVWSYGVTVWELMTFGAEPYAGLRLAEVPDLLEKGERLAQPQICTIDVYMVMVKCWMIDENIRPTFKELANEFTRMARDPPRYLVIKRESGPGIAPGPEPHGLTNKKLEEVELEPELDLDLDLEAEEDNLATTTLGSALSLPVGTLNRPRGSQSLLSPSSGYMPMNQGNLGESCQESAVSGSSERCPRPVSLHPMPRGCLASESSEGHVTGSEAELQEKVSMCRSRSRSRSPRPRGDSAYHSQRHSLLTPVTPLSPPGLEEEDVNGYVMPDTHLKGTPSSREGTLSSVGLSSVLGTEEEDEDEEYEYMNRRRRHSPPHPPRPSSLEELGYEYMDVGSDLSASLGSTQSCPLHPVPIMPTAGTTPDEDYEYMNRQRDGGGPGGDYAAMGACPASEQGYEEMRAFQGPGHQAPHVHYARLKTLRSLEATDSAFDNPDYWHSRLFPKANAQRT

SEQ ID NO: 122756 - protein, 699 aa, Artificial Sequence
  derived and/or modified sequence
MALTVIAGLVVIFMMLGGTFLYWRGRRIQNKRAMRRYLERGESIEPLDPSEKANKVLARIFKETELRKLKVLGSGVFGTVHKGVWIPEGESIKIPVCIKVIEDKSGRQSFQAVTDHMLAIGSLDHAHIVRLLGLCPGSSLQLVTQYLPLGSLLDHVRQHRGALGPQLLLNWGVQIAKGMYYLEEHGMVHRNLAARNVLLKSPSQVQVADFGVADLLPPDDKQLLYSEAKTPIKWMALESIHFGKYTHQSDVWSYGVTVWELMTFGAEPYAGLRLAEVPDLLEKGERLAQPQICTIDVYMVMVKCWMIDENIRPTFKELANEFTRMARDPPRYLVIKRESGPGIAPGPEPHGLTNKKLEEVELEPELDLDLDLEAEEDNLATTTLGSALSLPVGTLNRPRGSQSLLSPSSGYMPMNQGNLGESCQESAVSGSSERCPRPVSLHPMPRGCLASESSEGHVTGSEAELQEKVSMCRSRSRSRSPRPRGDSAYHSQRHSLLTPVTPLSPPGLEEEDVNGYVMPDTHLKGTPSSREGTLSSVGLSSVLGTEEEDEDEEYEYMNRRRRHSPPHPPRPSSLEELGYEYMDVGSDLSASLGSTQSCPLHPVPIMPTAGTTPDEDYEYMNRQRDGGGPGGDYAAMGACPASEQGYEEMRAFQGPGHQAPHVHYARLKTLRSLEATDSAFDNPDYWHSRLFPKANAQRT

SEQ ID NO: 122757 - protein, 126 aa, Artificial Sequence
  derived and/or modified sequence
MRANDALQVLGLLFSLARGSEVGNSQAVCPGTLNGLSVTGDAENQYQTLYKLYERCEVVMGNLEIVLTGHNADLSFLQWIREVTGYVLVAMNEFSTLPLPNLRVVRGTQVYDGKFAIFVMLNYNTN

SEQ ID NO: 122758 - protein, 921 aa, Artificial Sequence
  derived and/or modified sequence
MRANDALQVLGLLFSLARGSEVGNSQAVCPGTLNGLSVTGDAENQYQTLYKLYERCEVVMGNLEIVLTGHNADLSFLQWIREVTGYVLVAMNEFSTLPLPNLRVVRGTQVYDGKFAIFVMLNYNTNSSHALRQLRLTQLTEILSGGVYIEKNDKLCHMDTIDWRDIVRDRDAEIVVKDNGRSCPPCHEVCKGRCWGPGSEDCQTLTKTICAPQCNGHCFGPNPNQCCHDECAGGCSGPQDTDCFACRHFNDSGACVPRCPQPLVYNKLTFQLEPNPHTKYQYGGVCVASCPHNFVVDQTSCVRACPPDKMEVDKNGLKMCEPCGGLCPKACEGTGSGSRFQTVDSSNIDGFVNCTKILGNLDFLITGLNGDPWHKIPALDPEKLNVFRTVREITGYLNIQSWPPHMHNFSVFSNLTTIGGRSLYNRGFSLLIMKNLNVTSLGFRSLKEISAGRIYISANRQLCYHHSLNWTKVLRGPTEERLDIKHNRPRRDCVAEGKVCDPLCSSGGCWGPGPGQCLSCRNYSRGGVCVTHCNFLNGEPREFAHEAECFSCHPECQPMEGTATCNGSGSDTCAQCAHFRDGPHCVSSCPHGVLGAKGPIYKYPDVQNECRPCHENCTQGCKGPELQDCLGQTLVLIGKTHLTMALTVIAGLVVIFMMLGGTFLYWRGRRIQNKRAMRRYLERGESIEPLDPSEKANKVLARIFKETELRKLKVLGSGVFGTVHKGVWIPEGESIKIPVCIKVIEDKSGRQSFQAVTDHMLAIGSLDHAHIVRLLGLCPGSSLQLVTQYLPLGSLLDHVRQHRGALGPQLLLNWGVQIAKGMYYLEEHGMVHRNLAARNVLLKSPSQVQVADFGVADLLPPDDKQLLYSEAKTPIKWMALESIHFGKYTHQSDVWSYGQCIWMPSLPSLAPVSNLPFETPS

SEQ ID NO: 122759 - DNA, 4029 bp, Artificial Sequence
  derived and/or modified sequence
atgagagccaacgacgccctgcaggtgctgggcctgctgttcagcctggccagaggcagcgaggtgggcaacagccaggccgtgtgccccggcaccctgaacggcctgagcgtgaccggcgacgccgagaaccagtaccagaccctgtacaagctgtacgagagatgcgaggtggtgatgggcaacctggagatcgtgctgaccggccacaacgccgacctgagcttcctgcagtggatcagagaggtgaccggctacgtgctggtggccatgaacgagttcagcaccctgcccctgcccaacctgagagtggtgagaggcacccaggtgtacgacggcaagttcgccatcttcgtgatgctgaactacaacaccaacagcagccacgccctgagacagctgagactgacccagctgaccgagatcctgagcggcggcgtgtacatcgagaagaacgacaagctgtgccacatggacaccatcgactggagagacatcgtgagagacagagacgccgagatcgtggtgaaggacaacggcagaagctgccccccctgccacgaggtgtgcaagggcagatgctggggccccggcagcgaggactgccagaccctgaccaagaccatctgcgccccccagtgcaacggccactgcttcggccccaaccccaaccagtgctgccacgacgagtgcgccggcggctgcagcggcccccaggacaccgactgcttcgcctgcagacacttcaacgacagcggcgcctgcgtgcccagatgcccccagcccctggtgtacaacaagctgaccttccagctggagcccaacccccacaccaagtaccagtacggcggcgtgtgcgtggccagctgcccccacaacttcgtggtggaccagaccagctgcgtgagagcctgcccccccgacaagatggaggtggacaagaacggcctgaagatgtgcgagccctgcggcggcctgtgccccaaggcctgcgagggcaccggcagcggcagcagattccagaccgtggacagcagcaacatcgacggcttcgtgaactgcaccaagatcctgggcaacctggacttcctgatcaccggcctgaacggcgacccctggcacaagatccccgccctggaccccgagaagctgaacgtgttcagaaccgtgagagagatcaccggctacctgaacatccagagctggcccccccacatgcacaacttcagcgtgttcagcaacctgaccaccatcggcggcagaagcctgtacaacagaggcttcagcctgctgatcatgaagaacctgaacgtgaccagcctgggcttcagaagcctgaaggagatcagcgccggcagaatctacatcagcgccaacagacagctgtgctaccaccacagcctgaactggaccaaggtgctgagaggccccaccgaggagagactggacatcaagcacaacagacccagaagagactgcgtggccgagggcaaggtgtgcgaccccctgtgcagcagcggcggctgctggggccccggccccggccagtgcctgagctgcagaaactacagcagaggcggcgtgtgcgtgacccactgcaacttcctgaacggcgagcccagagagttcgcccacgaggccgagtgcttcagctgccaccccgagtgccagcccatggagggcaccgccacctgcaacggcagcggcagcgacacctgcgcccagtgcgcccacttcagagacggcccccactgcgtgagcagctgcccccacggcgtgctgggcgccaagggccccatctacaagtaccccgacgtgcagaacgagtgcagaccctgccacgagaactgcacccagggctgcaagggccccgagctgcaggactgcctgggccagaccctggtgctgatcggcaagacccacctgaccatggccctgaccgtgatcgccggcctggtggtgatcttcatgatgctgggcggcaccttcctgtactggagaggcagaagaatccagaacaagagagccatgagaagatacctggagagaggcgagagcatcgagcccctggaccccagcgagaaggccaacaaggtgctggccagaatcttcaaggagaccgagctgagaaagctgaaggtgctgggcagcggcgtgttcggcaccgtgcacaagggcgtgtggatccccgagggcgagagcatcaagatccccgtgtgcatcaaggtgatcgaggacaagagcggcagacagagcttccaggccgtgaccgaccacatgctggccatcggcagcctggaccacgcccacatcgtgagactgctgggcctgtgccccggcagcagcctgcagctggtgacccagtacctgcccctgggcagcctgctggaccacgtgagacagcacagaggcgccctgggcccccagctgctgctgaactggggcgtgcagatcgccaagggcatgtactacctggaggagcacggcatggtgcacagaaacctggccgccagaaacgtgctgctgaagagccccagccaggtgcaggtggccgacttcggcgtggccgacctgctgccccccgacgacaagcagctgctgtacagcgaggccaagacccccatcaagtggatggccctggagagcatccacttcggcaagtacacccaccagagcgacgtgtggagctacggcgtgaccgtgtgggagctgatgaccttcggcgccgagccctacgccggcctgagactggccgaggtgcccgacctgctggagaagggcgagagactggcccagccccagatctgcaccatcgacgtgtacatggtgatggtgaagtgctggatgatcgacgagaacatcagacccaccttcaaggagctggccaacgagttcaccagaatggccagagacccccccagatacctggtgatcaagagagagagcggccccggcatcgcccccggccccgagccccacggcctgaccaacaagaagctggaggaggtggagctggagcccgagctggacctggacctggacctggaggccgaggaggacaacctggccaccaccaccctgggcagcgccctgagcctgcccgtgggcaccctgaacagacccagaggcagccagagcctgctgagccccagcagcggctacatgcccatgaaccagggcaacctgggcgagagctgccaggagagcgccgtgagcggcagcagcgagagatgccccagacccgtgagcctgcaccccatgcccagaggctgcctggccagcgagagcagcgagggccacgtgaccggcagcgaggccgagctgcaggagaaggtgagcatgtgcagaagcagaagcagaagcagaagccccagacccagaggcgacagcgcctaccacagccagagacacagcctgctgacccccgtgacccccctgagcccccccggcctggaggaggaggacgtgaacggctacgtgatgcccgacacccacctgaagggcacccccagcagcagagagggcaccctgagcagcgtgggcctgagcagcgtgctgggcaccgaggaggaggacgaggacgaggagtacgagtacatgaacagaagaagaagacacagccccccccacccccccagacccagcagcctggaggagctgggctacgagtacatggacgtgggcagcgacctgagcgccagcctgggcagcacccagagctgccccctgcaccccgtgcccatcatgcccaccgccggcaccacccccgacgaggactacgagtacatgaacagacagagagacggcggcggccccggcggcgactacgccgccatgggcgcctgccccgccagcgagcagggctacgaggagatgagagccttccagggccccggccaccaggccccccacgtgcactacgccagactgaagaccctgagaagcctggaggccaccgacagcgccttcgacaaccccgactactggcacagcagactgttccccaaggccaacgcccagagaacctag

SEQ ID NO: 122760 - DNA, 996 bp, Artificial Sequence
  derived and/or modified sequence
atgagagccaacgacgccctgcaggtgctgggcctgctgttcagcctggccagaggcagcgaggtgggcaacagccaggccgtgtgccccggcaccctgaacggcctgagcgtgaccggcgacgccgagaaccagtaccagaccctgtacaagctgtacgagagatgcgaggtggtgatgggcaacctggagatcgtgctgaccggccacaacgccgacctgagcttcctgcagtggatcagagaggtgaccggctacgtgctggtggccatgaacgagttcagcaccctgcccctgcccaacctgagagtggtgagaggcacccaggtgtacgacggcaagttcgccatcttcgtgatgctgaactacaacaccaacagcagccacgccctgagacagctgagactgacccagctgaccgagatcctgagcggcggcgtgtacatcgagaagaacgacaagctgtgccacatggacaccatcgactggagagacatcgtgagagacagagacgccgagatcgtggtgaaggacaacggcagaagctgccccccctgccacgaggtgtgcaagggcagatgctggggccccggcagcgaggactgccagaccctgaccaagaccatctgcgccccccagtgcaacggccactgcttcggccccaaccccaaccagtgctgccacgacgagtgcgccggcggctgcagcggcccccaggacaccgactgcttcgcctgcagacacttcaacgacagcggcgcctgcgtgcccagatgcccccagcccctggtgtacaacaagctgaccttccagctggagcccaacccccacaccaagtaccagtacggcggcgtgtgcgtggccagctgcccccacaacttcgtggtggaccagaccagctgcgtgagagcctgcccccccgacaagatggaggtggacaagaacggcctgaagatgtgcgagccctgcggcggcctgtgccccaaggtgttctag

SEQ ID NO: 122761 - DNA, 3852 bp, Artificial Sequence
  derived and/or modified sequence
atgggcaacctggagatcgtgctgaccggccacaacgccgacctgagcttcctgcagtggatcagagaggtgaccggctacgtgctggtggccatgaacgagttcagcaccctgcccctgcccaacctgagagtggtgagaggcacccaggtgtacgacggcaagttcgccatcttcgtgatgctgaactacaacaccaacagcagccacgccctgagacagctgagactgacccagctgaccgagatcctgagcggcggcgtgtacatcgagaagaacgacaagctgtgccacatggacaccatcgactggagagacatcgtgagagacagagacgccgagatcgtggtgaaggacaacggcagaagctgccccccctgccacgaggtgtgcaagggcagatgctggggccccggcagcgaggactgccagaccctgaccaagaccatctgcgccccccagtgcaacggccactgcttcggccccaaccccaaccagtgctgccacgacgagtgcgccggcggctgcagcggcccccaggacaccgactgcttcgcctgcagacacttcaacgacagcggcgcctgcgtgcccagatgcccccagcccctggtgtacaacaagctgaccttccagctggagcccaacccccacaccaagtaccagtacggcggcgtgtgcgtggccagctgcccccacaacttcgtggtggaccagaccagctgcgtgagagcctgcccccccgacaagatggaggtggacaagaacggcctgaagatgtgcgagccctgcggcggcctgtgccccaaggcctgcgagggcaccggcagcggcagcagattccagaccgtggacagcagcaacatcgacggcttcgtgaactgcaccaagatcctgggcaacctggacttcctgatcaccggcctgaacggcgacccctggcacaagatccccgccctggaccccgagaagctgaacgtgttcagaaccgtgagagagatcaccggctacctgaacatccagagctggcccccccacatgcacaacttcagcgtgttcagcaacctgaccaccatcggcggcagaagcctgtacaacagaggcttcagcctgctgatcatgaagaacctgaacgtgaccagcctgggcttcagaagcctgaaggagatcagcgccggcagaatctacatcagcgccaacagacagctgtgctaccaccacagcctgaactggaccaaggtgctgagaggccccaccgaggagagactggacatcaagcacaacagacccagaagagactgcgtggccgagggcaaggtgtgcgaccccctgtgcagcagcggcggctgctggggccccggccccggccagtgcctgagctgcagaaactacagcagaggcggcgtgtgcgtgacccactgcaacttcctgaacggcgagcccagagagttcgcccacgaggccgagtgcttcagctgccaccccgagtgccagcccatggagggcaccgccacctgcaacggcagcggcagcgacacctgcgcccagtgcgcccacttcagagacggcccccactgcgtgagcagctgcccccacggcgtgctgggcgccaagggccccatctacaagtaccccgacgtgcagaacgagtgcagaccctgccacgagaactgcacccagggctgcaagggccccgagctgcaggactgcctgggccagaccctggtgctgatcggcaagacccacctgaccatggccctgaccgtgatcgccggcctggtggtgatcttcatgatgctgggcggcaccttcctgtactggagaggcagaagaatccagaacaagagagccatgagaagatacctggagagaggcgagagcatcgagcccctggaccccagcgagaaggccaacaaggtgctggccagaatcttcaaggagaccgagctgagaaagctgaaggtgctgggcagcggcgtgttcggcaccgtgcacaagggcgtgtggatccccgagggcgagagcatcaagatccccgtgtgcatcaaggtgatcgaggacaagagcggcagacagagcttccaggccgtgaccgaccacatgctggccatcggcagcctggaccacgcccacatcgtgagactgctgggcctgtgccccggcagcagcctgcagctggtgacccagtacctgcccctgggcagcctgctggaccacgtgagacagcacagaggcgccctgggcccccagctgctgctgaactggggcgtgcagatcgccaagggcatgtactacctggaggagcacggcatggtgcacagaaacctggccgccagaaacgtgctgctgaagagccccagccaggtgcaggtggccgacttcggcgtggccgacctgctgccccccgacgacaagcagctgctgtacagcgaggccaagacccccatcaagtggatggccctggagagcatccacttcggcaagtacacccaccagagcgacgtgtggagctacggcgtgaccgtgtgggagctgatgaccttcggcgccgagccctacgccggcctgagactggccgaggtgcccgacctgctggagaagggcgagagactggcccagccccagatctgcaccatcgacgtgtacatggtgatggtgaagtgctggatgatcgacgagaacatcagacccaccttcaaggagctggccaacgagttcaccagaatggccagagacccccccagatacctggtgatcaagagagagagcggccccggcatcgcccccggccccgagccccacggcctgaccaacaagaagctggaggaggtggagctggagcccgagctggacctggacctggacctggaggccgaggaggacaacctggccaccaccaccctgggcagcgccctgagcctgcccgtgggcaccctgaacagacccagaggcagccagagcctgctgagccccagcagcggctacatgcccatgaaccagggcaacctgggcgagagctgccaggagagcgccgtgagcggcagcagcgagagatgccccagacccgtgagcctgcaccccatgcccagaggctgcctggccagcgagagcagcgagggccacgtgaccggcagcgaggccgagctgcaggagaaggtgagcatgtgcagaagcagaagcagaagcagaagccccagacccagaggcgacagcgcctaccacagccagagacacagcctgctgacccccgtgacccccctgagcccccccggcctggaggaggaggacgtgaacggctacgtgatgcccgacacccacctgaagggcacccccagcagcagagagggcaccctgagcagcgtgggcctgagcagcgtgctgggcaccgaggaggaggacgaggacgaggagtacgagtacatgaacagaagaagaagacacagccccccccacccccccagacccagcagcctggaggagctgggctacgagtacatggacgtgggcagcgacctgagcgccagcctgggcagcacccagagctgccccctgcaccccgtgcccatcatgcccaccgccggcaccacccccgacgaggactacgagtacatgaacagacagagagacggcggcggccccggcggcgactacgccgccatgggcgcctgccccgccagcgagcagggctacgaggagatgagagccttccagggccccggccaccaggccccccacgtgcactacgccagactgaagaccctgagaagcctggaggccaccgacagcgccttcgacaaccccgactactggcacagcagactgttccccaaggccaacgcccagagaacctag

SEQ ID NO: 122762 - DNA, 2100 bp, Artificial Sequence
  derived and/or modified sequence
atggccctgaccgtgatcgccggcctggtggtgatcttcatgatgctgggcggcaccttcctgtactggagaggcagaagaatccagaacaagagagccatgagaagatacctggagagaggcgagagcatcgagcccctggaccccagcgagaaggccaacaaggtgctggccagaatcttcaaggagaccgagctgagaaagctgaaggtgctgggcagcggcgtgttcggcaccgtgcacaagggcgtgtggatccccgagggcgagagcatcaagatccccgtgtgcatcaaggtgatcgaggacaagagcggcagacagagcttccaggccgtgaccgaccacatgctggccatcggcagcctggaccacgcccacatcgtgagactgctgggcctgtgccccggcagcagcctgcagctggtgacccagtacctgcccctgggcagcctgctggaccacgtgagacagcacagaggcgccctgggcccccagctgctgctgaactggggcgtgcagatcgccaagggcatgtactacctggaggagcacggcatggtgcacagaaacctggccgccagaaacgtgctgctgaagagccccagccaggtgcaggtggccgacttcggcgtggccgacctgctgccccccgacgacaagcagctgctgtacagcgaggccaagacccccatcaagtggatggccctggagagcatccacttcggcaagtacacccaccagagcgacgtgtggagctacggcgtgaccgtgtgggagctgatgaccttcggcgccgagccctacgccggcctgagactggccgaggtgcccgacctgctggagaagggcgagagactggcccagccccagatctgcaccatcgacgtgtacatggtgatggtgaagtgctggatgatcgacgagaacatcagacccaccttcaaggagctggccaacgagttcaccagaatggccagagacccccccagatacctggtgatcaagagagagagcggccccggcatcgcccccggccccgagccccacggcctgaccaacaagaagctggaggaggtggagctggagcccgagctggacctggacctggacctggaggccgaggaggacaacctggccaccaccaccctgggcagcgccctgagcctgcccgtgggcaccctgaacagacccagaggcagccagagcctgctgagccccagcagcggctacatgcccatgaaccagggcaacctgggcgagagctgccaggagagcgccgtgagcggcagcagcgagagatgccccagacccgtgagcctgcaccccatgcccagaggctgcctggccagcgagagcagcgagggccacgtgaccggcagcgaggccgagctgcaggagaaggtgagcatgtgcagaagcagaagcagaagcagaagccccagacccagaggcgacagcgcctaccacagccagagacacagcctgctgacccccgtgacccccctgagcccccccggcctggaggaggaggacgtgaacggctacgtgatgcccgacacccacctgaagggcacccccagcagcagagagggcaccctgagcagcgtgggcctgagcagcgtgctgggcaccgaggaggaggacgaggacgaggagtacgagtacatgaacagaagaagaagacacagccccccccacccccccagacccagcagcctggaggagctgggctacgagtacatggacgtgggcagcgacctgagcgccagcctgggcagcacccagagctgccccctgcaccccgtgcccatcatgcccaccgccggcaccacccccgacgaggactacgagtacatgaacagacagagagacggcggcggccccggcggcgactacgccgccatgggcgcctgccccgccagcgagcagggctacgaggagatgagagccttccagggccccggccaccaggccccccacgtgcactacgccagactgaagaccctgagaagcctggaggccaccgacagcgccttcgacaaccccgactactggcacagcagactgttccccaaggccaacgcccagagaacctag

SEQ ID NO: 122763 - DNA, 2766 bp, Artificial Sequence
  derived and/or modified sequence
atgagagccaacgacgccctgcaggtgctgggcctgctgttcagcctggccagaggcagcgaggtgggcaacagccaggccgtgtgccccggcaccctgaacggcctgagcgtgaccggcgacgccgagaaccagtaccagaccctgtacaagctgtacgagagatgcgaggtggtgatgggcaacctggagatcgtgctgaccggccacaacgccgacctgagcttcctgcagtggatcagagaggtgaccggctacgtgctggtggccatgaacgagttcagcaccctgcccctgcccaacctgagagtggtgagaggcacccaggtgtacgacggcaagttcgccatcttcgtgatgctgaactacaacaccaacagcagccacgccctgagacagctgagactgacccagctgaccgagatcctgagcggcggcgtgtacatcgagaagaacgacaagctgtgccacatggacaccatcgactggagagacatcgtgagagacagagacgccgagatcgtggtgaaggacaacggcagaagctgccccccctgccacgaggtgtgcaagggcagatgctggggccccggcagcgaggactgccagaccctgaccaagaccatctgcgccccccagtgcaacggccactgcttcggccccaaccccaaccagtgctgccacgacgagtgcgccggcggctgcagcggcccccaggacaccgactgcttcgcctgcagacacttcaacgacagcggcgcctgcgtgcccagatgcccccagcccctggtgtacaacaagctgaccttccagctggagcccaacccccacaccaagtaccagtacggcggcgtgtgcgtggccagctgcccccacaacttcgtggtggaccagaccagctgcgtgagagcctgcccccccgacaagatggaggtggacaagaacggcctgaagatgtgcgagccctgcggcggcctgtgccccaaggcctgcgagggcaccggcagcggcagcagattccagaccgtggacagcagcaacatcgacggcttcgtgaactgcaccaagatcctgggcaacctggacttcctgatcaccggcctgaacggcgacccctggcacaagatccccgccctggaccccgagaagctgaacgtgttcagaaccgtgagagagatcaccggctacctgaacatccagagctggcccccccacatgcacaacttcagcgtgttcagcaacctgaccaccatcggcggcagaagcctgtacaacagaggcttcagcctgctgatcatgaagaacctgaacgtgaccagcctgggcttcagaagcctgaaggagatcagcgccggcagaatctacatcagcgccaacagacagctgtgctaccaccacagcctgaactggaccaaggtgctgagaggccccaccgaggagagactggacatcaagcacaacagacccagaagagactgcgtggccgagggcaaggtgtgcgaccccctgtgcagcagcggcggctgctggggccccggccccggccagtgcctgagctgcagaaactacagcagaggcggcgtgtgcgtgacccactgcaacttcctgaacggcgagcccagagagttcgcccacgaggccgagtgcttcagctgccaccccgagtgccagcccatggagggcaccgccacctgcaacggcagcggcagcgacacctgcgcccagtgcgcccacttcagagacggcccccactgcgtgagcagctgcccccacggcgtgctgggcgccaagggccccatctacaagtaccccgacgtgcagaacgagtgcagaccctgccacgagaactgcacccagggctgcaagggccccgagctgcaggactgcctgggccagaccctggtgctgatcggcaagacccacctgaccatggccctgaccgtgatcgccggcctggtggtgatcttcatgatgctgggcggcaccttcctgtactggagaggcagaagaatccagaacaagagagccatgagaagatacctggagagaggcgagagcatcgagcccctggaccccagcgagaaggccaacaaggtgctggccagaatcttcaaggagaccgagctgagaaagctgaaggtgctgggcagcggcgtgttcggcaccgtgcacaagggcgtgtggatccccgagggcgagagcatcaagatccccgtgtgcatcaaggtgatcgaggacaagagcggcagacagagcttccaggccgtgaccgaccacatgctggccatcggcagcctggaccacgcccacatcgtgagactgctgggcctgtgccccggcagcagcctgcagctggtgacccagtacctgcccctgggcagcctgctggaccacgtgagacagcacagaggcgccctgggcccccagctgctgctgaactggggcgtgcagatcgccaagggcatgtactacctggaggagcacggcatggtgcacagaaacctggccgccagaaacgtgctgctgaagagccccagccaggtgcaggtggccgacttcggcgtggccgacctgctgccccccgacgacaagcagctgctgtacagcgaggccaagacccccatcaagtggatggccctggagagcatccacttcggcaagtacacccaccagagcgacgtgtggagctacggccagtgcatctggatgcccagcctgcccagcctggcccccgtgagcaacctgcccttcgagacccccagctag

SEQ ID NO: 122764 - DNA, 4029 bp, Artificial Sequence
  derived and/or modified sequence
atgagggccaacgatgccctccaggtccttgggcttcttttttctcttgccaggggctcagaggtcgggaattcacaggccgtttgcccaggaaccctgaacgggttgtccgtgacgggagacgccgagaaccagtatcagactctatacaaactttacgaaaggtgtgaagttgtgatgggaaacctggagatcgtgctgaccgggcataatgctgacttgtccttcctgcagtggattcgggaggtcactgggtacgtactggttgctatgaacgaattctccacactaccgcttccgaacctgagagtcgtacgggggactcaggtttacgacggtaaatttgcaatcttcgtgatgctgaactataatactaacagcagtcatgcgctgaggcaattgcggctgacccagctgacggagattctttctggcggagtgtacatcgagaaaaatgacaagctatgccacatggatactattgactggagggatattgtgagggaccgtgatgcagagattgtggtgaaagacaacggcaggtcttgccccccttgtcacgaggtctgcaaggggagatgttggggcccgggctccgaagactgtcagactttgacaaaaaccatatgtgcaccacaatgcaacggtcattgcttcggccccaaccctaaccagtgttgccacgacgaatgcgctggtggctgctctgggcctcaagataccgactgctttgcctgccgccactttaatgactcaggcgcgtgtgtgcctaggtgtccccagccccttgtgtacaacaagttgacttttcaacttgaacccaatcctcacacaaaataccagtacgggggagtgtgcgtggcttcttgtcctcacaacttcgtggtagatcaaacttcctgcgtacgcgcctgcccccctgacaagatggaggtggataagaacggattgaaaatgtgtgaaccctgcgggggtctctgccccaaggcgtgcgaagggacggggtccgggtccagattccaaacagtagattcctccaatatcgacggattcgttaactgcaccaagatcctgggcaacttagactttctcatcaccgggttaaatggggatccctggcacaaaatccccgccctagaccccgagaagctgaacgtgtttcggacggtccgggagatcaccggttacttgaacatccagtcttggcccccccatatgcacaacttctcagtcttctctaacctaaccaccatcggtggccggagcctttacaatcgagggttttccttgcttattatgaaaaacctgaatgttacatctctggggttccggagcctgaaagaaatcagcgccgggagaatctatattagtgctaaccggcaattgtgctaccatcactcgctgaactggacaaaggtgctgagggggcctacggaagagcgattagatatcaagcacaatcgaccacggagggactgtgtagcagaaggaaaggtgtgtgatcctctgtgttcctcaggcgggtgttggggaccaggacctggccagtgcttgagttgtcggaactatagccggggtggggtgtgtgtgacacactgcaactttctgaatggggaaccaagagagtttgctcacgaagccgagtgcttttcctgccacccagagtgtcaaccgatggaagggactgccacttgcaatggtagtggcagcgatacttgcgcacagtgcgcacacttccgagatggtccacactgcgtgtcctcttgcccccatggagtgttgggcgctaaggggcccatttataagtaccccgacgtccagaatgagtgccgtccatgtcacgagaattgtacgcagggctgcaagggacctgagctccaggactgtcttggtcagaccctggtcctgattggcaagacccacttgaccatggctctcaccgttattgccgggctggtggtaatattcatgatgctcggcggtaccttcctgtattggcgaggacgccgcatacagaataaaagggccatgcgccggtatttggagcgcggcgagtccatcgaacctctcgatcccagtgagaaggctaataaggtactagcccggattttcaaagagacagagctgaggaagttgaaagttcttggatccggcgttttcgggacagttcacaaaggcgtttggatccccgaaggcgaatctataaagattccggtgtgtattaaagtcatagaggacaagagcggtcgccagtcttttcaagccgtcaccgatcacatgctcgcaatagggtctctggatcatgctcacatcgttcgtctgctgggattgtgccctggctccagtctccagctggtgactcagtacttacccctcggctccctactggaccacgtgcgacagcaccgcggcgcactggggccccagcttctgttgaattggggcgtgcagatcgccaagggcatgtattatctcgaagaacatgggatggttcacaggaatctggctgcgaggaatgtgctgttaaagtcaccgagtcaggtccaggtggctgacttcggcgtcgccgatctgttaccacccgacgataaacagctcctgtactcagaagcgaagacgccaatcaagtggatggctcttgaatctatccattttggaaaatacacgcatcagagcgacgtgtggtcctacggtgtcactgtatgggagcttatgacatttggagctgagccgtacgccggcttgaggctggctgaggtccccgatctgctggaaaagggagaacggctggcccagccacagatctgcactatcgacgtctacatggtgatggtaaagtgctggatgatcgacgagaacataagacctactttcaaggaactggcaaacgagttcacaaggatggccagggatcctccacggtatctcgttatcaaacgcgaaagcggacccggtatagccccaggccctgaaccgcatggcctcactaataagaagctggaggaagttgaactggaacctgaactggacctggacctcgatttagaagctgaagaagataacctggccacgaccacgctcggctccgctctgtccctgccagtcgggacactgaataggccacgcggttcacagagtcttctcagcccctcttctgggtacatgccgatgaaccagggtaacctcggcgaatcttgtcaggagtctgcagtgtctggatcatccgagcggtgtcctcggccagtgtcattgcacccaatgccaagagggtgcctggcaagcgagagctctgagggccacgtgactgggtccgaagcagagctccaagaaaaggtgagtatgtgtcgctcacgatctaggagtaggagccccagaccccgcggggacagcgcttaccatagtcaaagacactctctgctgacacctgtcacacctttgtctcctcctggtctggaagaggaagacgtgaatggttatgtcatgcccgatacccacctcaaggggactccatctagccgggaaggaactctgtcctccgtgggcctgagcagcgtgctgggcaccgaggaagaagacgaggacgaagagtacgagtatatgaatcgacgtcgacgccatagtcccccccatcctccgcgcccatcaagcttagaagaacttggttatgagtatatggatgttggatctgacctgagtgcgagcttaggaagtacacagagttgccccctacatccagtgccaatcatgccaaccgcaggtaccactcctgacgaagattatgaatatatgaacaggcagcgcgatggagggggccccggaggagactatgctgcgatgggggcatgccctgccagtgaacagggatacgaggaaatgagggcgttccaaggccccggccaccaggctccccacgtgcactacgccaggcttaaaactttgaggagccttgaagcaaccgattctgctttcgacaatcctgattattggcactctagattatttcccaaagccaacgctcagcgtacttag

SEQ ID NO: 122765 - DNA, 996 bp, Artificial Sequence
  derived and/or modified sequence
atgcgcgctaacgacgccctccaggtccttggcttgctattctccttagcccgcggtagtgaggtgggcaacagccaggctgtatgcccggggaccctcaatggactgtccgtgaccggagatgccgagaatcaatatcagaccttatacaagttatacgaacgttgtgaagtggtgatggggaatctggagattgttctgacaggtcacaatgcagacctttcttttctgcagtggattagggaggtgactggttacgtgctggtggccatgaatgagttctccacactgccactgccgaatctgagagtggtacgcggaacgcaggtgtatgatggcaagttcgctatcttcgtcatgctaaattataataccaattcttcacacgccctgcgacagctccgcctcacccagctgactgaaattctgtctggcggagtgtatatcgaaaagaatgataaactgtgccatatggataccattgattggagagatatcgtgcgtgaccgggacgccgaaattgtggtcaaggacaacggccggtcgtgtccaccatgtcatgaggtgtgcaagggtcgatgctgggggcctggtagcgaagattgtcagactctgaccaaaactatatgcgcgccgcagtgcaacggacactgttttggtcctaatccaaaccagtgctgccacgacgaatgtgcaggagggtgtagcgggccacaggatacagactgtttcgcatgtaggcactttaacgactctggggcgtgtgtccccagatgcccgcagcccctcgtctataataaactcacattccagcttgaacctaatccacataccaaataccagtacggtggagtgtgcgtcgcgtcctgcccccataattttgtggtcgatcaaacgtcttgcgtgcgcgcttgtccacccgacaagatggaggttgacaaaaacgggcttaaaatgtgcgagccctgcggtgggctttgccccaaggttttctag

SEQ ID NO: 122766 - DNA, 3852 bp, Artificial Sequence
  derived and/or modified sequence
atgggcaatctggagatcgtgctcacaggacacaatgccgacctgagctttctgcagtggatcagagaggtaactggatacgtactcgtcgctatgaacgaatttagtacactccccttacctaatctgcgagtagttaggggcactcaggtatacgacggaaaatttgcaatttttgtcatgctaaattataataccaactcaagccacgctctgcgacagctgcgcttaacccagcttacagaaattctgtccggcggtgtgtacattgagaaaaacgacaaattatgtcacatggacacaatcgactggcgcgacattgtcagggacagggatgctgagatcgttgttaaagataatggccgaagttgtccgccgtgccacgaagtgtgtaagggcaggtgttggggtcccggttctgaggattgccagaccctgacaaagacaatttgcgccccacagtgcaatgggcactgctttggccctaatcccaaccagtgctgtcacgatgagtgcgccggtggctgttccggcccccaggacacggattgcttcgcctgtagacacttcaatgacagcggcgcctgcgtaccacgatgcccacagcccctggtctataataagctcacctttcaactggaacctaaccctcatactaagtatcaatacgggggggtttgtgtggcatcttgcccccataacttcgtggtggaccagacttcatgtgttcgggcttgtccgcctgataagatggaagtggacaaaaatggcctcaagatgtgcgagccttgtgggggactgtgtcccaaagcctgtgaagggacgggctctggctccagatttcagactgtggacagcagtaacatagacggctttgtcaactgtactaagattttggggaatttggactttttgatcaccggcctcaacggagatccgtggcataaaattcccgcactggatcccgaaaaattaaatgtttttcgaacagtgagggagatcactggttatcttaatatccaatcctggccacctcatatgcacaacttttcagtcttttctaatctgacgaccattggtgggaggtcgctgtacaatagggggttcagcctgctgattatgaaaaatctcaacgtcactagcctgggatttagatctctcaaggagataagcgccggacggatctacattagcgcgaaccgacagttgtgttatcaccattctttgaattggacgaaggtgcttcgaggtccaacggaagaacgtctcgacatcaaacacaatcgaccacgccgcgactgtgtagccgaaggcaaagtctgtgaccctctgtgttcttctggcgggtgctggggacccggtcccgggcagtgcttaagttgtaggaactactcgagaggcggggtgtgcgtgacccattgtaactttcttaacggagagcctagggaatttgcacacgaggcagagtgtttctcttgccatcccgagtgccaacctatggaaggcacagcgacttgcaacggttccggctcggatacctgcgcccagtgcgcgcatttccgggacggtcctcactgtgtgtcctcttgtccacacggagtgctcggtgcaaaaggacccatttataaataccccgacgtgcagaatgagtgtcggccctgccacgagaattgcacacaggggtgcaaggggccggaactccaggactgtctgggacagactttggtgttgataggtaagacccacctcacaatggccttgactgttatcgctggattggtggtgatctttatgatgctaggagggacgttcttatactggcgtgggcgccgcatccaaaacaagcgtgccatgcggcgctatctagaaagaggggagtctattgagcctctggatccttccgagaaggctaacaaagtgttggcgagaatctttaaagagaccgagcttaggaagctaaaggttcttggttccggggtgtttggtaccgtgcacaaaggggtctggattcccgagggcgagtctatcaagatccccgtgtgcatcaaggtgatcgaagacaagtcgggtaggcagtcatttcaggcggtgaccgaccatatgctggccatagggtcattggaccacgcgcatattgtaaggttgttaggcctgtgccctggttccagcctacagctagttactcagtatctgccactgggaagtctcctggatcatgtacgccagcaccgcggagctcttggacctcagctgcttctaaattggggcgtacagattgcgaaggggatgtactatttggaggagcatggaatggtacatcggaacctcgcagccaggaatgtgctgctaaaatccccttctcaagtacaagtggcggacttcggggttgcagacctgttgccgcctgacgacaagcagttgctgtatagcgaggcaaagacgccgatcaagtggatggccttggaatccatacacttcgggaagtacacgcatcaaagcgacgtgtggtcctacggggtcaccgtttgggaacttatgactttcggggctgaaccttatgccggcctgcgactcgctgaagtcccagatctgctggagaagggagaacgtctagctcagccccagatttgcactatcgacgtctacatggtgatggtgaagtgttggatgattgacgaaaatattagacctacctttaaggaactcgctaacgagttcacacggatggcgcgggatcccccccggtacttagtgataaaaagggagagtggaccaggcatagctccagggcctgagccacacggactcactaacaagaagctggaagaagtggaactggagcccgaactggacctagatctcgacttggaggccgaagaggacaacctcgctactacgacactgggatcagccctgtctctgcctgttggtacgctgaaccgaccgagggggtcgcagagtctcctgtcaccctcaagtggctatatgcccatgaaccagggcaacctgggcgagtcttgccaggagtccgcggtctccggatctagcgagcgctgtccaaggccagtgtcccttcaccccatgccgagaggttgtctagccagcgagagcagcgagggccacgtgaccgggagcgaggcagagctccaggagaaggtcagcatgtgcagaagcagaagtcgatcccggtccccaaggcccagaggcgattccgcatatcattcccagaggcactcactgttgacgcctgtcacaccgctgtcccctcccggcttggaggaggaggatgttaatggctacgtcatgccagacacccacctcaagggcaccccaagctccagggagggcactctctcttcagtgggactgagtagtgttctaggtaccgaggaggaggacgaagatgaagagtacgaatacatgaacagacgaagacgccattccccaccacatcctccaaggccaagctctctggaagaacttggatatgagtatatggacgtaggcagtgacctctctgccagcttgggaagcacccaatcctgccctctgcaccctgtgcccataatgcccaccgcggggaccacgcctgacgaagattacgaatatatgaacaggcagcgcgacgggggaggcccggggggagattatgctgcaatgggtgcatgccctgctagcgagcagggttacgaggaaatgcgagcctttcagggaccagggcatcaggctcctcacgttcactacgctcggctgaagacactacgatcactggaggccacagatagcgcttttgataaccccgattactggcattctcgcctcttcccaaaagcaaacgcccaacgtacctag

SEQ ID NO: 122767 - DNA, 2100 bp, Artificial Sequence
  derived and/or modified sequence
atggcactgacagtcatcgccggcctggtggtgatattcatgatgttgggcgggaccttcttgtactggcgtggaaggcggattcagaacaagcgcgccatgagacggtatttagaacggggcgagtcaattgaaccactggacccttcggagaaggccaacaaggtactagcaagaatttttaaagaaacagagctgcggaagctgaaggtcctgggatcaggagttttcggcaccgtgcacaaaggggtgtggataccagagggggagtccattaagatcccagtatgtataaaggttatcgaggacaaatcaggtcgtcaatctttccaggccgtgaccgatcacatgttggctattggtagtttagaccacgctcatattgtgcggcttctgggcctttgcccgggctcctcattacagctcgttacccaatacctcccactaggtagcctgttggaccatgttagacagcaccgcggggccctgggaccacagctcctccttaattggggcgtgcagatcgcaaaaggcatgtactatcttgaggagcatgggatggtgcatcggaatctggcggcaagaaacgtcctgcttaaatcccccagtcaggtgcaggtagcagattttggcgtggccgatttactgcctcctgacgataagcaattgctgtattctgaagcaaaaacgcccataaaatggatggccttagagtcaatccactttgggaaatacacccatcagtctgatgtgtggagctatggcgtcacggtttgggagctgatgacctttggcgctgaaccctatgcaggactccgtctggccgaggtacctgacctcctcgaaaaaggcgagagactcgctcaaccacagatttgcacaattgacgtctacatggtcatggtaaaatgttggatgatcgatgagaatattagacctacctttaaggagttggctaacgagtttacccgcatggcacgggatcccccgcggtacctcgtgataaaaagggagtccgggccagggattgcccctggaccagagccccatggcctgactaataaaaagctcgaagaagtcgaactggagccggaactcgatctcgatctggatcttgaagcggaggaggacaacctggcaaccactaccctcggctccgccctatctttgcccgtcggaaccctgaataggccccgagggtcgcagagccttcttagcccatcatctggctatatgcctatgaatcaggggaacctcggagagtcatgccaggagagtgcggtgtccggtagctctgaacgctgcccacgccccgttagcctgcacccaatgccaagaggatgcctcgcaagcgagtcctctgagggacacgtgacggggtcagaagctgagctgcaggagaaagtctctatgtgcaggtcaaggagtcgcagcaggagtccccggcctagaggagacagcgcttaccacagccagcgccacagtctcttgacaccagtgactcccctgagcccccccggactagaggaagaggacgtgaatgggtatgtgatgccagatacgcacctcaaggggaccccctctagtagagaaggcactctgagctccgtgggtctctccagtgtactaggaacagaagaagaggacgaggacgaggaatacgagtatatgaaccgccgcagaaggcactctccacctcatccacctagaccctctagcctggaggagctggggtatgagtacatggacgtggggtctgatctgtctgcctccttgggcagtacgcaatcgtgtcccctccatccagtgcccattatgcccactgccggcactacgcctgatgaagattacgagtacatgaatcgacagcgggacggcggcgggccaggaggagactatgccgctatgggagcatgcccagcctcggagcaaggctatgaggagatgcgtgcctttcagggtccagggcatcaagctccccacgtgcattacgcgcggttaaaaacattgaggagccttgaggcaaccgacagcgcttttgataatcccgattattggcacagccgactctttccaaaggccaacgctcagaggacttag

SEQ ID NO: 122768 - DNA, 2766 bp, Artificial Sequence
  derived and/or modified sequence
atgcgagctaatgatgccctccaggtgctcggcctcctgttctctctggctcgaggctccgaagtgggcaactcccaggcagtctgccctggcacccttaatgggttgagcgtcaccggagatgccgagaatcaataccagaccctttacaaactatatgagaggtgcgaggtggtgatgggtaacctggagattgtccttactggacacaatgctgatctgtcctttctccagtggattcgcgaagtgaccggatatgtcctcgtagccatgaatgaattctctaccctacccctgcctaatttacgcgtggtgcggggcacccaggtgtatgacgggaaattcgcaatctttgtgatgctgaactataacacaaacagtagccatgccctccgtcaacttcggttgacacagctcaccgaaattctgtcgggtggcgtgtacatcgagaaaaatgataaactgtgtcacatggacactattgattggcgcgacattgtccgcgacagagacgccgagatcgtggttaaagacaacggacgtagctgccctccatgccatgaggtgtgtaagggaagatgctgggggcccggatccgaggactgccagacactcacaaaaactatttgcgcaccacagtgtaacggccactgctttgggcccaatcctaatcagtgttgccatgatgagtgtgccggagggtgctctggccctcaggacacagactgcttcgcgtgccggcacttcaacgatagcggggcctgtgtaccccggtgcccccagccattggtttacaataagcttacctttcagctcgaaccaaatccccacacaaaataccaatatggaggcgtttgtgtggctagttgtccccataatttcgtagtggatcagacctcctgtgtgagagcatgcccacctgataaaatggaagtcgataagaatgggcttaaaatgtgtgaaccctgcgggggcctctgtccgaaggcatgcgaggggactgggtcaggatcccgttttcaaacagtcgacagcagtaatatcgacggcttcgtaaactgcactaagatccttggaaatctcgactttctgataaccggactcaacggagacccttggcacaagatcccagccttagatcccgagaaactgaacgtatttaggactgtaagggaaataacaggttatctgaatatacagtcctggcccccacatatgcacaacttttcagttttcagtaatcttactacaattggaggccggtccctgtacaaccgcggattctctttgctgattatgaagaacctgaacgtgactagtctggggtttagatctctgaaagagatcagtgccggccgcatatacatctccgccaatagacagctctgctaccaccattccctcaactggaccaaggtgcttaggggcccaaccgaagaaagactcgatattaagcacaacaggccccgccgcgactgtgtggcagagggaaaggtgtgtgatcccctttgctccagcggcggttgctggggtccagggcccggacagtgcctgagttgtcgcaactacagtagaggcggagtgtgcgtgactcattgcaactttcttaatggcgaaccgcgcgaatttgcccatgaagctgagtgcttttcttgccatcctgagtgtcaacctatggaagggaccgccacctgtaacggatcaggcagcgatacctgcgcccagtgcgcacacttcagggacggtcctcattgtgtgagctcgtgtcctcacggagtcttgggtgcaaaagggcctatctacaagtacccagacgtgcaaaatgaatgcagaccctgtcatgagaattgtacgcaggggtgcaaggggccagaacttcaggattgtctcggacaaacgctggtgctcattggtaagacgcacttgaccatggccctgaccgtaattgcaggcttggtggtaatctttatgatgctgggcggcacattcctgtattggagaggaagacgaatccagaacaagcgcgctatgaggcggtacctggagaggggagaatccattgagccactggacccctcagagaaagcaaacaaggtcctcgctaggatattcaaggagactgagctgagaaagttgaaagtgcttggcagcggagtcttcggcaccgtgcacaaaggggtttggatacctgaaggtgagtcaatcaagattcctgtttgtattaaggtgattgaggacaagtctgggagacagtccttccaggcggtgacggatcacatgctagcaataggatctctggaccacgctcatattgtgaggctattaggactgtgtcccggctcaagtctccaactggtaactcagtacttgcctttggggtcccttttggaccatgttagacagcaccgcggcgctctggggccacagctccttctgaactggggtgtgcaaatcgctaagggcatgtattatctggaggagcacgggatggttcatcgcaacttggcggcgcgtaacgtcctcctgaaaagcccaagtcaggttcaggttgccgattttggggtcgctgatctgctccccccagacgacaaacaactgctgtacagcgaggccaaaactcccataaaatggatggccctggagtccatccacttcggaaaatatacccatcagtcagacgtgtggagctacggccaatgtatctggatgccatcgttgcccagcttggcccccgtttcaaatctgccttttgagactccttcatag

SEQ ID NO: 122769 - DNA, 4029 bp, Artificial Sequence
  derived and/or modified sequence
atgagggccaatgatgccctgcaggtgctgggcctgctcttcagcctggcccggggcagcgaggtgggcaacagccaggccgtgtgccccggcaccctgaatggcctgtctgtgactggagatgctgagaaccagtaccagaccctgtacaagctgtatgagcgctgtgaggtggtgatgggcaacctggagatcgtgctgaccggccacaatgctgacctgtccttcctgcagtggatccgggaggtgacaggctacgtgctggtggccatgaatgagttcagcaccctgcccctgcccaacctgcgggtggtgcggggcacccaggtgtatgatggcaagtttgccatctttgtgatgctgaactacaacaccaacagcagccacgccctgcggcagctgcggctgacccagctgacagagatcctgagcggcggcgtgtacatcgagaagaatgacaagctgtgccacatggacaccatcgactggagggacatcgtgcgggacagagatgctgagatcgtggtgaaggacaatggccgcagctgccccccctgccacgaggtgtgcaagggccgctgctggggccctggcagcgaggactgccagaccctgaccaagaccatctgtgccccccagtgcaatggccactgcttcggccccaaccccaaccagtgctgccatgatgaatgtgccggcggctgcagcggcccccaggacacagactgctttgcctgccgccacttcaatgacagcggggcctgtgtgccccgctgcccccagcccctggtgtacaacaagctgaccttccagctggagcccaacccccacaccaagtaccagtatggaggagtgtgtgtggccagctgcccccacaactttgtggtggaccagaccagctgtgtgcgggcctgccccccagacaagatggaggtggacaagaatggcctgaagatgtgtgagccctgtggcggcctgtgccccaaggcctgtgagggcaccggcagcggcagccgcttccagacagtggacagcagcaacattgatggctttgtgaactgcaccaagatcctgggcaacctggacttcctgatcaccggcctgaatggagacccctggcacaagatcccagccctggaccctgagaagctgaatgtgttcagaacagtgcgggagatcaccggctacctgaacatccagagctggccaccccacatgcacaacttcagcgtcttcagcaacctgaccaccatcggcggccgcagcctgtacaacagaggcttcagcctgctgatcatgaagaacctgaatgtgaccagcctgggcttccgcagcctgaaggagatctctgctggccgcatctacatcagcgccaaccggcagctgtgctaccaccacagcctgaactggaccaaggtgctgcggggccccacagaggagcggctggacatcaagcacaaccggccccggcgggactgtgtggccgagggcaaggtgtgtgaccccctgtgcagcagcggcggctgctggggccctggccctggccagtgcctgagctgcaggaactacagccggggcggcgtgtgtgtgacccactgcaacttcctgaatggagagccccgggagtttgcccatgaagctgagtgcttcagctgccaccctgagtgccagcccatggagggcacagccacctgcaatggcagcggcagtgacacctgtgcccagtgtgcccacttcagagatggcccccactgtgtgagcagctgcccccatggagtgctgggcgccaagggccccatctacaagtacccagatgtgcagaatgaatgtcggccctgccacgagaactgcacccagggctgcaagggccctgagctgcaggactgcctgggccagaccctggtgctgattggcaagacccacctgaccatggccctgactgtgattgctggcctggtggtgatcttcatgatgctgggcggcaccttcctgtactggagaggaagacgcatccagaacaagagggccatgaggcgctacctggagcggggggagagcattgagcccctggaccccagcgagaaggccaacaaggtgctggcccgcatcttcaaggagacagagctgaggaagctgaaggtgctgggcagcggcgtgtttggcaccgtgcacaagggcgtgtggatccctgagggggagagcatcaagatccctgtgtgcatcaaggtgattgaggacaagagcggccggcagagcttccaggccgtgacagaccacatgctggccatcggcagcctggaccacgcccacatcgtgcggctgctgggcctgtgccccggcagcagcctgcagctggtgacccagtacctgcccctgggcagcctgctggaccacgtgcggcagcacagaggagccctgggcccccagctgctgctgaactggggcgtgcagatcgccaagggcatgtactacctggaggagcacggcatggtgcacaggaacctggccgccagaaatgtgctgctgaagagccccagccaggtgcaggtggccgactttggagtggccgacctgctgcccccagatgacaagcagctgctgtacagcgaggccaagacccccatcaagtggatggccctggagagcatccactttgggaagtacacccaccagagtgatgtgtggagctatggagtgacagtgtgggagctgatgacctttggagctgagccctatgccggcctgcggctggccgaggtgcctgacctgctggagaagggggagcggctggcccagccccagatctgcaccattgatgtgtacatggtgatggtgaagtgctggatgattgatgagaacatccggcccaccttcaaggagctggccaatgagttcaccaggatggcccgggaccccccacgctacctggtgatcaagcgggagagcggccctggcatcgcccctggccctgagccccacggcctgaccaacaagaagctggaggaggtggagctggagcctgagctggacctggacctggacctggaggccgaggaggacaacctggccaccaccaccctgggcagcgccctgagcctgcctgtgggcaccctgaaccggccccggggcagccagagcctgctgagccccagcagcggctacatgcccatgaaccagggcaacctgggggagagctgccaggagagcgctgtgtctggcagcagcgagcgctgccccaggcctgtgtccctgcaccccatgccccggggctgcctggccagcgagagcagcgagggccacgtgacaggcagcgaggccgagctgcaggagaaggtgtccatgtgccgcagccgcagccgcagccgcagcccccggcccaggggggacagcgcctaccacagccagaggcacagcctgctgacccctgtgacccccctgagccccccaggcctggaggaggaggatgtgaatggctacgtgatgccagacacccacctgaagggcacccccagcagccgggagggcaccctgagctctgtgggcctgagctctgtgctgggcacagaggaggaggatgaagatgaggagtatgagtacatgaacagaagaagaagacacagccccccccaccccccccggcccagcagcctggaggagctgggctatgagtacatggatgtgggcagtgacctgagcgccagcctgggcagcacccagagctgccccctgcaccctgtgcccatcatgcccacagctggcaccaccccagatgaggactatgagtacatgaaccggcagagagatggcggcggccctggaggagactatgctgccatgggcgcctgcccagccagcgagcagggctatgaggagatgagggccttccagggccctggccaccaggccccccacgtgcactacgcccggctgaagaccctgcggagcctggaggccacagattctgcctttgacaacccagactactggcacagccgcctcttccccaaggccaatgcccagaggacatag

SEQ ID NO: 122770 - DNA, 996 bp, Artificial Sequence
  derived and/or modified sequence
atgagggccaatgatgccctgcaggtgctgggcctgctcttcagcctggcccggggcagcgaggtgggcaacagccaggccgtgtgccccggcaccctgaatggcctgtctgtgactggagatgctgagaaccagtaccagaccctgtacaagctgtatgagcgctgtgaggtggtgatgggcaacctggagatcgtgctgaccggccacaatgctgacctgtccttcctgcagtggatccgggaggtgacaggctacgtgctggtggccatgaatgagttcagcaccctgcccctgcccaacctgcgggtggtgcggggcacccaggtgtatgatggcaagtttgccatctttgtgatgctgaactacaacaccaacagcagccacgccctgcggcagctgcggctgacccagctgacagagatcctgagcggcggcgtgtacatcgagaagaatgacaagctgtgccacatggacaccatcgactggagggacatcgtgcgggacagagatgctgagatcgtggtgaaggacaatggccgcagctgccccccctgccacgaggtgtgcaagggccgctgctggggccctggcagcgaggactgccagaccctgaccaagaccatctgtgccccccagtgcaatggccactgcttcggccccaaccccaaccagtgctgccatgatgaatgtgccggcggctgcagcggcccccaggacacagactgctttgcctgccgccacttcaatgacagcggggcctgtgtgccccgctgcccccagcccctggtgtacaacaagctgaccttccagctggagcccaacccccacaccaagtaccagtatggaggagtgtgtgtggccagctgcccccacaactttgtggtggaccagaccagctgtgtgcgggcctgccccccagacaagatggaggtggacaagaatggcctgaagatgtgtgagccctgtggcggcctgtgccccaaggtgttctag

SEQ ID NO: 122771 - DNA, 3852 bp, Artificial Sequence
  derived and/or modified sequence
atgggcaacctggagatcgtgctgaccggccacaatgctgacctgtccttcctgcagtggatccgggaggtgacaggctacgtgctggtggccatgaatgagttcagcaccctgcccctgcccaacctgcgggtggtgcggggcacccaggtgtatgatggcaagtttgccatctttgtgatgctgaactacaacaccaacagcagccacgccctgcggcagctgcggctgacccagctgacagagatcctgtctggaggagtgtacatcgagaagaatgacaagctgtgccacatggacaccatcgactggagggacatcgtgcgggacagagatgctgagatcgtggtgaaggacaatggccgcagctgccccccctgccacgaggtgtgcaagggccgctgctggggccctggcagcgaggactgccagaccctgaccaagaccatctgtgccccccagtgcaatggccactgcttcggccccaaccccaaccagtgctgccatgatgaatgtgccggcggctgcagcggcccccaggacacagactgctttgcctgccgccacttcaatgattctggggcctgtgtgccccgctgcccccagcccctggtgtacaacaagctgaccttccagctggagcccaacccccacaccaagtaccagtatggaggagtgtgtgtggccagctgcccccacaactttgtggtggaccagaccagctgtgtgcgggcctgccccccagacaagatggaggtggacaagaatggcctgaagatgtgtgagccctgtggcggcctgtgccccaaggcctgtgagggcactggaagtggcagccgcttccagacagtggacagcagcaacattgatggctttgtgaactgcaccaagatcctgggcaacctggacttcctgatcaccggcctgaatggagacccctggcacaagatcccagccctggaccctgagaagctgaatgtgttcagaacagtgcgggagatcaccggctacctgaacatccagagctggccaccccacatgcacaacttctctgtgttcagcaacctgaccaccatcggcggccgcagcctgtacaacagaggcttcagcctgctgatcatgaagaacctgaatgtgaccagcctgggcttccgcagcctgaaggagatctctgctggccgcatctacatcagcgccaaccggcagctgtgctaccaccacagcctgaactggaccaaggtgctgcggggccccacagaggagcggctggacatcaagcacaaccggccccggcgggactgtgtggccgagggcaaggtgtgtgaccccctgtgcagcagcggcggctgctggggccctggccctggccagtgcctgagctgcaggaactacagcagaggaggagtgtgtgtgacccactgcaacttcctgaatggagagccccgggagtttgcccacgaggccgagtgcttcagctgccaccctgagtgccagcccatggagggcacagccacctgcaatggaagtggcagtgacacctgtgcccagtgtgcccacttcagagatggcccccactgtgtgagcagctgcccccacggcgtgctgggcgccaagggccccatctacaagtacccagatgtgcagaatgaatgtcggccctgccacgagaactgcacccagggctgcaagggccctgagctgcaggactgcctgggccagaccctggtgctgattggcaagacccacctgaccatggccctgactgtgattgctggcctggtggtgatcttcatgatgctgggcggcaccttcctgtactggaggggccgccgcatccagaacaagagggccatgaggcgctacctggagcggggggagagcattgagcccctggaccccagcgagaaggccaacaaggtgctggcccgcatcttcaaggagacagagctgaggaagctgaaggtgctgggcagcggcgtgtttggaacagtgcacaagggcgtgtggatccctgagggggagagcatcaagatccctgtgtgcatcaaggtgattgaggacaagagcggccggcagagcttccaggccgtgacagaccacatgctggccatcggcagcctggaccacgcccacatcgtgcggctgctgggcctgtgccccggcagcagcctgcagctggtgacccagtacctgcccctgggcagcctgctggaccacgtgcggcagcacagaggagccctgggcccccagctgctgctgaactggggcgtgcagatcgccaagggcatgtactacctggaggagcacggcatggtgcacaggaacctggccgccagaaatgtgctgctgaagagccccagccaggtgcaggtggccgactttggagtggccgacctgctgcccccagatgacaagcagctgctgtacagcgaggccaagacccccatcaagtggatggccctggagagcatccactttgggaagtacacccaccagagtgatgtgtggagctatggagtgacagtgtgggagctgatgaccttcggggctgagccctatgccggcctgcggctggccgaggtgcctgacctgctggagaagggggagcggctggcccagccccagatctgcaccattgatgtgtacatggtgatggtgaagtgctggatgattgatgagaacatccggcccaccttcaaggagctggccaatgagttcaccaggatggcccgggaccccccacgctacctggtgatcaagcgggagagcggccctggcatcgcccctggccctgagccccacggcctgaccaacaagaagctggaggaggtggagctggagcctgagctggacctggacctggacctggaggccgaggaggacaacctggccaccaccaccctgggcagcgccctgagcctgcctgtgggcaccctgaaccggccccggggcagccagagcctgctgagccccagcagcggctacatgcccatgaaccagggcaacctgggggagagctgccaggagagcgctgtgtctggcagcagcgagcgctgccccaggcctgtgtccctgcaccccatgccccggggctgcctggccagcgagagcagcgagggccacgtgactggaagtgaagctgagctgcaggagaaggtgtccatgtgccgcagccgcagccgcagccgcagcccccggcccaggggggacagcgcctaccacagccagaggcacagcctgctgacccctgtgacccccctgagccccccaggcctggaggaggaggatgtgaatggctacgtgatgccagacacccacctgaagggcacccccagcagccgggagggcaccctgagctctgtgggcctgagctctgtgctgggcacagaggaggaggatgaagatgaggagtatgagtacatgaacagaagaagaagacacagccccccccaccccccccggcccagcagcctggaggagctgggctatgagtacatggatgtgggcagtgacctgagcgccagcctgggcagcacccagagctgccccctgcaccctgtgcccatcatgcccacagctggcaccaccccagatgaagattatgagtacatgaaccggcagagagatggcggcggccctggaggagactatgctgccatgggcgcctgcccagccagcgagcagggctatgaggagatgagggccttccagggccctggccaccaggcccctcatgtgcactacgcccggctgaagaccctgcggagcctggaggccacagacagcgcctttgacaacccagactactggcacagccgcctcttccccaaggccaatgcccagaggacatag

SEQ ID NO: 122772 - DNA, 2100 bp, Artificial Sequence
  derived and/or modified sequence
atggccctgactgtgattgctggcctggtggtgatcttcatgatgctgggcggcaccttcctgtactggaggggccgccgcatccagaacaagagggccatgaggcgctacctggagcggggggagagcattgagcccctggaccccagcgagaaggccaacaaggtgctggcccgcatcttcaaggagacagagctgaggaagctgaaggtgctgggcagcggcgtgtttggaacagtgcacaagggcgtgtggatccctgagggggagagcatcaagatccctgtgtgcatcaaggtgattgaggacaagagcggccggcagagcttccaggccgtgacagaccacatgctggccatcggcagcctggaccacgcccacatcgtgcggctgctgggcctgtgccccggcagcagcctgcagctggtgacccagtacctgcccctgggcagcctgctggaccacgtgcggcagcacagaggagccctgggcccccagctgctgctgaactggggcgtgcagatcgccaagggcatgtactacctggaggagcacggcatggtgcacaggaacctggccgccagaaatgtgctgctgaagagccccagccaggtgcaggtggccgactttggagtggccgacctgctgcccccagatgacaagcagctgctgtacagcgaggccaagacccccatcaagtggatggccctggagagcatccactttgggaagtacacccaccagagtgatgtgtggagctatggagtgacagtgtgggagctgatgaccttcggggctgagccctatgccggcctgcggctggccgaggtgcctgacctgctggagaagggggagcggctggcccagccccagatctgcaccattgatgtgtacatggtgatggtgaagtgctggatgattgatgagaacatccggcccaccttcaaggagctggccaatgagttcaccaggatggcccgggaccccccacgctacctggtgatcaagcgggagagcggccctggcatcgcccctggccctgagccccacggcctgaccaacaagaagctggaggaggtggagctggagcctgagctggacctggacctggacctggaggccgaggaggacaacctggccaccaccaccctgggcagcgccctgagcctgcctgtgggcaccctgaaccggccccggggcagccagagcctgctgagccccagcagcggctacatgcccatgaaccagggcaacctgggggagagctgccaggagagcgctgtgtctggcagcagcgagcgctgccccaggcctgtgtccctgcaccccatgccccggggctgcctggccagcgagagcagcgagggccacgtgactggaagtgaagctgagctgcaggagaaggtgtccatgtgccgcagccgcagccgcagccgcagcccccggcccaggggggacagcgcctaccacagccagaggcacagcctgctgacccctgtgacccccctgagccccccaggcctggaggaggaggatgtgaatggctacgtgatgccagacacccacctgaagggcacccccagcagccgggagggcaccctgagctctgtgggcctgagctctgtgctgggcacagaggaggaggatgaagatgaggagtatgagtacatgaacagaagaagaagacacagccccccccaccccccccggcccagcagcctggaggagctgggctatgagtacatggatgtgggcagtgacctgagcgccagcctgggcagcacccagagctgccccctgcaccctgtgcccatcatgcccacagctggcaccaccccagatgaagattatgagtacatgaaccggcagagagatggcggcggccctggaggagactatgctgccatgggcgcctgcccagccagcgagcagggctatgaggagatgagggccttccagggccctggccaccaggcccctcatgtgcactacgcccggctgaagaccctgcggagcctggaggccacagacagcgcctttgacaacccagactactggcacagccgcctcttccccaaggccaatgcccagaggacatag

SEQ ID NO: 122773 - DNA, 2766 bp, Artificial Sequence
  derived and/or modified sequence
atgagggccaatgatgccctgcaggtgctgggcctgctcttcagcctggcccggggcagcgaggtgggcaacagccaggccgtgtgccccggcaccctgaatggcctgtctgtgactggagatgctgagaaccagtaccagaccctgtacaagctgtatgagcgctgtgaggtggtgatgggcaacctggagatcgtgctgaccggccacaatgctgacctgtccttcctgcagtggatccgggaggtgacaggctacgtgctggtggccatgaatgagttcagcaccctgcccctgcccaacctgcgggtggtgcggggcacccaggtgtatgatggcaagtttgccatctttgtgatgctgaactacaacaccaacagcagccacgccctgcggcagctgcggctgacccagctgacagagatcctgagcggcggcgtgtacatcgagaagaatgacaagctgtgccacatggacaccatcgactggagggacatcgtgcgggacagagatgctgagatcgtggtgaaggacaatggccgcagctgccccccctgccacgaggtgtgcaagggccgctgctggggccctggcagcgaggactgccagaccctgaccaagaccatctgtgccccccagtgcaatggccactgcttcggccccaaccccaaccagtgctgccatgatgaatgtgccggcggctgcagcggcccccaggacacagactgctttgcctgccgccacttcaatgacagcggggcctgtgtgccccgctgcccccagcccctggtgtacaacaagctgaccttccagctggagcccaacccccacaccaagtaccagtatggaggagtgtgtgtggccagctgcccccacaactttgtggtggaccagaccagctgtgtgcgggcctgccccccagacaagatggaggtggacaagaatggcctgaagatgtgtgagccctgtggcggcctgtgccccaaggcctgtgagggcaccggcagcggcagccgcttccagacagtggacagcagcaacattgatggctttgtgaactgcaccaagatcctgggcaacctggacttcctgatcaccggcctgaatggagacccctggcacaagatcccagccctggaccctgagaagctgaatgtgttcagaacagtgcgggagatcaccggctacctgaacatccagagctggccaccccacatgcacaacttcagcgtcttcagcaacctgaccaccatcggcggccgcagcctgtacaacagaggcttcagcctgctgatcatgaagaacctgaatgtgaccagcctgggcttccgcagcctgaaggagatctctgctggccgcatctacatcagcgccaaccggcagctgtgctaccaccacagcctgaactggaccaaggtgctgcggggccccacagaggagcggctggacatcaagcacaaccggccccggcgggactgtgtggccgagggcaaggtgtgtgaccccctgtgcagcagcggcggctgctggggccctggccctggccagtgcctgagctgcaggaactacagccggggcggcgtgtgtgtgacccactgcaacttcctgaatggagagccccgggagtttgcccatgaagctgagtgcttcagctgccaccctgagtgccagcccatggagggcacagccacctgcaatggcagcggcagtgacacctgtgcccagtgtgcccacttcagagatggcccccactgtgtgagcagctgcccccatggagtgctgggcgccaagggccccatctacaagtacccagatgtgcagaatgaatgtcggccctgccacgagaactgcacccagggctgcaagggccctgagctgcaggactgcctgggccagaccctggtgctgattggcaagacccacctgaccatggccctgactgtgattgctggcctggtggtgatcttcatgatgctgggcggcaccttcctgtactggagaggaagacgcatccagaacaagagggccatgaggcgctacctggagcggggggagagcattgagcccctggaccccagcgagaaggccaacaaggtgctggcccgcatcttcaaggagacagagctgaggaagctgaaggtgctgggcagcggcgtgtttggcaccgtgcacaagggcgtgtggatccctgagggggagagcatcaagatccctgtgtgcatcaaggtgattgaggacaagagcggccggcagagcttccaggccgtgacagaccacatgctggccatcggcagcctggaccacgcccacatcgtgcggctgctgggcctgtgccccggcagcagcctgcagctggtgacccagtacctgcccctgggcagcctgctggaccacgtgcggcagcacagaggagccctgggcccccagctgctgctgaactggggcgtgcagatcgccaagggcatgtactacctggaggagcacggcatggtgcacaggaacctggccgccagaaatgtgctgctgaagagccccagccaggtgcaggtggccgactttggagtggccgacctgctgcccccagatgacaagcagctgctgtacagcgaggccaagacccccatcaagtggatggccctggagagcatccactttgggaagtacacccaccagagtgatgtgtggagctatggccagtgcatctggatgcccagcctgcccagcctggcccctgtgagcaacctgccctttgagacccccagctag

SEQ ID NO: 122774 - DNA, 4029 bp, Artificial Sequence
  derived and/or modified sequence
atgcgggccaacgacgccctgcaggtgctgggcctgctgttcagcctggctcgcggttctgaggtcggaaacagccaggccgtgtgcccaggcactctcaacggcctctccgtgacaggcgatgcagagaaccagtatcagactttatacaaactgtacgaaagatgcgaggtcgtcatgggaaatctggagattgtgctgacagggcataatgctgatctttcctttctgcagtggatcagagaggttactggatacgtcctggttgcaatgaacgaattctccaccctgccgctgccgaatctcagggtggtgcgggggacccaggtgtacgacggaaagttcgccatcttcgtgatgctgaactataatacaaatagcagccacgcgttgcgtcagcttcgcttgacacaactgacggagatactgtcaggtggtgtgtacatcgaaaagaacgataagctctgccacatggacacaattgattggagagacatcgtgcgagaccgggacgcggagatcgttgtgaaggataacggaaggtcatgcccaccttgccatgaagtgtgtaaaggacgttgttggggaccgggtagcgaagattgtcagaccttaactaaaaccatttgtgcgccacaatgcaatggccactgcttcggcccaaatccaaatcagtgttgccacgatgagtgtgccggcggctgtagcgggccccaggataccgactgcttcgcctgtagacacttcaatgatagcggtgcgtgcgtcccccggtgcccccagccccttgtctacaataaactaaccttccagctggagccaaacccgcacactaaataccagtacgggggggtgtgtgtggctagctgtcctcataacttcgtcgtggatcaaacaagttgtgtccgggcctgtcctccggataaaatggaggtagacaaaaatggcctcaagatgtgtgagccatgtggaggcctgtgtcccaaggcatgcgagggcacgggatccggatctaggtttcaaactgtagatagctctaatattgatggatttgttaactgtactaagatcctcggcaatttggacttcctgatcaccggccttaatggcgacccctggcataaaatcccggccctagaccccgagaaacttaatgtgtttaggactgtgagggagataactgggtacctgaatatacaatcatggcccccgcacatgcacaatttctccgtgttcagcaatctcaccactattggtggtcgatcattgtataatcggggattctccctgctgattatgaaaaacctgaatgtcacttcactggggtttaggagcctcaaggaaattagcgccggccgcatctatatctccgcaaaccgccagttgtgttaccatcatagcctcaattggacaaaagttctgagagggcctacggaggagagacttgacattaaacataaccggcccaggagggattgcgtcgccgaaggcaaagtttgtgatcctttgtgctcgtcaggcggatgttggggaccaggtcccggacaatgtttgagttgccgtaactactcacgtggtggggtctgtgtcacccattgcaatttcctcaacggggagccccgagagttcgcccatgaggctgagtgtttttcttgtcacccagaatgtcagcccatggaaggaaccgccacatgtaacggcagcggatccgacacctgcgcacagtgcgcccacttcagagatggcccacattgtgtgagcagctgtccccacggggtgctgggcgctaagggtcctatttacaaataccccgacgtgcagaacgagtgtcgaccttgccatgaaaattgtacacagggttgcaaggggcccgaacttcaggactgtttaggccagacactcgtgctgatcggtaaaacccacctgaccatggcactgactgtgatcgccggcctggtggtcatttttatgatgttggggggaaccttcctctattggagagggagaaggatccagaacaagagggccatgaggaggtacctggaacggggagagtctattgagccccttgaccccagcgagaaggccaataaggtcctggcccggatctttaaggagactgagttgagaaagcttaaagtcctcgggagcggggtatttgggacagttcacaagggcgtgtggattccggagggtgagtcaattaaaattcctgtgtgcatcaaagttattgaagataagagtgggcggcagtcgttccaagctgtgacagaccacatgctcgccatcggaagtttggatcatgctcacattgtgcggctcttgggactttgccctggcagcagcttgcagctcgtcacccagtacctgcccctggggtcattgctcgatcatgtgagacagcataggggcgctcttggcccgcagctgttgctgaactggggggttcaaatcgcgaagggaatgtattatctagaggagcacggaatggtccaccgcaacttggccgcccgaaacgtgcttctgaagtcaccttctcaggtgcaagttgccgactttggcgttgccgatttgttgccgccagatgataagcagctgctgtactctgaagccaaaacacctattaagtggatggcgctggagtcaatccactttgggaagtatacccatcagtcagacgtgtggagttacggcgttactgtttgggaactgatgacatttggggctgagccctatgcaggattgagactggccgaggttcccgacctgctggagaagggcgagcggttagcacagccacagatctgtacaatcgacgtttatatggtgatggtgaaatgttggatgattgatgaaaacatcaggccgacatttaaggagttggcgaacgagtttacaagaatggcacgagaccctccaagatacttggtgattaagcgcgagtccggcccagggattgcacccggacccgaaccgcatggtctgacgaataagaagttggaagaagtggagctggagccagagttggatctggatctggatctggaagccgaggaggataatttagccacaaccaccttagggtccgccctgtcgctgccagtagggactctgaaccgccctagaggctcccaaagtttgctgtcaccatctagtggatacatgcctatgaatcaagggaatctgggcgagtcctgtcaagagagcgctgtctcagggagcagcgaaagatgcccgcggccagttagccttcacccaatgccccgagggtgtttggcctcagagtcctctgagggtcatgtcacgggctcagaagcggagctccaagagaaggtttccatgtgccgcagtcggtcccggagtcgctctccaaggccaagaggggactcggcttatcacagtcagcgtcatagtctcctgacccctgtgacaccactttcaccacccggactcgaagaagaagatgtaaacggctacgttatgccagacacacacctaaaaggcaccccttcaagccgggagggcacgcttagcagtgtcgggctatcctccgtgctaggcactgaagaggaagatgaggatgaagaatacgagtatatgaatagacggaggaggcattccccacctcacccaccgcgcccctctagcctggaggaattggggtatgagtacatggatgtgggctcagatctgtccgcctctttaggctcaacccagagttgtcccttgcaccctgtgcctattatgccaaccgccgggacgacccccgatgaggactacgagtatatgaatcggcagcgtgacggaggggggccaggcggggactacgccgctatgggagcttgcccggcctctgaacaggggtatgaggaaatgagggctttccagggcccaggccaccaagcccctcatgtacactatgcaagactcaagactctgcggagcttagaagctactgactctgctttcgacaaccccgactactggcactcccgcctcttcccgaaggctaatgcccagcgtacttag

SEQ ID NO: 122775 - DNA, 996 bp, Artificial Sequence
  derived and/or modified sequence
atgcgggccaacgacgccctgcaggtgctgggcctgctgttcagcctggctcgtggctccgaagttggcaattctcaagccgtctgccccggaacactcaatggactgagtgttacaggggatgcagagaaccagtaccagacactatacaaactgtacgagcgttgtgaggtcgttatggggaatctggagattgttctaaccgggcacaacgccgacctgtcattccttcagtggattcgcgaagtcacggggtatgttttggtggcaatgaacgagttcagtactctgcccttgccaaatctgagggttgtgcgtgggacgcaggtgtacgatggcaagtttgctatttttgtgatgctgaattacaacactaattcctcccatgcactgcgccagctgaggcttacacagttaaccgaaatcctgtcagggggcgtctatatcgagaagaacgataagttgtgtcacatggatacaatcgactggcgggatatagttcgcgatagagacgctgagatagtggttaaagacaacggccgatcatgccctccttgtcatgaagtgtgtaaaggtaggtgttggggaccaggatcggaggactgccagacactaaccaaaactatttgcgccccgcagtgcaacgggcactgtttcggccccaacccaaaccaatgttgccatgatgagtgtgccggcggctgtagcggccctcaagacactgactgcttcgcgtgtagacactttaatgactcgggagcctgcgtacctcgctgtcctcaaccactggtttataataaactcactttccagcttgagcccaatccacatactaagtaccaatatggtggagtctgtgtcgctagctgtcctcacaattttgtggttgaccaaacgtcttgtgtgcgtgcgtgccctcccgataagatggaagtagataagaacggactaaagatgtgcgagccttgcggcgggttgtgtcctaaggtcttttag

SEQ ID NO: 122776 - DNA, 3852 bp, Artificial Sequence
  derived and/or modified sequence
atgggcaacctggagatcgtgctgaccggccacaacgccgacctgtcttttctgcagtggatccgtgaggttactggctacgtgctagttgcgatgaacgagttctcgacccttccacttcccaacctaagagtcgtgcgaggaacacaggtttacgatggcaaattcgcgatttttgtcatgctaaactacaacaccaattccagccatgcactacggcagttgcgccttacacagctcacggagatcctcagcggcggagtatatattgagaaaaacgataagctgtgccacatggacacaattgattggcgggatatcgttagagaccgcgatgccgagatcgtcgtgaaagacaatggcaggtcttgcccaccttgtcacgaagtgtgtaaaggccgttgctgggggcctggttctgaagactgtcaaaccttaaccaagactatttgcgctcctcagtgtaatggtcactgttttggtcccaatcccaaccaatgctgccacgatgaatgtgctggcggctgtagcggtccgcaggatactgactgcttcgcttgtagacattttaacgactcgggtgcttgtgttccaagatgtccacagcctttggtctataataaactcacgttccaactggagcccaacccacacactaaataccaatatggcggcgtctgcgtggcaagctgtccccacaactttgtcgtggatcagacttcctgcgttagggcctgccctcctgacaagatggaggtggacaagaacggcctgaaaatgtgcgagccatgcggcggactatgtccaaaggcctgcgagggcaccggaagtggctctcgcttccagacagtcgatagctccaatatcgacggttttgtgaactgcaccaagatattaggcaacctagattttctcataacaggcctgaacggcgacccctggcacaaaattccggctctggatcctgagaaactcaacgtgtttagaaccgtgcgagagatcacgggctatctgaacatccagtcgtggccaccgcacatgcataacttcagcgttttctccaatctcaccacgattgggggaaggtccctgtacaacagaggcttttccctgctgattatgaagaatctgaatgttaccagtctcggttttaggtccctgaaagaaatctctgccgggcggatctacattagcgccaatcggcagttatgctatcatcacagcttgaactggaccaaagtcttacgcggacccacagaggaaaggctggacatcaagcacaacagaccaaggagagactgtgtcgctgaagggaaggtgtgcgacccactatgtagcagcgggggctgctggggccctggtccagggcaatgcttaagctgcagaaactattcaaggggaggagtctgcgtgactcattgcaatttcctcaatggcgaacctcgcgagttcgcgcacgaagccgagtgcttcagctgccatccagaatgtcagcctatggagggcaccgcgacttgtaatggtagcgggagcgacacctgcgcccagtgtgcccactttcgagatggccctcactgcgttagctcttgtccacacggcgtcctcggagcaaagggccctatctataagtatccagacgtgcaaaatgagtgtcgtccttgccacgagaattgcactcagggctgtaaagggcctgagcttcaggattgtttggggcagaccctggtgctcatcggaaagacgcaccttaccatggcgctcacagtgattgctggcctggttgttatatttatgatgctggggggtactttcctgtactggcggggacggagaatccagaataagagggcaatgcgccgctacttggagagaggcgagtctattgaaccccttgacccatcagaaaaggctaacaaagtgctggctagaatattcaaggagacagagttgaggaaactcaaagtactggggtcaggcgtgtttggaacagtccacaaaggcgtctggatcccggaaggggagagcattaagatcccagtctgtatcaaagtgatcgaggacaagtccggcaggcagagttttcaggccgtgacagatcacatgctcgccatcggatcactggaccatgctcatatcgtgcgtttactgggcctttgcccaggatcctctctccagctagttacccagtatctgcctctgggaagcttgttggaccacgtcaggcaacatcgtggcgccctgggcccccagctcctactgaattggggagtgcaaattgccaaaggaatgtattacctggaggaacacggaatggtacacaggaatctggctgccaggaatgtgctcttgaaatctccctcacaagtgcaggtggcggatttcggcgtggccgatctcttgcctcctgacgacaaacagctgttgtactccgaagctaagacgccaataaaatggatggctctagagtccatccattttggaaaatacactcatcagagtgacgtttggtcatatggagtaacagtgtgggaattgatgacatttggagcggagccatatgccggattaaggttggcagaggtgccagacctgctagagaagggcgagaggctcgcccagccccagatctgcacaattgatgtgtacatggtgatggtgaagtgctggatgatcgacgagaatatcaggcccacttttaaggagctggcgaatgagttcacccggatggctcgagatcccccccgatatctggtgatcaaacgagagtccgggccagggatagctcctgggccagagccacacggcctgactaacaagaagctcgaggaggtggagctcgaaccagagctggacctggacttggatttagaagccgaggaggacaatctcgctactactaccttgggctccgccctgagcctcccggttggaacactaaacaggcctaggggttctcaatcgctgctctcacctagtagtggctatatgcctatgaatcagggcaacctgggagaaagttgccaagaaagcgctgtctctggcagcagcgagcggtgcccacggccagtttctctgcacccaatgccacgcggatgccttgcatctgaatctagcgagggccacgtgacaggttctgaagcggagctgcaggaaaaagtctctatgtgccggtctcggtcccgtagtcgatcacctcgcccccggggcgattctgcctatcactcccagcgacacagcctgctgaccccagtaaccccactcagcccccctggcttagaagaggaggatgtcaacggttacgtcatgcccgatactcatcttaagggtactccaagcagcagagaaggtaccttgagctccgttggactcagttcagtactaggtacagaggaagaggatgaggatgaagagtatgaatacatgaaccggcgtcgccgacattccccaccgcatcccccacggccctcatcgctcgaggagctgggctatgagtacatggacgtgggatctgacctcagcgcgagcctgggatcaacccagtcgtgtcctctgcaccctgtgcccatcatgcccactgccggaaccacccccgacgaggattatgaatatatgaatagacagcgggacgggggcgggcctggcggggattacgccgccatgggcgcttgtcccgcctccgaacagggctatgaggaaatgcgcgcctttcaaggtcccggccaccaagcacctcatgtccactacgcacggctcaaaaccctgaggtctctagaggccaccgatagcgcgtttgataacccagattattggcatagccgcctcttcccgaaggccaacgctcaacggacctag

SEQ ID NO: 122777 - DNA, 2100 bp, Artificial Sequence
  derived and/or modified sequence
atggccctgaccgtgatcgccggcctggtggtgatcttcatgatgctgggcggaacttttttgtactggcggggtcgacgcatccaaaataaacgggcgatgcgacggtacctggaaaggggggaatctatcgagcctcttgatccatctgagaaggccaataaagtcctcgcacggatctttaaagaaaccgaattgcgcaagctcaaagtgctcgggtctggggtgttcggaaccgtgcacaaaggcgtctggatccccgaaggagaatcgattaagatccctgtttgtattaaggtgatcgaagacaaaagtggtagacagtcgtttcaggccgtgaccgatcacatgctggctatcggatccctcgaccacgcacacattgttcgactcttaggactttgccccggtagctccctccagctggtcacacagtatcttccccttgggagcctattggaccatgtgcggcagcacaggggggccctggggccacaacttctgctgaactggggcgtccagattgcaaaaggtatgtattacctcgaagaacacggcatggtgcaccgtaatctggccgcgcgaaatgtcctcctgaagtcaccatcgcaggtccaggtggccgattttggggtggccgatttgttacccccagacgacaaacagctcctttactccgaagcaaaaacgcctattaaatggatggctctcgagagtatacactttgggaaatacacgcaccagagtgatgtctggagctatggagtaaccgtgtgggagttgatgacttttggggctgaaccttatgccggcctccgtctcgccgaggttcctgacttattagaaaaaggagagagactagcgcagccccagatttgcactatcgatgtttacatggttatggtgaaatgctggatgattgacgaaaatatccggccgactttcaaagaacttgctaatgagttcacacggatggcccgggatcctccacgatatttggtcatcaaaagggagtcagggcctggaattgcaccaggacctgaaccacatggcctgaccaataaaaaactggaagaggttgagctcgagccagaactggatctcgatctggatctggaggctgaggaggataatctagcgacaaccaccctgggctcagctctgagtctgcctgtcggcacactgaatcggcccaggggctcgcagagcttgctaagccctagctcagggtacatgcccatgaatcagggtaacctcggcgaaagctgccaggagtctgcagtgtcgggctcttccgagagatgccctagacccgtgagcctgcaccccatgccacggggctgcttggcaagtgaaagttccgaaggacacgttacagggtccgaagctgaactgcaggaaaaagtgtcaatgtgcaggtctaggtcccggagcaggtctcctcgcccacgcggggattctgcctatcacagtcagaggcattccttactgacccccgtgaccccactgtctccgcctgggctagaagaggaagatgtgaacggctacgtgatgcccgacacgcacctgaagggcacaccttccagtcgcgagggcaccctcagctcagtcggactgtctagtgttcttggcaccgaggaggaagatgaggacgaggaatacgaatatatgaaccgacgaagaagacactctcccccgcatcctccgcggcctagtagccttgaggaactggggtacgaatacatggatgtgggttcagacctgagtgcctctctgggatctacccaatcatgtccacttcacccagttcctataatgccaactgcgggcacgactccggatgaggattacgagtacatgaacaggcaacgggatggcgggggacccgggggggattatgccgcaatgggggcctgccccgcttctgaacaggggtacgaggaaatgcgcgccttccaaggcccagggcaccaggccccacatgtacactatgcccggctgaagacactccgttcccttgaggccactgactcagcgttcgataatccggattattggcactctcgactctttccaaaggccaacgcacagagaacatag

SEQ ID NO: 122778 - DNA, 2766 bp, Artificial Sequence
  derived and/or modified sequence
atgcgggccaacgacgccctgcaggtgctgggcctgctgttcagcttagcgcgcggaagcgaggtgggcaattcccaagccgtgtgccccgggactctgaacggcttgtctgtgactggcgacgccgaaaaccagtaccaaacattatataagctttatgaacgatgcgaagtggtaatggggaatctcgagatcgttctcaccggtcacaatgcagatctgtcattcttgcagtggattagagaggtgactggctacgtgttagtagcaatgaatgaatttagtaccctgcccttgcccaatttgcgggtggtgcggggcacacaggtgtatgacggaaagtttgcgatctttgtgatgctcaactataacacaaattcatcgcatgctctgagacagctgaggcttactcagctgacggagatcctgtccggcggtgtgtacatagaaaagaacgacaagctgtgccacatggataccatcgactggagggatattgtgcgagatcgggatgccgaaattgtggttaaagacaacggacggtcctgcccaccatgtcacgaagtatgtaaagggcgctgctggggtcctggatctgaagattgtcaaaccctcacaaaaactatatgcgccccacaatgcaacggacattgcttcggtccaaatccaaaccaatgctgtcacgacgagtgtgccggcgggtgctctgggcctcaagacaccgactgttttgcttgcagacatttcaatgactctggtgcttgtgtccctcggtgtcctcagcccctggtttacaacaaactgacgttccagctggagccaaatcctcacactaaataccagtacgggggcgtctgcgtagcctcttgcccccacaacttcgtcgtggatcagacaagttgtgtccgggcttgtcccccagacaagatggaggtcgacaagaatggcctgaagatgtgtgaaccatgcggtgggctgtgcccgaaggcatgcgaggggacagggtcaggttcccggttccagacagtcgactcatcaaacatcgatggcttcgttaattgcaccaagatcttaggaaaccttgactttttaattactggcctcaacggagatccttggcacaaaatccccgcactggacccggagaaactgaacgtctttagaaccgttcgagagatcaccgggtacctcaacatccagtcatggccacctcacatgcacaatttctctgtattctccaatctgacaacaattggaggtcggtccttgtacaatcgtggattctctctgctgatcatgaagaatctcaacgtgacatctctaggatttagaagcctgaaggagatctctgccggccgcatctacatcagtgcaaacaggcaactttgttaccaccattcactaaattggacaaaggtcttaaggggaccaacggaagagcgtcttgatattaaacacaataggccacgccgtgattgtgtcgccgaaggcaaagtgtgcgacccgctgtgttcctcaggagggtgctggggtcccggccccggtcagtgcctttcctgtaggaattacagccgcggcggagtgtgtgtaactcattgcaactttctaaacggcgagcctcgggaatttgcgcatgaagctgagtgcttcagctgtcatccagaatgccaacccatggaggggactgcgacgtgtaacggttcgggttctgatacatgcgcacagtgcgcccatttccgtgatggccctcactgtgttagcagttgtcctcatggagtgctgggcgccaaggggcctatatataagtatcctgatgtccagaatgagtgtagaccttgccacgagaattgcacgcagggttgtaagggccccgagctgcaggactgcctggggcagactttggtgctgattgggaagacacatttgactatggcattaacggtgattgccggactggtggtcattttcatgatgctgggcggtacatttctttattggcggggtcgcaggatacagaataagagggctatgagaagatatctggagcgcggggagtcaatcgagcccctggatccatccgaaaaggcaaataaggtgctggcacgcatcttcaaagagaccgaattgcgcaagctcaaggttctgggatctggagtgtttgggactgttcataagggcgtgtggatccctgagggagagtccatcaagattccggtttgcattaaagtcatcgaagacaaatccggaagacagtcatttcaggccgtgaccgaccatatgttagccattgggagccttgaccacgcgcacatcgtacggctgttaggcctgtgtccagggagctcgctccaacttgtgacgcagtatctgcccttaggctcattacttgaccacgtcaggcaacacaggggagctctgggcccacagctcctgctgaattggggcgtgcagatcgctaaaggtatgtactacttggaagaacatgggatggtccatcgaaacctggcagcccgcaatgtcctgctgaagtccccgagccaggtgcaagtcgcggacttcggggtggccgacttgcttccaccggacgataaacagctgctctatagcgaggcaaaaactcctataaaatggatggcccttgaatcaatccacttcggcaagtatactcatcagagtgatgtttggtcctatggacaatgtatctggatgccctcactgccttcactggcaccggtgagtaacctaccttttgagaccccttcgtag

SEQ ID NO: 122779 - DNA, 4029 bp, Artificial Sequence
  derived and/or modified sequence
atgcgggctaacgatgctctccaggtgttgggcctcttgtttagtctggccagagggtctgaagtgggaaactcccaggccgtgtgccccggtacgcttaacgggttgagtgtcaccggtgacgccgagaaccagtaccagaccctatacaagctttatgagaggtgcgaggtcgtcatgggcaacttggagatcgtgctcactgggcataacgctgacctgagcttcctgcagtggattcgagaagtcactggttatgttctggtggccatgaacgagttctccaccctgccgctcccaaatctgcgggtggttagaggtactcaagtgtacgatgggaaattcgctattttcgttatgcttaactataacaccaacagtagccacgctcttcgtcagctcagactcacccagctcacagagatcctcagcggaggagtctacattgagaaaaacgataagctatgccacatggatacaatcgattggagagatatcgtgcgcgacagagacgccgaaatcgtggtgaaagacaatggcaggtcctgtccaccttgccatgaagtctgtaagggccgttgttggggtccaggatctgaggactgtcagacgctgaccaagacaatttgtgcaccacagtgtaatgggcattgcttcggaccaaacccaaaccagtgctgtcacgatgagtgcgcaggagggtgcagcggaccccaggatacggactgctttgcctgcagacattttaatgattcaggagcctgtgtgccacgttgtcctcagccattagtttacaacaaacttaccttccagctggagccaaacccccacaccaaataccagtacgggggtgtgtgcgttgctagctgccctcataactttgttgtagaccagacatcatgcgtgagagcttgtcctcctgacaagatggaggttgacaaaaatggattaaagatgtgtgagccttgtggtggtctctgtccaaaggcctgtgaaggaacagggtctggaagtcgctttcagaccgttgactctagcaatatcgacgggttcgtgaattgcacgaagatcctcggaaacctggactttcttataactgggctcaatggggatccttggcacaagatcccagccctagaccccgaaaaactgaatgtgtttagaacggttcgggagatcacaggctacctgaacattcaatcctggccacctcacatgcacaacttcagcgtgttttcaaacttgactaccatcggcggacgctcgttatataataggggattcagcctgctcattatgaagaatcttaacgtgacgagtctgggatttcgcagtctgaaggaaatatctgcaggtagaatttatatcagtgccaatcggcagctttgttaccatcattctctaaactggactaaggtcctgcgcggacccactgaggaacgacttgacattaaacacaatcgcccacgtcgcgattgcgtggcagaaggtaaggtgtgtgatccactgtgctctagcggaggctgctgggggccaggtcccggacagtgcctgagttgtcggaactatagtcgtggcggtgtgtgtgtgacccattgcaatttcctgaacggggagcctcgggagttcgcacatgaagctgagtgtttttcgtgtcaccctgaatgccagccgatggaggggacagctacctgtaacggttcaggcagcgacacatgcgctcagtgcgcccattttcgcgatggccctcactgtgtgtcctcatgtccccacggcgtgctgggggcaaagggcccaatttataagtacccagatgtgcagaacgaatgccgtccttgccacgaaaattgtacccaagggtgcaaaggacctgagcttcaggactgcctcggacagacactggtcttgattggaaagactcacttgacaatggccctcaccgtcatcgctggccttgttgtaattttcatgatgctgggaggaacctttctctattggcggggacgtcgaatccagaataaacgcgcaatgcggagatacctggaacgcggtgaatcaattgagcctttggaccctagcgaaaaagccaataaagtactggcaaggatttttaaggagaccgaactccggaagctgaaggtcctggggtccggcgtgttcggtacggtgcacaagggtgtttggattcctgaaggcgagtcgatcaaaatccccgtttgcataaaagtaattgaggataagtccggacggcaatcctttcaggccgtaacggaccacatgcttgccattggctcactagatcacgctcacatcgtacggttgctgggattgtgtccaggatcatccctccagttagtgacacagtatctgccactgggcagtttgctcgatcacgtgagacagcaccggggagccctggggcctcaactgctccttaactggggagtccagatagccaaaggtatgtactacttagaagaacatggaatggtgcaccgcaacttggcggctaggaacgtcctcctcaagagcccgagccaggtgcaggtggctgacttcggggtcgcagatctgctacctccggatgacaaacagcttctctactccgaggccaagactcccattaagtggatggcactggagtcaatccacttcggcaaatacacacatcagtctgacgtatggagttatggcgtgactgtttgggagctaatgactttcggagctgagccgtatgccggtctcaggctggctgaggtaccggatctgctggaaaagggagagcgtctcgcccagccgcaaatttgtactatcgatgtgtacatggtcatggtgaaatgttggatgatagatgaaaacatcaggccaacctttaaggaactggcaaatgagttcacccgtatggccagagatccgcctcgttatctggtgataaaacgtgagtctggaccaggtatagcgcctggtcctgaaccgcacggactgaccaataaaaaattagaggaggtcgagttagaaccggaattggaccttgatctcgacctggaggccgaggaagataatctcgctaccaccacacttggttcagcactatccctaccagtgggaacgctgaatcgcccacgaggtagccagtccctgctgtcccccagtagcggctatatgccgatgaatcaaggaaacctgggcgagagctgccaggagtcagccgtgagcggatcaagcgaaagatgcccaaggccagtgagtctgcaccctatgccacgcggatgtcttgcgagcgagagctcagagggccatgtgacaggatcagaagccgagttacaagaaaaggtcagtatgtgtcgcagtcggtccagatcccggagcccacggccacgcggtgattctgcctatcactctcagagacattcactgctaacaccagtgactcccctcagcccgcctggcctcgaggaagaggatgtgaatggctacgtgatgccggatacacaccttaaagggaccccgtcctctagggaaggaacactgtcgagcgttggtctcagctccgtgctgggtactgaagaggaggacgaagacgaggagtatgaatacatgaatcgtcgacgcaggcactcccccccacatccacccagaccttcgagcttagaagagctcggatatgaatacatggatgtgggttcagacctgagcgcctcgctggggtctacgcaaagttgccccctgcatcccgtcccgatcatgccaactgcaggcaccactcctgacgaagactatgaatacatgaatcgccaacgggacggagggggtccaggcggagactatgctgcgatgggcgcatgccctgcaagcgaacagggttacgaggagatgcgcgcatttcaaggaccgggtcaccaggccccacacgtgcattatgcaagattaaagaccctcaggagtctggaagcaacagactcggcatttgacaacccagactactggcattcgcgcctgttcccgaaggctaacgcccagcggacttag

SEQ ID NO: 122780 - DNA, 996 bp, Artificial Sequence
  derived and/or modified sequence
atgcgtgcaaacgatgcgctgcaggtattggggttactttttagcttagctaggggcagcgaagtgggcaattcccaggcagtctgtcctggcactctcaatggtctgtcagttactggcgatgccgagaaccaataccaaacactatacaagctatacgagagatgcgaagtcgtgatgggaaatctggagatcgtcctcaccggacataacgcggacctcagctttttgcagtggatcagagaagtaaccggttatgtcctggtggctatgaatgagttttctacattacccctgcccaacctgcgggtggtacggggaactcaggtgtatgatgggaaatttgccatctttgttatgcttaactacaacaccaacagtagccacgcactgcgccagctgcgcctgacacagctgactgaaattctctcggggggagtgtatattgagaaaaatgacaagctttgtcacatggacactattgactggcgggacatagtaagagatagagacgccgaaatcgttgtgaaggacaatggccgttcctgtcccccatgccatgaagtgtgtaaggggaggtgttggggccctggctccgaggattgtcagacactgaccaaaacaatatgtgcccctcagtgtaacggtcactgctttggcccaaatccgaaccagtgttgccatgatgaatgcgcaggcggatgctccggccctcaagacaccgattgcttcgcttgcaggcacttcaacgattcgggggcatgcgttcctcgctgcccacaaccccttgtgtataataagctaacttttcaactcgagcccaacccccatacaaaatatcagtatggtggagtgtgtgtggcctcttgcccacataactttgtagttgaccagaccagttgtgtaagggcctgcccgcctgacaaaatggaagttgacaaaaacgggctaaaaatgtgcgagccctgtggtggcctgtgcccaaaagttttctag

SEQ ID NO: 122781 - DNA, 3852 bp, Artificial Sequence
  derived and/or modified sequence
atgggaaaccttgaaattgttctcactgggcataatgcagatctttcattcttgcagtggatcagggaggtgacggggtacgtgctggtggctatgaacgagtttagtaccctgccattgcccaacctgcgcgtcgtacggggtacccaggtgtatgacgggaagttcgccatctttgtgatgctgaactataacacaaactcctcgcacgctctacggcaactgcgtctgactcagctgactgaaatcctgagcggtggggtgtacattgagaagaatgacaaactgtgtcacatggacacaatcgattggcgcgacatagtgcgagaccgcgatgcagagattgtggtgaaggacaatggacgaagctgccctccatgtcacgaagtctgtaaagggaggtgctggggtcctggctctgaagattgtcaaactctcactaaaacaatttgtgccccacaatgcaatgggcactgttttggccctaaccctaatcagtgttgccatgatgagtgcgccggaggatgttcaggcccacaggacaccgattgtttcgcatgcaggcactttaatgactccggcgcttgcgtcccaaggtgtcctcaaccgctggtctacaacaaactgaccttccagctggaaccaaatccacatacaaagtatcagtacggtggtgtctgcgtggcctcctgcccccacaattttgtcgtggaccaaacctcatgtgttagagcctgtcccccagacaaaatggaagtggacaaaaacgggctgaagatgtgcgaaccttgtggaggcttgtgtcctaaggcctgcgaaggcacaggaagtgggtcacggtttcagactgtggactccagtaacatcgacggattcgttaactgtactaagattctgggcaacctggattttctgatcaccggactgaacggcgacccctggcacaaaatcccagcgctggacccggagaagctgaacgtgttcaggacggtccgcgagatcactgggtatctaaacattcaatcctggcctccgcacatgcataactttagcgttttttcaaacttgactaccataggtggccgtagcttgtataatagggggttcagtctactgattatgaaaaaccttaatgttacgagccttggcttccggagcctgaaggagatcagcgctggcagaatctatatctcagcaaatcgacagctgtgttaccaccactccctcaattggaccaaggttctcaggggacccacggaggaacgcctagacatcaaacataacaggcctcgccgagattgtgtcgctgagggcaaggtctgcgaccccctgtgctctagcggcggatgctggggcccaggaccagggcagtgtctctcatgcagaaactactcccggggtggtgtctgtgtcacgcattgcaatttcctgaacggcgaacccagagaattcgcccacgaagcagagtgcttcagttgccacccagagtgccagccaatggaggggactgcaacttgtaacgggagcggcagtgacacatgcgcacaatgtgcacacttccgcgatggaccacactgtgtctccagctgtcctcatggcgttcttggcgctaaaggtccaatatataaatatccagacgtacagaacgaatgccggccatgccacgagaattgtactcagggctgcaaaggaccggagctccaggactgtctaggtcagacccttgtattgatcggtaagacacacctcacaatggcgttgaccgtgattgcgggtctagtggttattttcatgatgttagggggtactttcctctactggagagggaggcgaatccagaataaaagagcaatgagaaggtatcttgaacgcggtgagtccattgaaccactcgacccctctgaaaaggcaaacaaggtattggcccgaattttcaaggaaactgagctaaggaagctgaaagttctggggtctggtgtttttggcacagttcacaaaggtgtgtggatacccgaaggggaaagtattaagatcccggtgtgtatcaaggttattgaggacaaaagcggcaggcagtctttccaggcagtgacagatcacatgcttgcaattggcagcctagaccacgctcacattgtgagattactgggcttatgcccaggatcttcactgcagcttgttactcagtatctgccactgggaagcctattggatcacgtaagacaacatagaggggctttggggcctcagctcctactgaactggggtgtgcagatagcgaaggggatgtactacttagaggaacacggaatggtccataggaatctggccgctaggaacgtgctgctgaagtcacctagccaagttcaggtggccgacttcggcgtagccgacctgctaccaccagacgacaaacagttgttatactccgaggccaagacccccattaagtggatggccttggagagcatacacttcggcaagtacacccatcagagcgatgtttggtcgtatggtgtgacagtgtgggagctgatgacttttggcgctgagccatatgcaggattaaggcttgcagaagtgccagatctgttagaaaaaggcgaacggctggcgcagccccagatttgtaccattgacgtgtacatggtaatggtgaagtgctggatgatcgacgaaaacatccgccctacatttaaggagctggccaatgaattcactcgcatggccagagaccctccgagatatctagttattaaaagagagtccggtcccggtatcgcccctggccctgaaccccatggattaaccaataagaaactggaggaggtggagcttgaaccagaactcgacttagacctggatctcgaggcggaggaggacaatcttgcaactaccacactgggtagcgctttgtcgctgccagtcggaaccctcaaccgaccaagggggtcccaatcacttttaagccccagctctggctacatgcccatgaatcaaggaaacctgggcgaaagctgtcaggagtcggccgtgtcaggctctagcgagaggtgcccaagacccgttagcttacacccgatgcctcgcggttgccttgcaagcgagtcaagtgagggacatgtgacagggtctgaagccgaattacaggaaaaggtatccatgtgtcgctcccggtcccggtctagatcccccagacctagaggcgactctgcataccactcccaacggcatagcttactcactccagtcactcccctgagccctcccggtctagaggaagaagatgtaaatgggtatgtgatgccagatactcacctgaaaggcacgccctcgtctcgcgagggtacactctcatccgttggcctatcctcggtgctgggaacagaagaagaggatgaggacgaggaatacgaatatatgaacagaagacgcagacatagtccgccacacccacctagaccctctagtctggaggagttggggtatgaatacatggacgtgggatcagacttgagcgcatctctggggtcaacccagagctgtcctctccatccggtccccattatgccaaccgccggaacaactcctgatgaggattacgagtatatgaaccggcaacgggatggagggggaccagggggtgactatgctgctatgggcgcttgtccggctagtgaacagggctacgaggagatgcgcgcttttcagggacccggacaccaggctccacacgtgcattatgccaggctgaagacactgaggagtctggaagccacagacagcgcttttgacaaccccgattattggcacagcagactgtttcctaaagccaacgcgcaacggacctag

SEQ ID NO: 122782 - DNA, 2100 bp, Artificial Sequence
  derived and/or modified sequence
atggcactgaccgtgatcgctggcctcgtggttatttttatgatgctgggtggcaccttcctctattggcggggtagacggatccagaacaaacgtgcaatgcgcaggtacctggaaagaggtgagagcattgaacctttggacccatcggagaaggcgaataaagtgttagccagaatctttaaggagactgagctcagaaaacttaaggtgttgggatccggagtattcggaactgtccataagggcgtatggatacctgagggagaatcgattaagatcccggtgtgcataaaagtgatagaggacaagagtggacggcagagctttcaggcagttacagaccacatgctggcaattggaagcctggaccacgcccatatcgtgaggctgttgggactttgcccagggagctcgctgcagttggttacccagtacctcccactcggatcattgttagaccacgtgaggcaacatagaggggctttgggaccgcaattgctgttaaactggggcgttcagatagcaaaggggatgtactacttagaggagcacgggatggttcacagaaaccttgctgcccgaaacgtgttgctcaaatcaccgtcccaagtgcaagtggctgactttggcgtagccgacctgctgcccccagatgataagcaacttctatatagtgaggccaagacccccattaaatggatggcgctggagtcaatacacttcggcaagtatacccaccaaagtgacgtctggtcctatggtgttacggtctgggaactgatgacatttggcgcagaaccctatgcagggcttaggttggcagaggtcccagacctgctggagaagggcgagagactcgctcagcctcagatttgcacaatagacgtttatatggtcatggtgaagtgttggatgattgacgaaaatataagaccaacttttaaagaactggcaaatgaattcacaagaatggctcgcgaccctccacggtacctggtaatcaaacgagagagcgggccaggcatcgcccctggtccggaaccacatggcctgaccaacaagaagctggaagaagttgagctcgagcctgagttagacttggacctggacctggaggcagaagaggataatctggctacgaccaccctgggttccgctctttcccttccagtcgggaccttaaaccggcctagaggctcgcagagcctgctgtctccttcatccggctacatgcccatgaaccagggcaacctgggggaatcgtgtcaggagtctgcggttagcgggtccagtgagcgctgtccaaggccagtatctctccatccaatgcctcgagggtgtctcgctagcgaaagcagcgagggtcacgtgaccggaagcgaagccgagctgcaagagaaggtctctatgtgcagatccagaagcagatccagatcccctaggcccaggggcgattcggcttaccactcccagaggcattctctgctgacgcccgttacccccctttctccacctgggctcgaagaagaagatgtaaacgggtacgtcatgccagatactcaccttaaggggaccccctcgtccagagaagggaccctgagcagtgttgggctaagcagcgttttagggactgaagaggaagacgaagacgaggagtacgagtatatgaaccgacggcgacggcattccccccctcatcccccaagaccttcttccctggaggagctaggctatgaatatatggatgtggggagtgacttgagcgcctccctgggaagcacacagagttgccccctccacccagtacccattatgccaacggctggtactacgccagatgaagattatgaatacatgaacaggcagcgtgacggaggagggcctgggggagattatgctgccatgggcgcttgccccgcttccgagcagggctatgaggagatgagagcctttcaagggcctggccatcaggctccccacgtgcattacgccaggttaaagacacttcgctcacttgaggctacggactcagcttttgataatccggattattggcattctcgcctgttcccaaaggcaaacgctcaaaggacctag

SEQ ID NO: 122783 - DNA, 2766 bp, Artificial Sequence
  derived and/or modified sequence
atgcgggcaaacgacgcccttcaggtgctaggactgctgttctccctggccagagggtctgaggtcggcaattcccaagccgtttgcccaggtaccttaaacggacttagcgtcaccggggatgctgaaaaccagtatcagacattatataagttgtacgagcggtgcgaagttgttatgggaaaccttgaaatcgtgttgaccggccataatgccgacctctccttcttgcaatggattagggaggtgactggttacgtgctggtagccatgaatgagttcagcactctacccctccccaatttgagagttgtgcggggaacgcaggtgtacgatggtaagttcgccatcttcgtgatgctcaattataatacaaactccagtcatgctttgcgacagctgcgcctgacacaactcacagagatactgagtggtggcgtttacatcgagaaaaatgataagctctgtcacatggacacaatcgattggagggacatagtcagggacagggatgctgagattgttgttaaggataatggacgcagctgccctccttgtcatgaagtctgtaagggtcggtgttgggggccaggaagcgaggactgtcagactttgactaaaaccatttgtgcccctcagtgcaacggacactgctttgggcctaatcctaatcagtgctgccacgatgagtgtgccggagggtgttcaggcccacaagatacagactgcttcgcttgtcgacattttaacgactcaggagcgtgtgtgccccgatgcccacagcccctggtctacaataagctcacattccagctagaaccaaatcctcatacaaaatatcaatacggcggagtgtgcgtagcaagctgcccacataactttgtggtggaccagacatcttgtgttcgggcatgtccacccgataagatggaagtggacaaaaatggactgaaaatgtgcgaaccctgcggaggcctctgtcccaaagcgtgcgagggcacaggatctgggagccggtttcaaacagttgactcctccaacatcgacggctttgttaattgcactaagatattaggcaatctggactttcttatcactggtctcaacggcgacccttggcataagattccagcactggaccctgagaaactcaacgtgtttcggacagtcagggaaattaccggttacctcaatatccagtcttggcctcctcacatgcacaacttctctgtgttcagtaacctgaccacaattggcggacggagcctgtataatagggggttctcactcctgatcatgaaaaacctaaatgtcacatctctcggattcaggtccctgaaagaaattagcgccggaagaatttatataagcgcgaaccggcagctgtgttaccatcatagtctgaattggactaaagtgctaagaggccctaccgaagagcggctagacattaaacataatagacctagacgggattgcgtagcggaggggaaggtgtgcgacccattatgcagcagcggcggatgttggggacccggtcctggacagtgtctttcatgtcggaactattccagagggggtgtgtgtgtgacacattgcaattttttgaacggcgaacctcgagagtttgcacacgaagccgagtgtttttcctgccaccctgagtgccagccaatggaaggtaccgccacatgcaacgggagcggaagtgacacatgcgctcagtgcgcccactttcgtgacggtcctcactgcgttagcagctgcccccatggcgtgctgggcgctaaagggccaatatacaaataccccgacgtgcagaatgagtgtaggccatgccatgagaactgtacccaaggatgcaagggccctgagctgcaggattgcttgggccagaccctagttctgatcggcaagacacatctgacgatggctctcacggttatcgcgggactcgttgtcatcttcatgatgttaggaggcaccttcttatattggaggggtcggagaatccagaacaaacgtgcaatgcgtcggtacctggaacgtggggagtcaatagaacctctggatcccagtgagaaagctaataaggtgctagccaggatattcaaagagactgagttacgaaaactcaaagtcctcggtagcggggtatttggaacagttcataagggggtgtggatccccgagggagagtcaataaagatacccgtgtgtataaaagtcattgaagacaagtccggaaggcagtcatttcaagccgtgaccgaccacatgttagccattgggagtcttgaccacgcgcatatcgtgcgcttactcggtctttgccccggtagcagtcttcagttggtcacacagtatctgcctctcgggtctttgctggatcatgtgcggcagcatagaggcgctctgggacctcagcttctactgaattggggggtgcagatcgcgaagggaatgtattacctggaggagcacggcatggtccaccggaaccttgcagccaggaatgtgctgctcaagagtccttctcaggttcaggttgccgatttcggcgttgccgatttgcttccccctgatgataagcaactcctctactccgaggcaaagacgcccatcaaatggatggcccttgaatcaattcactttggtaagtatacgcaccaatccgatgtctggtcctacggtcaatgtatatggatgccatcgttacctagtcttgccccagtatcaaacctgccatttgagactccttcgtag

SEQ ID NO: 122784 - DNA, 5919 bp, Artificial Sequence
  derived and/or modified sequence
attacccttccctggatctgggggctttcggaatctcgacctccccttggcctatctcctgcagaaaaattagggtgagccccatcctcgatctgctccgccaagttgcgggaccgcggggcgtggcacgctcggggcaggcggtccgaggctccgcaatccctactccagcctcgcgcgggagggggcgcggccgtgactcacccccttccctctgcgttcctccctccctctctctctctctctcacacacacacacccctcccctgccatccctccccggactccggctccggctccgattgcaatttgcaacctccgctgccgtcgccgcagcagccaccaattcgccagcggttcaggtggctcttgcctcgatgtcctagcctaggggcccccgggccggacttggctgggctcccttcaccctctgcggagtcatgagggcgaacgacgctctgcaggtgctgggcttgcttttcagcctggcccggggctccgaggtgggcaactctcaggcagtgtgtcctgggactctgaatggcctgagtgtgaccggcgatgctgagaaccaataccagacactgtacaagctctacgagaggtgtgaggtggtgatggggaaccttgagattgtgctcacgggacacaatgccgacctctccttcctgcagtggattcgagaagtgacaggctatgtcctcgtggccatgaatgaattctctactctaccattgcccaacctccgcgtggtgcgagggacccaggtctacgatgggaagtttgccatcttcgtcatgttgaactataacaccaactccagccacgctctgcgccagctccgcttgactcagctcaccgagattctgtcagggggtgtttatattgagaagaacgataagctttgtcacatggacacaattgactggagggacatcgtgagggaccgagatgctgagatagtggtgaaggacaatggcagaagctgtcccccctgtcatgaggtttgcaaggggcgatgctggggtcctggatcagaagactgccagacattgaccaagaccatctgtgctcctcagtgtaatggtcactgctttgggcccaaccccaaccagtgctgccatgatgagtgtgccgggggctgctcaggccctcaggacacagactgctttgcctgccggcacttcaatgacagtggagcctgtgtacctcgctgtccacagcctcttgtctacaacaagctaactttccagctggaacccaatccccacaccaagtatcagtatggaggagtttgtgtagccagctgtccccataactttgtggtggatcaaacatcctgtgtcagggcctgtcctcctgacaagatggaagtagataaaaatgggctcaagatgtgtgagccttgtgggggactatgtcccaaagcctgtgagggaacaggctctgggagccgcttccagactgtggactcgagcaacattgatggatttgtgaactgcaccaagatcctgggcaacctggactttctgatcaccggcctcaatggagacccctggcacaagatccctgccctggacccagagaagctcaatgtcttccggacagtacgggagatcacaggttacctgaacatccagtcctggccgccccacatgcacaacttcagtgttttttccaatttgacaaccattggaggcagaagcctctacaaccggggcttctcattgttgatcatgaagaacttgaatgtcacatctctgggcttccgatccctgaaggaaattagtgctgggcgtatctatataagtgccaataggcagctctgctaccaccactctttgaactggaccaaggtgcttcgggggcctacggaagagcgactagacatcaagcataatcggccgcgcagagactgcgtggcagagggcaaagtgtgtgacccactgtgctcctctgggggatgctggggcccaggccctggtcagtgcttgtcctgtcgaaattatagccgaggaggtgtctgtgtgacccactgcaactttctgaatggggagcctcgagaatttgcccatgaggccgaatgcttctcctgccacccggaatgccaacccatggagggcactgccacatgcaatggctcgggctctgatacttgtgctcaatgtgcccattttcgagatgggccccactgtgtgagcagctgcccccatggagtcctaggtgccaagggcccaatctacaagtacccagatgttcagaatgaatgtcggccctgccatgagaactgcacccaggggtgtaaaggaccagagcttcaagactgtttaggacaaacactggtgctgatcggcaaaacccatctgacaatggctttgacagtgatagcaggattggtagtgattttcatgatgctgggcggcacttttctctactggcgtgggcgccggattcagaataaaagggctatgaggcgatacttggaacggggtgagagcatagagcctctggaccccagtgagaaggctaacaaagtcttggccagaatcttcaaagagacagagctaaggaagcttaaagtgcttggctcgggtgtctttggaactgtgcacaaaggagtgtggatccctgagggtgaatcaatcaagattccagtctgcattaaagtcattgaggacaagagtggacggcagagttttcaagctgtgacagatcatatgctggccattggcagcctggaccatgcccacattgtaaggctgctgggactatgcccagggtcatctctgcagcttgtcactcaatatttgcctctgggttctctgctggatcatgtgagacaacaccggggggcactggggccacagctgctgctcaactggggagtacaaattgccaagggaatgtactaccttgaggaacatggtatggtgcatagaaacctggctgcccgaaacgtgctactcaagtcacccagtcaggttcaggtggcagattttggtgtggctgacctgctgcctcctgatgataagcagctgctatacagtgaggccaagactccaattaagtggatggcccttgagagtatccactttgggaaatacacacaccagagtgatgtctggagctatggtgtgacagtttgggagttgatgaccttcggggcagagccctatgcagggctacgattggctgaagtaccagacctgctagagaagggggagcggttggcacagccccagatctgcacaattgatgtctacatggtgatggtcaagtgttggatgattgatgagaacattcgcccaacctttaaagaactagccaatgagttcaccaggatggcccgagacccaccacggtatctggtcataaagagagagagtgggcctggaatagcccctgggccagagccccatggtctgacaaacaagaagctagaggaagtagagctggagccagaactagacctagacctagacttggaagcagaggaggacaacctggcaaccaccacactgggctccgccctcagcctaccagttggaacacttaatcggccacgtgggagccagagccttttaagtccatcatctggatacatgcccatgaaccagggtaatcttggggagtcttgccaggagtctgcagtttctgggagcagtgaacggtgcccccgtccagtctctctacacccaatgccacggggatgcctggcatcagagtcatcagaggggcatgtaacaggctctgaggctgagctccaggagaaagtgtcaatgtgtaggagccggagcaggagccggagcccacggccacgcggagatagcgcctaccattcccagcgccacagtctgctgactcctgttaccccactctccccacccgggttagaggaagaggatgtcaacggttatgtcatgccagatacacacctcaaaggtactccctcctcccgggaaggcaccctttcttcagtgggtctcagttctgtcctgggtactgaagaagaagatgaagatgaggagtatgaatacatgaaccggaggagaaggcacagtccacctcatccccctaggccaagttcccttgaggagctgggttatgagtacatggatgtggggtcagacctcagtgcctctctgggcagcacacagagttgcccactccaccctgtacccatcatgcccactgcaggcacaactccagatgaagactatgaatatatgaatcggcaacgagatggaggtggtcctgggggtgattatgcagccatgggggcctgcccagcatctgagcaagggtatgaagagatgagagcttttcaggggcctggacatcaggccccccatgtccattatgcccgcctaaaaactctacgtagcttagaggctacagactctgcctttgataaccctgattactggcatagcaggcttttccccaaggctaatgcccagagaacgtaactcctgctccctgtggcactcagggagcatttaatggcagctagtgcctttagagggtaccgtcttctccctattccctctctctcccaggtcccagccccttttccccagtcccagacaattccattcaatctttggaggcttttaaacattttgacacaaaattcttatggtatgtagccagctgtgcactttcttctctttcccaaccccaggaaaggttttccttattttgtgtgctttcccagtcccattcctcagcttcttcacaggcactcctggagatatgaaggattactctccatatcccttcctctcaggctcttgactacttggaactaggctcttatgtgtgcctttgtttcccatcagactgtcaagaagaggaaagggaggaaacctagcagaggaaagtgtaattttggtttatgactcttaaccccctagaaagacagaagcttaaaatctgtgaagaaagaggttaggagtagatattgattactatcataattcagcacttaactatgagccaggcatcatactaaacttcacctacattatctcacttagtcctttatcatccttaaaacaattctgtgacatacatattatctcattttacacaaagggaagtcgggcatggtggctcatgcctgtaatctcagcactttgggaggctgaggcagaaggattacctgaggcaaggagtttgagaccagcttagccaacatagtaagacccccatctctttaaaaaaaaaaaaaaaaaaaaaaaaaaaactttagaactgggtgcagtggctcatgcctgtaatcccagccagcactttgggaggctgagatgggaagatcacttgagcccagaattagagataagcctatggaaacatagcaagacactgtctctacaggggaaaaaaaaaaaagaaactgagccttaaagagatgaaataaattaagcagtagatccaggatgcaaaatcctcccaattcctgtgcatgtgctcttattgtaaggtgccaagaaaaactgatttaagttacagcccttgtttaaggggcactgtttcttgtttttgcactgaatcaagtctaaccccaacagccacatcctcctatacctagacatctcatctcaggaagtggtggtgggggtagtcagaaggaaaaataactggacatctttgtgtaaaccataatccacatgtgccgtaaatgatcttcactccttatccgagggcaaattcacaaggatccccaagatccacttttagaagccattctcatccagcagtgagaagcttccaggtaggacagaaaaaagatccagcttcagctgcacacctctgtccccttggatggggaactaagggaaaacgtctgttgtatcactgaagttttttgttttgtttttatacgtgtctgaataaaaatgccaaagttttttttca

SEQ ID NO: 122785 - DNA, 1186 bp, Artificial Sequence
  derived and/or modified sequence
acacacacacacccctcccctgccatccctccccggactccggctccggctccgattgcaatttgcaacctccgctgccgtcgccgcagcagccaccaattcgccagcggttcaggtggctcttgcctcgatgtcctagcctaggggcccccgggccggacttggctgggctcccttcaccctctgcggagtcatgagggcgaacgacgctctgcaggtgctgggcttgcttttcagcctggcccggggctccgaggtgggcaactctcaggcagtgtgtcctgggactctgaatggcctgagtgtgaccggcgatgctgagaaccaataccagacactgtacaagctctacgagaggtgtgaggtggtgatggggaaccttgagattgtgctcacgggacacaatgccgacctctccttcctgcagtggattcgagaagtgacaggctatgtcctcgtggccatgaatgaattctctactctaccattgcccaacctccgcgtggtgcgagggacccaggtctacgatgggaagtttgccatcttcgtcatgttgaactataacaccaactccagccacgctctgcgccagctccgcttgactcagctcaccgagattctgtcagggggtgtttatattgagaagaacgataagctttgtcacatggacacaattgactggagggacatcgtgagggaccgagatgctgagatagtggtgaaggacaatggcagaagctgtcccccctgtcatgaggtttgcaaggggcgatgctggggtcctggatcagaagactgccagacattgaccaagaccatctgtgctcctcagtgtaatggtcactgctttgggcccaaccccaaccagtgctgccatgatgagtgtgccgggggctgctcaggccctcaggacacagactgctttgcctgccggcacttcaatgacagtggagcctgtgtacctcgctgtccacagcctcttgtctacaacaagctaactttccagctggaacccaatccccacaccaagtatcagtatggaggagtttgtgtagccagctgtccccataactttgtggtggatcaaacatcctgtgtcagggcctgtcctcctgacaagatggaagtagataaaaatgggctcaagatgtgtgagccttgtgggggactatgtcccaaagttttc

SEQ ID NO: 122786 - DNA, 4353 bp, Artificial Sequence
  derived and/or modified sequence
atttattccaggacctagagagaggcaggatgagggtagagaattaaccccttagtacccaaaagaagcacagaggggtcccaggttgaaaaaggaaatcttttcaccttcccattcatggaatgtgtgtcctgggactctgaatggcctgagtgtgaccggcgatgctgagaaccaataccagacactgtacaagctctacgagaggtgtgaggtggtgatggggaaccttgagattgtgctcacgggacacaatgccgacctctccttcctgcagtggattcgagaagtgacaggctatgtcctcgtggccatgaatgaattctctactctaccattgcccaacctccgcgtggtgcgagggacccaggtctacgatgggaagtttgccatcttcgtcatgttgaactataacaccaactccagccacgctctgcgccagctccgcttgactcagctcaccgagattctgtcagggggtgtttatattgagaagaacgataagctttgtcacatggacacaattgactggagggacatcgtgagggaccgagatgctgagatagtggtgaaggacaatggcagaagctgtcccccctgtcatgaggtttgcaaggggcgatgctggggtcctggatcagaagactgccagacattgaccaagaccatctgtgctcctcagtgtaatggtcactgctttgggcccaaccccaaccagtgctgccatgatgagtgtgccgggggctgctcaggccctcaggacacagactgctttgcctgccggcacttcaatgacagtggagcctgtgtacctcgctgtccacagcctcttgtctacaacaagctaactttccagctggaacccaatccccacaccaagtatcagtatggaggagtttgtgtagccagctgtccccataactttgtggtggatcaaacatcctgtgtcagggcctgtcctcctgacaagatggaagtagataaaaatgggctcaagatgtgtgagccttgtgggggactatgtcccaaagcctgtgagggaacaggctctgggagccgcttccagactgtggactcgagcaacattgatggatttgtgaactgcaccaagatcctgggcaacctggactttctgatcaccggcctcaatggagacccctggcacaagatccctgccctggacccagagaagctcaatgtcttccggacagtacgggagatcacaggttacctgaacatccagtcctggccgccccacatgcacaacttcagtgttttttccaatttgacaaccattggaggcagaagcctctacaaccggggcttctcattgttgatcatgaagaacttgaatgtcacatctctgggcttccgatccctgaaggaaattagtgctgggcgtatctatataagtgccaataggcagctctgctaccaccactctttgaactggaccaaggtgcttcgggggcctacggaagagcgactagacatcaagcataatcggccgcgcagagactgcgtggcagagggcaaagtgtgtgacccactgtgctcctctgggggatgctggggcccaggccctggtcagtgcttgtcctgtcgaaattatagccgaggaggtgtctgtgtgacccactgcaactttctgaatggggagcctcgagaatttgcccatgaggccgaatgcttctcctgccacccggaatgccaacccatggagggcactgccacatgcaatggctcgggctctgatacttgtgctcaatgtgcccattttcgagatgggccccactgtgtgagcagctgcccccatggagtcctaggtgccaagggcccaatctacaagtacccagatgttcagaatgaatgtcggccctgccatgagaactgcacccaggggtgtaaaggaccagagcttcaagactgtttaggacaaacactggtgctgatcggcaaaacccatctgacaatggctttgacagtgatagcaggattggtagtgattttcatgatgctgggcggcacttttctctactggcgtgggcgccggattcagaataaaagggctatgaggcgatacttggaacggggtgagagcatagagcctctggaccccagtgagaaggctaacaaagtcttggccagaatcttcaaagagacagagctaaggaagcttaaagtgcttggctcgggtgtctttggaactgtgcacaaaggagtgtggatccctgagggtgaatcaatcaagattccagtctgcattaaagtcattgaggacaagagtggacggcagagttttcaagctgtgacagatcatatgctggccattggcagcctggaccatgcccacattgtaaggctgctgggactatgcccagggtcatctctgcagcttgtcactcaatatttgcctctgggttctctgctggatcatgtgagacaacaccggggggcactggggccacagctgctgctcaactggggagtacaaattgccaagggaatgtactaccttgaggaacatggtatggtgcatagaaacctggctgcccgaaacgtgctactcaagtcacccagtcaggttcaggtggcagattttggtgtggctgacctgctgcctcctgatgataagcagctgctatacagtgaggccaagactccaattaagtggatggcccttgagagtatccactttgggaaatacacacaccagagtgatgtctggagctatggtgtgacagtttgggagttgatgaccttcggggcagagccctatgcagggctacgattggctgaagtaccagacctgctagagaagggggagcggttggcacagccccagatctgcacaattgatgtctacatggtgatggtcaagtgttggatgattgatgagaacattcgcccaacctttaaagaactagccaatgagttcaccaggatggcccgagacccaccacggtatctggtcataaagagagagagtgggcctggaatagcccctgggccagagccccatggtctgacaaacaagaagctagaggaagtagagctggagccagaactagacctagacctagacttggaagcagaggaggacaacctggcaaccaccacactgggctccgccctcagcctaccagttggaacacttaatcggccacgtgggagccagagccttttaagtccatcatctggatacatgcccatgaaccagggtaatcttggggagtcttgccaggagtctgcagtttctgggagcagtgaacggtgcccccgtccagtctctctacacccaatgccacggggatgcctggcatcagagtcatcagaggggcatgtaacaggctctgaggctgagctccaggagaaagtgtcaatgtgtaggagccggagcaggagccggagcccacggccacgcggagatagcgcctaccattcccagcgccacagtctgctgactcctgttaccccactctccccacccgggttagaggaagaggatgtcaacggttatgtcatgccagatacacacctcaaaggtactccctcctcccgggaaggcaccctttcttcagtgggtctcagttctgtcctgggtactgaagaagaagatgaagatgaggagtatgaatacatgaaccggaggagaaggcacagtccacctcatccccctaggccaagttcccttgaggagctgggttatgagtacatggatgtggggtcagacctcagtgcctctctgggcagcacacagagttgcccactccaccctgtacccatcatgcccactgcaggcacaactccagatgaagactatgaatatatgaatcggcaacgagatggaggtggtcctgggggtgattatgcagccatgggggcctgcccagcatctgagcaagggtatgaagagatgagagcttttcaggggcctggacatcaggccccccatgtccattatgcccgcctaaaaactctacgtagcttagaggctacagactctgcctttgataaccctgattactggcatagcaggcttttccccaaggctaatgcccagagaacgtaactcctgctccctgtggcactcagggagcatttaatggcagctagtgcctttagagggtaccgtcttctccctattccctctctctcccaggtcccagccccttttccccagtcccagacaattccattcaatctttggaggcttttaaacattttgacacaaaattcttatggtatgtagccagctgtgcactttcttctctttcccaaccccaggaaaggttttccttattttgtgtgctttcccagtcccattcctcagcttcttcacaggcactcctg

SEQ ID NO: 122787 - DNA, 2723 bp, Artificial Sequence
  derived and/or modified sequence
aatttgcaacctccgctgccgtcgccgcagcagccaccaattcgccagcggttcaggtggctcttgcctcgatgtcctagcctaggggcccccgggccggacttggctgggctcccttcaccctctgcggagtcatgagggcgaacgacgctctgcaggtgccaagggcccaatctacaagtacccagatgttcagaatgaatgtcggccctgccatgagaactgcacccaggggtgtaaaggaccagagcttcaagactgtttaggacaaacactggtgctgatcggcaaaacccatctgacaatggctttgacagtgatagcaggattggtagtgattttcatgatgctgggcggcacttttctctactggcgtgggcgccggattcagaataaaagggctatgaggcgatacttggaacggggtgagagcatagagcctctggaccccagtgagaaggctaacaaagtcttggccagaatcttcaaagagacagagctaaggaagcttaaagtgcttggctcgggtgtctttggaactgtgcacaaaggagtgtggatccctgagggtgaatcaatcaagattccagtctgcattaaagtcattgaggacaagagtggacggcagagttttcaagctgtgacagatcatatgctggccattggcagcctggaccatgcccacattgtaaggctgctgggactatgcccagggtcatctctgcagcttgtcactcaatatttgcctctgggttctctgctggatcatgtgagacaacaccggggggcactggggccacagctgctgctcaactggggagtacaaattgccaagggaatgtactaccttgaggaacatggtatggtgcatagaaacctggctgcccgaaacgtgctactcaagtcacccagtcaggttcaggtggcagattttggtgtggctgacctgctgcctcctgatgataagcagctgctatacagtgaggccaagactccaattaagtggatggcccttgagagtatccactttgggaaatacacacaccagagtgatgtctggagctatggtgtgacagtttgggagttgatgaccttcggggcagagccctatgcagggctacgattggctgaagtaccagacctgctagagaagggggagcggttggcacagccccagatctgcacaattgatgtctacatggtgatggtcaagtgttggatgattgatgagaacattcgcccaacctttaaagaactagccaatgagttcaccaggatggcccgagacccaccacggtatctggtcataaagagagagagtgggcctggaatagcccctgggccagagccccatggtctgacaaacaagaagctagaggaagtagagctggagccagaactagacctagacctagacttggaagcagaggaggacaacctggcaaccaccacactgggctccgccctcagcctaccagttggaacacttaatcggccacgtgggagccagagccttttaagtccatcatctggatacatgcccatgaaccagggtaatcttggggagtcttgccaggagtctgcagtttctgggagcagtgaacggtgcccccgtccagtctctctacacccaatgccacggggatgcctggcatcagagtcatcagaggggcatgtaacaggctctgaggctgagctccaggagaaagtgtcaatgtgtaggagccggagcaggagccggagcccacggccacgcggagatagcgcctaccattcccagcgccacagtctgctgactcctgttaccccactctccccacccgggttagaggaagaggatgtcaacggttatgtcatgccagatacacacctcaaaggtactccctcctcccgggaaggcaccctttcttcagtgggtctcagttctgtcctgggtactgaagaagaagatgaagatgaggagtatgaatacatgaaccggaggagaaggcacagtccacctcatccccctaggccaagttcccttgaggagctgggttatgagtacatggatgtggggtcagacctcagtgcctctctgggcagcacacagagttgcccactccaccctgtacccatcatgcccactgcaggcacaactccagatgaagactatgaatatatgaatcggcaacgagatggaggtggtcctgggggtgattatgcagccatgggggcctgcccagcatctgagcaagggtatgaagagatgagagcttttcaggggcctggacatcaggccccccatgtccattatgcccgcctaaaaactctacgtagcttagaggctacagactctgcctttgataaccctgattactggcatagcaggcttttccccaaggctaatgcccagagaacgtaactcctgctccctgtggcactcagggagcatttaatggcagctagtgcctttagagggtaccgtcttctccctattccctctctctcccaggtcccagccccttttccccagtcccagacaattccattcaatctttggaggcttttaaacattttgacacaaaattcttatggtatgtagccagctgtgcactttcttctctttcccaaccccaggaaaggttttccttattttgtgtgctttcccagtcccattcctcagcttcttcacaggcactcctggagatatgaaggattactctccatatcccttcctctca

SEQ ID NO: 122788 - DNA, 4382 bp, Artificial Sequence
  derived and/or modified sequence
atttgcaacctccgctgccgtcgccgcagcagccaccaattcgccagcggttcaggtggctcttgcctcgatgtcctagcctaggggcccccgggccggacttggctgggctcccttcaccctctgcggagtcatgagggcgaacgacgctctgcaggtgctgggcttgcttttcagcctggcccggggctccgaggtgggcaactctcaggcagtgtgtcctgggactctgaatggcctgagtgtgaccggcgatgctgagaaccaataccagacactgtacaagctctacgagaggtgtgaggtggtgatggggaaccttgagattgtgctcacgggacacaatgccgacctctccttcctgcagtggattcgagaagtgacaggctatgtcctcgtggccatgaatgaattctctactctaccattgcccaacctccgcgtggtgcgagggacccaggtctacgatgggaagtttgccatcttcgtcatgttgaactataacaccaactccagccacgctctgcgccagctccgcttgactcagctcaccgagattctgtcagggggtgtttatattgagaagaacgataagctttgtcacatggacacaattgactggagggacatcgtgagggaccgagatgctgagatagtggtgaaggacaatggcagaagctgtcccccctgtcatgaggtttgcaaggggcgatgctggggtcctggatcagaagactgccagacattgaccaagaccatctgtgctcctcagtgtaatggtcactgctttgggcccaaccccaaccagtgctgccatgatgagtgtgccgggggctgctcaggccctcaggacacagactgctttgcctgccggcacttcaatgacagtggagcctgtgtacctcgctgtccacagcctcttgtctacaacaagctaactttccagctggaacccaatccccacaccaagtatcagtatggaggagtttgtgtagccagctgtccccataactttgtggtggatcaaacatcctgtgtcagggcctgtcctcctgacaagatggaagtagataaaaatgggctcaagatgtgtgagccttgtgggggactatgtcccaaagcctgtgagggaacaggctctgggagccgcttccagactgtggactcgagcaacattgatggatttgtgaactgcaccaagatcctgggcaacctggactttctgatcaccggcctcaatggagacccctggcacaagatccctgccctggacccagagaagctcaatgtcttccggacagtacgggagatcacaggttacctgaacatccagtcctggccgccccacatgcacaacttcagtgttttttccaatttgacaaccattggaggcagaagcctctacaaccggggcttctcattgttgatcatgaagaacttgaatgtcacatctctgggcttccgatccctgaaggaaattagtgctgggcgtatctatataagtgccaataggcagctctgctaccaccactctttgaactggaccaaggtgcttcgggggcctacggaagagcgactagacatcaagcataatcggccgcgcagagactgcgtggcagagggcaaagtgtgtgacccactgtgctcctctgggggatgctggggcccaggccctggtcagtgcttgtcctgtcgaaattatagccgaggaggtgtctgtgtgacccactgcaactttctgaatggggagcctcgagaatttgcccatgaggccgaatgcttctcctgccacccggaatgccaacccatggagggcactgccacatgcaatggctcgggctctgatacttgtgctcaatgtgcccattttcgagatgggccccactgtgtgagcagctgcccccatggagtcctaggtgccaagggcccaatctacaagtacccagatgttcagaatgaatgtcggccctgccatgagaactgcacccaggggtgtaaaggaccagagcttcaagactgtttaggacaaacactggtgctgatcggcaaaacccatctgacaatggctttgacagtgatagcaggattggtagtgattttcatgatgctgggcggcacttttctctactggcgtgggcgccggattcagaataaaagggctatgaggcgatacttggaacggggtgagagcatagagcctctggaccccagtgagaaggctaacaaagtcttggccagaatcttcaaagagacagagctaaggaagcttaaagtgcttggctcgggtgtctttggaactgtgcacaaaggagtgtggatccctgagggtgaatcaatcaagattccagtctgcattaaagtcattgaggacaagagtggacggcagagttttcaagctgtgacagatcatatgctggccattggcagcctggaccatgcccacattgtaaggctgctgggactatgcccagggtcatctctgcagcttgtcactcaatatttgcctctgggttctctgctggatcatgtgagacaacaccggggggcactggggccacagctgctgctcaactggggagtacaaattgccaagggaatgtactaccttgaggaacatggtatggtgcatagaaacctggctgcccgaaacgtgctactcaagtcacccagtcaggttcaggtggcagattttggtgtggctgacctgctgcctcctgatgataagcagctgctatacagtgaggccaagactccaattaagtggatggcccttgagagtatccactttgggaaatacacacaccagagtgatgtctggagctatggtcagtgcatctggatgccctctctaccatcactggccccagtttcaaatttaccttttgagaccccctcttagaatctctaagcacttcagatttttgtgttagatcaggttctgccttcccttcacttcatgcccatgtctactattttgccagtgactagtccatgtcttcctgcaacaggtgtgacagtttgggagttgatgaccttcggggcagagccctatgcagggctacgattggctgaagtaccagacctgctagagaagggggagcggttggcacagccccagatctgcacaattgatgtctacatggtgatggtcaagtgttggatgattgatgagaacattcgcccaacctttaaagaactagccaatgagttcaccaggatggcccgagacccaccacggtatctggtcataaagagagagagtgggcctggaatagcccctgggccagagccccatggtctgacaaacaagaagctagaggaagtagagctggagccagaactagacctagacctagacttggaagcagaggaggacaacctggcaaccaccacactgggctccgccctcagcctaccagttggaacacttaatcggccacgtgggagccagagccttttaagtccatcatctggatacatgcccatgaaccagggtaatcttggggagtcttgccaggagtctgcagtttctgggagcagtgaacggtgcccccgtccagtctctctacacccaatgccacggggatgcctggcatcagagtcatcagaggggcatgtaacaggctctgaggctgagctccaggagaaagtgtcaatgtgtaggagccggagcaggagccggagcccacggccacgcggagatagcgcctaccattcccagcgccacagtctgctgactcctgttaccccactctccccacccgggttagaggaagaggatgtcaacggttatgtcatgccagatacacacctcaaaggtactccctcctcccgggaaggcaccctttcttcagtgggtctcagttctgtcctgggtactgaagaagaagatgaagatgaggagtatgaatacatgaaccggaggagaaggcacagtccacctcatccccctaggccaagttcccttgaggagctgggttatgagtacatggatgtggggtcagacctcagtgcctctctgggcagcacacagagttgcccactccaccctgtacccatcatgcccactgcaggcacaactccagatgaagactatgaatatatgaatcggcaacgagatggaggtggtcctgggggtgattatgcagccatgggggcctgcccagcatctgagcaagggtatgaagagatgagagcttttcaggggcctggacatcaggccccccatgtccattatgcccgcctaaaaactctacgtagcttagaggctacagactctgcctttgataaccctgattactggcatagcaggcttttccccaaggctaatgcccagagaacgtaactcctgctccctgtggcactcagggagcatttaatgg

SEQ ID NO: 122789 - protein, 297 aa, Artificial Sequence
  derived and/or modified sequence
MDPGKDKEGVPQPSGPPARKKFVIPLDEDEVPPGVAKPLFRSTQSLPTVDTSAQAAPQTYAEYAISQPLEGAGATCPTGSEPLAGETPNQALKPGAKSNSIIVSPRQRGNPVLKFVRNVPWEFGDVIPDYVLGQSTCALFLSLRYHNLHPDYIHGRLQSLGKNFALRVLLVQVDVKDPQQALKELAKMCILADCTLILAWSPEEAGRYLETYKAYEQKPADLLMEKLEQDFVSRVTECLTTVKSVNKTDSQTLLTTFGSLEQLIAASREDLALCPGLGPQKARRLFDVLHEPFLKVP

SEQ ID NO: 122790 - protein, 225 aa, Artificial Sequence
  derived and/or modified sequence
MDPGKDKEGVPQPSGPPARKKFVIPLDEDEVPPGVRGNPVLKFVRNVPWEFGDVIPDYVLGQSTCALFLSLRYHNLHPDYIHGRLQSLGKNFALRVLLVQVDVKDPQQALKELAKMCILADCTLILAWSPEEAGRYLETYKAYEQKPADLLMEKLEQDFVSRVTECLTTVKSVNKTDSQTLLTTFGSLEQLIAASREDLALCPGLGPQKARRLFDVLHEPFLKVP

SEQ ID NO: 122791 - DNA, 894 bp, Artificial Sequence
  derived and/or modified sequence
atggaccccggcaaggacaaggagggcgtgccccagcccagcggcccccccgccagaaagaagttcgtgatccccctggacgaggacgaggtgccccccggcgtggccaagcccctgttcagaagcacccagagcctgcccaccgtggacaccagcgcccaggccgccccccagacctacgccgagtacgccatcagccagcccctggagggcgccggcgccacctgccccaccggcagcgagcccctggccggcgagacccccaaccaggccctgaagcccggcgccaagagcaacagcatcatcgtgagccccagacagagaggcaaccccgtgctgaagttcgtgagaaacgtgccctgggagttcggcgacgtgatccccgactacgtgctgggccagagcacctgcgccctgttcctgagcctgagataccacaacctgcaccccgactacatccacggcagactgcagagcctgggcaagaacttcgccctgagagtgctgctggtgcaggtggacgtgaaggacccccagcaggccctgaaggagctggccaagatgtgcatcctggccgactgcaccctgatcctggcctggagccccgaggaggccggcagatacctggagacctacaaggcctacgagcagaagcccgccgacctgctgatggagaagctggagcaggacttcgtgagcagagtgaccgagtgcctgaccaccgtgaagagcgtgaacaagaccgacagccagaccctgctgaccaccttcggcagcctggagcagctgatcgccgccagcagagaggacctggccctgtgccccggcctgggcccccagaaggccagaagactgttcgacgtgctgcacgagcccttcctgaaggtgccctag

SEQ ID NO: 122792 - DNA, 678 bp, Artificial Sequence
  derived and/or modified sequence
atggaccccggcaaggacaaggagggcgtgccccagcccagcggcccccccgccagaaagaagttcgtgatccccctggacgaggacgaggtgccccccggcgtgagaggcaaccccgtgctgaagttcgtgagaaacgtgccctgggagttcggcgacgtgatccccgactacgtgctgggccagagcacctgcgccctgttcctgagcctgagataccacaacctgcaccccgactacatccacggcagactgcagagcctgggcaagaacttcgccctgagagtgctgctggtgcaggtggacgtgaaggacccccagcaggccctgaaggagctggccaagatgtgcatcctggccgactgcaccctgatcctggcctggagccccgaggaggccggcagatacctggagacctacaaggcctacgagcagaagcccgccgacctgctgatggagaagctggagcaggacttcgtgagcagagtgaccgagtgcctgaccaccgtgaagagcgtgaacaagaccgacagccagaccctgctgaccaccttcggcagcctggagcagctgatcgccgccagcagagaggacctggccctgtgccccggcctgggcccccagaaggccagaagactgttcgacgtgctgcacgagcccttcctgaaggtgccctag

SEQ ID NO: 122793 - DNA, 894 bp, Artificial Sequence
  derived and/or modified sequence
atggaccccggaaaggacaaggaaggggttccccagcccagtggaccgcccgctcggaagaagtttgtgataccactggatgaagatgaagtcccccctggagtggccaagcccctgtttagatctacccagtctctgcctacagttgacacaagcgctcaagctgcacctcaaacctatgcagaatacgccattagtcaacccctggagggcgccggtgccacatgcccgaccggtagcgagcctctggctggcgagacccccaaccaagcactcaaacctggtgccaagagcaatagcatcatcgtcagtcctcggcagcgtggcaacccggtgttgaaattcgtaagaaatgtgccctgggagtttggcgatgtgatccccgattatgtgttgggacagtcaacttgtgccctatttctgagcctccgctatcacaatctacaccctgactacatccatggcaggctacagtctttgggcaagaatttcgccttaagggtgttactcgtccaggttgatgtaaaagatcctcaacaagcgctgaaagaattggccaaaatgtgcatactggccgattgcacattgattctggcgtggtctccagaagaggccggtagatatcttgaaacatacaaagcctatgagcaaaaacctgctgacctgctgatggaaaagctggagcaagactttgtcagcagagtgacggagtgccttacaacagttaaatctgtgaataaaactgatagtcagaccctactcaccaccttcggcagtttggaacagcttatcgccgcctcaagagaggacctggcactgtgtcccgggctgggcccccaaaaagctaggcgtttatttgacgtgttacatgagccattcctgaaagttccatag

SEQ ID NO: 122794 - DNA, 678 bp, Artificial Sequence
  derived and/or modified sequence
atggatcccggtaaagataaagaaggtgtcccccagccaagtgggcctcccgccagaaaaaagttcgtgatccctttagacgaagacgaagtcccaccgggagtgcgcggaaacccagtgctgaaattcgtgcggaatgtgccgtgggaatttggagatgtaatccctgattatgtattgggacagtcaacatgcgccttgttcttatccctcaggtaccacaacctgcatcccgactacatacacggcaggttgcagagtttaggcaaaaactttgccctcagggtgctattggttcaggtagacgtgaaggatccgcagcaggcgctgaaggaattagcaaaaatgtgtatcctggcggactgcaccctgattcttgcttggagccccgaagaggccggcaggtaccttgagacttacaaggcttacgagcagaagccggcagatttactcatggaaaagctggagcaagattttgtgagcagagtgaccgagtgtctgacgacagtaaagtccgtgaacaaaaccgactctcaaaccttgctgacgactttcggaagcctggaacagctgatcgccgcgtcgcgggaagacttggccctatgcccaggtctgggcccccagaaggcaaggcggctgttcgacgtattacacgagcctttcctcaaagtgccatag

SEQ ID NO: 122795 - DNA, 894 bp, Artificial Sequence
  derived and/or modified sequence
atggaccccgggaaggacaaggagggcgtgccccagcccagcggccccccagccaggaagaagtttgtgatccccctggatgaagatgaggtgcccccaggagtggccaagcccctcttccgcagcacccagagcctgcccaccgtggacaccagcgcccaggccgccccccagacctatgcagaatatgccatcagccagcccctggagggcgctggggccacctgccccaccggcagcgagcccctggccggggagacccccaaccaggccctgaagccaggggccaagagcaacagcatcatcgtgagcccccggcagaggggcaaccctgtgctgaagtttgtgagaaatgtgccctgggagtttggagatgtgatcccagactatgtgctgggccagagcacctgtgccctcttcctgagcctgcgctaccacaacctgcacccagactacatccacggccgcctgcagagcctgggcaagaactttgccctgcgggtgctgctggtgcaggtggatgtgaaggacccccagcaggccctgaaggagctggccaagatgtgcatcctggccgactgcaccctcatcctggcctggagccctgaggaggccggccgctacctggagacctacaaggcctatgagcagaagccagctgacctgctgatggagaagctggagcaggactttgtgtcccgggtgacagaatgtctgaccaccgtgaagtctgtgaacaagacagacagccagaccctgctgaccaccttcggcagcctggagcagctgattgctgccagccgggaggacctggccctgtgccccggcctgggcccccagaaggcccggcggctgtttgatgtgctgcacgagcccttcctgaaggtgccctag

SEQ ID NO: 122796 - DNA, 678 bp, Artificial Sequence
  derived and/or modified sequence
atggaccccgggaaggacaaggagggcgtgccccagcccagcggccccccagccaggaagaagtttgtgatccccctggatgaagatgaggtgcccccaggagtgcggggcaaccctgtgctgaagtttgtgagaaatgtgccctgggagtttggagatgtgatcccagactatgtgctgggccagagcacctgtgccctcttcctgagcctgcgctaccacaacctgcacccagactacatccacggccgcctgcagagcctgggcaagaactttgccctgcgggtgctgctggtgcaggtggatgtgaaggacccccagcaggccctgaaggagctggccaagatgtgcatcctggccgactgcaccctcatcctggcctggagccctgaggaggccggccgctacctggagacctacaaggcctatgagcagaagccagctgacctgctgatggagaagctggagcaggactttgtgtcccgggtgacagaatgtctgaccaccgtgaagtctgtgaacaagacagacagccagaccctgctgaccaccttcggcagcctggagcagctgattgctgccagccgggaggacctggccctgtgccccggcctgggcccccagaaggcccggcggctgtttgatgtgctgcacgagcccttcctgaaggtgccctag

SEQ ID NO: 122797 - DNA, 894 bp, Artificial Sequence
  derived and/or modified sequence
atggaccccggcaaggacaaggagggcgtgccccagcccagcggcccgccggctcgcaaaaagtttgtcatcccccttgatgaagacgaagtaccccccggcgtggctaaaccactctttcggtctacacagtctcttcctactgtggacacatccgcgcaggctgctccgcagacgtacgctgagtacgctatttcccagccactggaaggcgcaggagccacatgcccaacaggcagtgaacctctcgctggcgagaccccgaaccaggctctgaagcccggtgctaagagcaacagtatcattgtatccccccgtcagagggggaacccagtccttaaattcgtccgtaatgttccctgggagttcggagatgtgattcccgactatgtcttggggcagtcaacctgcgctttattcctcagcctacgctaccataatcttcaccctgattacattcatggccggctccagtctttggggaagaactttgctctgcgggtgctgctcgtacaagtggatgttaaggatccccaacaggcacttaaagaactcgcaaagatgtgcatcctcgctgattgtacccttatcctagcatggagccctgaagaagccggaaggtatctcgagacgtataaagcttacgaacagaaacctgcagacctactgatggagaaactcgaacaagatttcgtgagcagagttacagaatgtctgacaacagtcaagtccgtgaacaaaactgacagtcagaccctgctgaccacctttggctcgcttgaacagctcatagcggcttcacgagaggacttagctctttgtcctggcctcggaccccagaaggctcgtagactcttcgacgtcttgcatgagcccttcctgaaggttccctag

SEQ ID NO: 122798 - DNA, 678 bp, Artificial Sequence
  derived and/or modified sequence
atggaccccggcaaggacaaggagggcgtgccccagcccagcggccctccggcacgcaaaaaattcgtgatcccacttgacgaagacgaagtgcctccgggtgtgcgggggaaccctgtgctgaagttcgtccgtaatgttccatgggagtttggcgatgtgatccccgactatgtgcttggccagtctacatgcgctctgttcctgagtcttcggtatcataacttacaccccgattacatccatggtagacttcagagtttgggcaagaactttgcactccgcgtgttgctggtacaggtggacgttaaggatcctcagcaagcgcttaaggaactcgccaagatgtgcatcctcgcagactgtacattaatccttgcttggtccccagaggaagctggaaggtacctggaaacttataaagcttatgagcaaaaacccgcggatctgctaatggagaaactggagcaggactttgtttcacgagtcacagagtgcctaacaaccgtgaaatccgttaacaagacggatagccagactctccttacaacattcggcagtctggagcagctgattgcagccagcagagaggatctggcactttgtccaggcctgggtccccagaaagcaaggcgcctgttcgacgttctccatgagccattcctgaaagttccctag

SEQ ID NO: 122799 - DNA, 894 bp, Artificial Sequence
  derived and/or modified sequence
atggaccccggaaaagataaggaaggagttcctcagccatcaggtcctcccgctcgaaagaagttcgtcattcctctcgacgaagatgaagttcctcctggggtcgcgaaacccctcttccgttctactcagtcccttcccacggtcgacacatctgctcaggcagctccgcaaacctatgcagagtatgccatctctcagcctctagagggagctggcgcaacgtgccctaccggctcagaacctcttgcaggagagacccccaatcaggcactgaaaccaggcgcaaaatccaactcaatcattgtttcccctcgccagcgtggcaatcccgtgctgaaattcgtaaggaacgtcccctgggagtttggggacgtcatacccgattacgtgctgggtcaatctacatgcgccttattcctgtctctgcgttaccataacctccatcctgattatattcacggcagattgcaatcattagggaagaactttgccttgagggtcctcctggtccaggtggacgtgaaggacccccaacaggcgcttaaagaactggcaaaaatgtgcattttggccgactgcaccctgatcctggcatggtctcctgaggaagcgggaagatatcttgagacatacaaggcatacgaacagaaaccggctgatctgctgatggaaaagcttgagcaggattttgtgtcccgagtgaccgagtgtctaaccactgtgaaatcagttaataaaaccgactcccagaccctgttgactacattcgggagcttggagcagctgattgctgctagccgcgaggacctggcattgtgtcccggattgggccctcagaaggcacgcagactgtttgacgtgctacatgagccttttcttaaggtcccttag

SEQ ID NO: 122800 - DNA, 678 bp, Artificial Sequence
  derived and/or modified sequence
atggaccccggaaaagataaggagggcgtgccacagccctctggcccaccagcaaggaagaaattcgttatccccctcgatgaagacgaggtcccccctggtgtacgaggaaatcccgtgctaaaatttgtacgaaatgtcccctgggaatttggtgacgtcatacctgactatgtgcttggacaatccacatgcgccctctttctcagcctccgataccacaacctccacccagactatattcatggcagactgcagtctcttggcaaaaattttgccctcagggtgctgctcgtgcaggttgatgtgaaagaccctcagcaggcattgaaggaattagccaagatgtgtatactagccgattgtactctcatcctggcgtggtctcctgaggaagctggaagatacctggaaacctacaaagcttatgagcagaagccggctgacttactcatggaaaagcttgagcaggatttcgtgtctcgggtgaccgagtgcctaacaaccgtgaagtctgtgaacaagaccgactctcagactctgctgactacattcggtagtttagaacaattgatcgccgcttcccgggaggatctggcattatgcccagggctcgggcctcagaaggctaggcgtcttttcgacgtcctgcatgaacccttcctgaaggtgccatag

SEQ ID NO: 122801 - protein, 255 aa, Artificial Sequence
  derived and/or modified sequence
MAELRVLVAVKRVIDYAVKIRVKPDRTGVVTDGVKHSMNPFCEIAVEEAVRLKEKKLVKEVIAVSCGPAQCQETIRTALAMGADRGIHVEVPPAEAERLGPLQVARVLAKLAEKEKVDLVLLGKQAIDDDCNQTGQMTAGFLDWPQGTFASQVTLEGDKLKVEREIDGGLETLRLKLPAVVTADLRLNEPRYATLPNIMKAKKKKIEVIKPGDLGVDLTSKLSVISVEDPPQRTAGVKVETTEDLVAKLKEIGRI

SEQ ID NO: 122802 - DNA, 768 bp, Artificial Sequence
  derived and/or modified sequence
atggccgagctgagggtgctggtggccgtcaagcgtgtgattgattatgcagtgaagatcagagtgaaacctgacagaacaggagtcgttactgacggggtcaagcattccatgaatcccttctgcgagattgccgttgaggaagctgtacgccttaaggagaagaagctcgttaaggaggtgatcgcagttagttgcgggcctgcccagtgccaggagacgattcggaccgccctggccatgggcgcggatagggggatccacgtagaggtgccgcctgccgaagctgagaggctaggtcccctccaggtggcacgagtgctggctaagctggccgagaaggagaaggtggatctggtgttactcggaaagcaggccatcgatgacgattgtaatcagacaggacagatgacggctggtttcttggattggccacaggggaccttcgccagccaagtaacattagagggggataagttgaaggtggaacgcgaaattgacggagggcttgagacactccggttaaagctcccggctgtggtcaccgcagacctgcgattgaacgaaccccggtacgcaacgctcccgaacatcatgaaggcgaaaaagaaaaagatagaggtgatcaaaccaggtgacctcggagttgacctgacttctaagttgtcagtcattagtgtggaggaccccccgcagaggactgcaggggttaaggtagaaacaacggaggatctggtggccaagctgaaagagatcggtagaatatag

SEQ ID NO: 122803 - DNA, 768 bp, Artificial Sequence
  derived and/or modified sequence
atggccgagctgcgggtgctggtggccgtgaagagggtcatcgactatgctgtgaagatccgggtgaagccagacagaactggagtggtgacagatggagtgaagcacagcatgaaccccttctgtgaaattgctgtggaggaggccgtgcggctgaaggagaagaagctggtgaaggaggtgattgctgtgtcctgtggccctgcccagtgccaggagaccatcagaacagccctggccatgggcgctgaccggggcatccacgtggaggtgcccccagctgaggccgagcggctgggccccctgcaggtggcccgggtgctggccaagctggccgagaaggagaaggtggacctggtgctgctgggcaagcaggccattgatgatgactgcaaccagacaggccagatgacagctggcttcctggactggccccagggcacctttgccagccaggtgaccctggagggggacaagctgaaggtggagcgggagattgatggcggcctggagaccctgcggctgaagctgcctgctgtggtgacagctgacctgcggctgaatgagcccaggtatgccaccctgcccaacatcatgaaggccaagaagaagaagattgaggtgatcaagccaggggacctgggcgtggacctgaccagcaagctgagcgtcatctctgtggaggaccccccccagaggacagctggggtgaaggtggagaccacagaggacctggtggccaagctgaaggagatcggccgcatctag

SEQ ID NO: 122804 - DNA, 768 bp, Artificial Sequence
  derived and/or modified sequence
atggccgagctgcgggtgctggtggccgtgaagcgggtgatcgactatgccgtaaaaatcagggttaagcccgatagaaccggcgtggtcaccgatggagtgaagcatagcatgaacccgttctgcgagatcgcagttgaagaggctgtccggctaaaggaaaagaaactggtgaaggaggttatcgcagtttcctgcggcccggcccagtgtcaggaaactatccgaaccgctttagcaatgggagcagacaggggcatacatgtggaggtgccccccgccgaggccgaaagactggggccactgcaggtggccagagtcctggccaaattagccgagaaggagaaagtagacctggtgctgctcggcaagcaagccatagacgatgactgcaatcaaacaggccagatgactgcggggtttttagactggccccagggcacttttgccagccaggttacactggaaggagacaagctgaaagtcgaacgcgagattgatgggggactggaaaccctgcgccttaaactacccgcggtggtaactgcagatttgcgtctcaatgagccaagatacgcaacgctcccaaacatcatgaaagccaagaagaagaagatcgaggttatcaaaccaggagatctcggggtggatctgacatctaaactgtctgttattagtgtggaggaccccccgcagaggacagccggcgtgaaagtggagactaccgaggaccttgttgcgaagttgaaggagatcgggagaatttag

SEQ ID NO: 122805 - DNA, 768 bp, Artificial Sequence
  derived and/or modified sequence
atggctgagctgcgggttctggtagccgtgaagagagtgattgattatgctgtgaaaattagggtgaagcctgacagaactggagttgtgaccgacggcgtgaaacacagtatgaatcctttctgcgagatcgccgtcgaagaagctgtgagacttaaggaaaaaaaactcgtgaaagaggtgatcgcggttagttgcgggccagcacagtgccaagagactataagaacagccctggctatgggagccgatagaggaatccatgtggaagtgcctccagcagaggctgaaaggctcggccctctgcaagttgcaagggtattagctaagctggctgagaaagaaaaggtggatctggtcctactaggtaagcaggctatcgacgacgattgcaatcagactgggcagatgactgccggtttcttggattggccgcaagggaccttcgcaagtcaggtcaccctggaaggtgacaagttgaaggtggaaagggaaatagatggagggctggagaccctccgtcttaagctgccagctgtcgtgacagctgatttaagacttaacgagcctcggtatgctaccctacccaatatcatgaaggcgaagaagaaaaagatcgaagtaattaagcccggagatttaggtgtggacctcacctctaagctatctgtcatttcagtggaagaccctcctcagcgtaccgcaggcgtaaaagtggaaacgaccgaagatcttgtggccaaactcaaggaaatcggccgaatttag

SEQ ID NO: 122806 - DNA, 768 bp, Artificial Sequence
  derived and/or modified sequence
atggccgagctgagagtgctggtggccgtgaagagagtgatcgactacgccgtgaagatcagagtgaagcccgacagaaccggcgtggtgaccgacggcgtgaagcacagcatgaaccccttctgcgagatcgccgtggaggaggccgtgagactgaaggagaagaagctggtgaaggaggtgatcgccgtgagctgcggccccgcccagtgccaggagaccatcagaaccgccctggccatgggcgccgacagaggcatccacgtggaggtgccccccgccgaggccgagagactgggccccctgcaggtggccagagtgctggccaagctggccgagaaggagaaggtggacctggtgctgctgggcaagcaggccatcgacgacgactgcaaccagaccggccagatgaccgccggcttcctggactggccccagggcaccttcgccagccaggtgaccctggagggcgacaagctgaaggtggagagagagatcgacggcggcctggagaccctgagactgaagctgcccgccgtggtgaccgccgacctgagactgaacgagcccagatacgccaccctgcccaacatcatgaaggccaagaagaagaagatcgaggtgatcaagcccggcgacctgggcgtggacctgaccagcaagctgagcgtgatcagcgtggaggaccccccccagagaaccgccggcgtgaaggtggagaccaccgaggacctggtggccaagctgaaggagatcggcagaatctag

SEQ ID NO: 122807 - DNA, 915 bp, Artificial Sequence
  derived and/or modified sequence
gcagagaggggcgcggggggcgggggtggtggggcttctggactgagccgctgagggtgcgggctgaccctgtaagtggctgcggcgggaagatggcggagctgcgcgtgctcgtagctgtcaagagggtcatcgactacgccgtgaagatccgagtgaagcctgacaggaccggtgtggtcacggatggtgtgaagcactccatgaaccccttctgtgagatcgcggtggaggaggctgtgcggctcaaggagaagaagctggtgaaggaggtcatcgccgtcagctgtgggcctgcacagtgccaggagacgattcgtaccgccctggccatgggtgcagaccgaggtatccacgtggaggtgcccccagcagaagcagaacgcttgggtcccctgcaggtggctcgggtcctggccaagctggcagagaaggagaaggtggacctggtgctgctgggcaaacaggccatcgatgatgactgtaaccagacagggcagatgacagctggatttcttgactggccacagggcacattcgcctcccaggtgacgctggagggggacaagttgaaagtggagcgggagatcgatgggggcctggagaccctgcgcctgaagctgccagctgtggtgacagctgacctgaggctcaacgagccccgctacgccacgctgcccaacatcatgaaagccaagaagaagaagatcgaggtgatcaagcctggggacctgggtgtggacctgacctccaagctctctgtgatcagtgtggaggacccgccccagcgcacggccggcgtcaaggtggagaccactgaggacctggtggccaagctgaaggagattgggcggatttgagcccctcccagagatggcaataaaactgactctcaacatctatctctgttaactt

SEQ ID NO: 122808 - protein, 452 aa, Artificial Sequence
  derived and/or modified sequence
MSETPAQCSIKQERISYTPPESPVPSYASSTPLHVPVPRALRMEEDSIRLPAHLRLQPIYWSRDDVAQWLKWAENEFSLRPIDSNTFEMNGKALLLLTKEDFRYRSPHSGDVLYELLQHILKQRKPRILFSPFFHPGNSIHTQPEVILHQNHEEDNCVQRTPRPSVDNVHHNPPTIELLHRSRSPITTNHRPSPDPEQRPLRSPLDNMIRRLSPAERAQGPRPHQENNHQESYPLSVSPMENNHCPASSESHPKPSSPRQESTRVIQLMPSPIMHPLILNPRHSVDFKQSRLSEDGLHREGKPINLSHREDLAYMNHIMVSVSPPEEHAMPIGRIADCRLLWDYVYQLLSDSRYENFIRWEDKESKIFRIVDPNGLARLWGNHKNRTNMTYEKMSRALRHYYKLNIIRKEPGQRLLFRFMKTPDEIMSGRTDRLEHLESQELDEQIYQEDEC

SEQ ID NO: 122809 - DNA, 5989 bp, Artificial Sequence
  derived and/or modified sequence
gcgtcccgggtccccgcgccgcgccgcgacctgcagaccccgccgccgcgctcgggcccgtctcccacgcccccgccgccccgcgcgcccaactccgccggccgccccgccccgccccgcgcgctccagacccccggggcggctgccgggagagatgctggaagaaacttcttaaatgaccgcgtctggctggccgtggagcctttctgggttggggagaggaaaggaaagtggaaaaaacctgagaacttcctgatctctctcgctgtgagacatgtctgagactcctgctcagtgtagcattaagcaggaacgaatttcatatacacctccagagagcccagtgccgagttacgcttcctcgacgccacttcatgttccagtgcctcgagcgctcaggatggaggaagactcgatccgcctgcctgcgcacctgcgcttgcagccaatttactggagcagggatgacgtagcccagtggctcaagtgggctgaaaatgagttttctttaaggccaattgacagcaacacgtttgaaatgaatggcaaagctctcctgctgctgaccaaagaggactttcgctatcgatctcctcattcaggtgatgtgctctatgaactccttcagcatattctgaagcagaggaaacctcggattcttttttcaccattcttccaccctggaaactctatacacacacagccggaggtcatactgcatcagaaccatgaagaagataactgtgtccagaggacccccaggccatccgtggataatgtgcaccataaccctcccaccattgaactgttgcaccgctccaggtcacctatcacgacaaatcaccggccttctcctgaccccgagcagcggcccctccggtcccccctggacaacatgatccgccgcctctccccggctgagagagctcagggacccaggccgcaccaggagaacaaccaccaggagtcctaccctctgtcagtgtctcccatggagaataatcactgcccagcgtcctccgagtcccacccgaagccatccagcccccggcaggagagcacacgcgtgatccagctgatgcccagccccatcatgcaccctctgatcctgaacccccggcactccgtggatttcaaacagtccaggctctccgaggacgggctgcatagggaagggaagcccatcaacctctctcatcgggaagacctggcttacatgaaccacatcatggtctctgtctccccgcctgaagagcacgccatgcccattgggagaatagcagactgtagactgctttgggattacgtctatcagttgctttctgacagccggtacgaaaacttcatccgatgggaggacaaagaatccaaaatattccggatagtggatcccaacggactggctcgactgtggggaaaccataagaacagaacaaacatgacctatgagaaaatgtccagagccctgcgccactactacaaactaaacattatcaggaaggagccaggacaaaggcttttgttcaggtttatgaaaaccccagatgaaatcatgagtggccgaacagaccgtctggagcacctagagtcccaggagctggatgaacaaatataccaagaagatgaatgctgaaggaaccaacagtccacctcagcgggccagcagcccagggaacccctgcccaccaggattgctggaagtgtgacggagcaggcgggctgaggagagtggaaaaggaagcgacccagaaatggcagggacacttctcttgcagaccaagagggaccctggagcaccttagacaaactacccagcacaggcggggctggaattctggcggagggcatgagcctgggactccatgtcacgtttccttctgatttggaatctctccatctgtaattcctcaccctcacccttccaccgttgttagtatcatggtgtttttgtttttgtttttgttttaagaacctgcagtttgactcttcatcgttcatctaggggaagacatctgatgttgttttcctatggaaatatatatctattatatatatattttttgcaaatctcacaaagtgcggcaagcccagctggtcaggaaagagaatacttgcagaggggttcaggttcctctttttcctgccacgtggatcaggtctgttcctgttactgttgggtcttggctgaaaaaaaaaaatgcttttaaaaaagataaaatgaaaaggagagctctctttttctctctcttgctctgttcttcccttggtcccctctgtcctcccgccctgcctgcagttgagattcagatgccttctgacagagttcagcctcttggagagtcttggggattgttggcacctaaacagaatcagtgacccgggtgctttgtggccagcagcacagaatcaaacccgcatcccagcattgggccacccatctgagggaggccaaaatcatcacagatgctgctgtgctgcagacagatacatgctagtccagagagccgcccctgagatggctgtgagaaccatgtgtctaaggcgtaagataaggatggaaggctgtccaagttatttggaaggcctcggcagcttgggattagcttgggagcgcagcgctgcaaagtggaaaatatgaaaagaccacacaggcccagcagtccagaaactgggcaaaaatattctgcagtggggatttatttttccaaagcaggtaacagaggctagtgagaaagaaaagctcctctctgctccattccaaaggccatcttgtggtcagtttcatgccctcacctgatttttttttttttttttttttttcaattcctaaccttttttaaagtttcctggtctccactggacacagagctttggagacggaggatcccagagggcagtctcagttgcaatcagtgtgtgcccagcctgggcagacaggaaattcctcggatacattattttttctttctttcatagctgtgtctcagaaaggacccatttgtggctctttttcacctcaaaataagatcgatggtatcttgtaaaatgagggtagtgccacttcttagtatttttgaaagctgttttagattttttttttttttccttttctagccatctaaattgactcttccaatataggtctcagaaatccaatatttggagtacaatttcttttaatccagattacacctgccttacaaagcaccccctccttgttcccctctgtttcctctactcagttgggggagaaactcacagctcctccgggatacatatgtgccctcagcagcagctcccaggtgaagttaccagacccctgggcttctccccagctttttctgagttgagtcagacatgtagagtttgggtcacacaggcaagaggaattttccctcggccttactgacaaggacaccaacctagggtgcaaacagatggactatggttcaaggacactggaattgaggagctgatcaaggctctcttcagccttgctctgtccctgcctcttatcagagcacaggtagacacacgggcatagccagcccactcctactgtcacaggcgccccaccattcaaccttccgggaggtcagggaccttctatatgaggcgagtgggtctcagtctgcttgaatggtgatgagattctgctggatctcagcacgctgcaggtgtcttttgagagcattcagtaggacatggtgatccctatttcagcctctaagatgactggtattctatctgaaatgcagagattaagccaaatacctgatgtattgtgaaagccactgattttaagaatggagagaaagggattttttactgcatccctctgtatgaatatgaaatcagagaccagggcatgatgttgctaggattagagcctctcagtctggcctcttcacccaagtgcaagaactcagtctcttactgttcaaagaatcttaacagttgaattatggagggaaattcccttttgccccaagcatttctatatttaaagcaatatcccaggagaatatgttagacttaggatgataccttcagccacttgaagaagaaatagaaggcgctcattccaatatagtctttatttcccattcagatacaggttgagcatccctaatctgaacagttaaaacccccaaatgccccaaaatccaaaccttcctgaacgctatgacaccatgagtggaaaattccacacctaacaaacacatttgctttcttatggttcaatgtacacaaactgttttatatagaaaatgatttcaaatatcataaaattaccttcaggctatgtgtataaagtatatatgagccataaatgaattttgtgtttagactttgtgtccatccccaagatctctcattttatatatatatatatatatatatatatatatatatatatatatatatacacacacacacacatacacaaatattccaggatacaaaaaaaaacatttaaaaatccgagacccagaacacttctggtcccaagcatttcagataagggatatcaatctgtactaccaataaggatttcgtaattcccctaactgcaaatgtcctcttcatttgttctttatgagaaaacccgggtagtgccagcacctggatacagtatttacaccctgcagaccctaaagatttcagattcagttagcaaaccttgatgaagcacctgctggacactgagggacccaaagctcaatcagccataatccctgctttcagagtttatattgtacctgcctaatccacccggcgtgactcatttcaacactaagtactaggggtgttgtcaggagacaaatctgaagtcaggagaggaaaatgcaaaggagccctgccgtgtgatggatgtgcattctcacttgggtcttgaagttctcattcctacatctcaagctagccaggcagtctcctctctatcagaagaaagcactggtaattggctagactggctatgttgaaggtaacatgaactctaagatcttgacccagggcgacttggttttgcttaaggtggcatcaccaatgttccaaatcctttagggagatgagggtatccccacagaaaaagaggaataatagaccaatggattttctcctttcaccagtatgtttggaaccctctgatccaatgtcttttgatactgatctcttgtccaaatgagaatgtcgctttagctgaaattcaaatggctgtgacaatttaccgaaatgatgaagtaaccaccattcccacctttcactgcctaggctccaagtctgaatacatttttgaaataggaactcccttttgcaaaaaagaaacctgggtgtcagggaggtgaagtgacttgccctaggagcagacagcatgccaagaatggaattaggctcaggatccagcctgggctcaccctgtgtggctcattcccacccaggaaactgaagataaaagatttgggaaaacacaccaagaaaaaggggcagttttctttgcccaagcatttggtgctagttagaggctgttcactctctcctgctcctcttcggagtagaaataaaggctgtgacacaaggaagccagtggggtgggagggaggcaccataatccctccctaaaacccacagaagactaacctgatactcttttgacccaactgcatcaacactaaacagctgcagaccccctgaatctttcacacatgccaagtgaacattcttgatgatttctctttgtgaccgcaaccacctgcaaaccagaacgactctagaatttccttccccgcccccctttttgtttagtttctaatctcttgtttatgaggtgtggggtttataagggactgaatcaaatgaatgtaacaaaaaagaaaaaaaaaacaaaaaaaaatgccttttctcagggccagtgagttgcaaataatttttaaagaaaagcctataattacatcatctcaataaattttttataaaaaaaaaaaaa

SEQ ID NO: 122810 - DNA, 1359 bp, Artificial Sequence
  derived and/or modified sequence
atgtctgagaccccagcacagtgtagtataaagcaggagaggattagctatacgccaccagagtctcctgtaccatcctacgcctccagcacacctctccatgtgccagtacctagggcccttaggatggaggaggacagcattcgcctccctgctcacctcaggcttcaacctatttactggagccgggacgatgtcgcacagtggcttaagtgggccgagaacgagttcagtctccgcccaatagacagtaatacctttgaaatgaacggcaaagccctgctgctgctgaccaaggaggacttccggtatagaagtccacactcgggcgacgtgctctacgagctcctgcagcacatccttaaacaacgtaagccacggatcctttttagcccatttttccacccaggaaacagtatccacacacagcctgaggtgatcctgcaccagaaccacgaggaggataattgcgtccaaaggacaccacgtcctagcgtggacaacgttcaccacaaccccccaacgattgagctgctacaccgctcacgcagcccaatcacaactaatcatagaccctccccagatcctgagcaacgaccgctgcgctccccccttgataacatgattcgacggctgtctcccgcagaaagggcacagggcccccgtcctcaccaggagaacaaccaccaggagtcttacccactgtcagtgtctcctatggagaataaccactgtcctgcatcctccgagtcacacccgaagccttcctcccccaggcaagaaagtactagggtcatccaacttatgcccagtccgatcatgcacccattgatccttaaccctcgccattctgttgactttaaacaatcccgcctgtcagaggatgggctccatagggagggtaagcccatcaacttatcccaccgggaagatctcgcgtatatgaatcacatcatggtgtcagtctccccgccggaggagcatgccatgcctatcggaaggatcgctgactgcaggcttctgtgggactatgtgtatcaactcctgtctgacagtcgatatgagaatttcatcaggtgggaagataaagagtcaaagatatttcggatcgtcgatcctaacggactagcccgactttggggcaaccacaagaatcggactaatatgacttacgaaaagatgagccgggcgctgcgccactactataaacttaatatcatccgcaaggaaccaggtcagcggttgctgtttagatttatgaaaactccagatgaaataatgtcaggtcggacggatcgcctcgaacatctggaaagccaggagttggacgaacagatctatcaggaggatgagtgttag

SEQ ID NO: 122811 - DNA, 1359 bp, Artificial Sequence
  derived and/or modified sequence
atgtctgagaccccagcccagtgcagcatcaagcaggagcgcatctcctacaccccacctgagagccctgtgcccagctatgccagcagcacccccctgcacgtgcctgtgccccgggccctgaggatggaggaggacagcatccggctgcctgcccacctgcggctgcagcccatctactggagcagagatgatgtggcccagtggctgaagtgggccgagaatgagttcagcctgcggcccatcgacagcaacacctttgagatgaatggcaaggccctgctgctgctgaccaaggaggacttccgctaccgcagcccccacagcggagatgtgctgtatgagctgctgcagcacatcctgaagcagaggaagccccgcatcctcttcagccccttcttccaccctggcaacagcatccacacccagcctgaggtgatcctgcaccagaaccacgaggaggacaactgtgtgcagaggaccccccggcccagcgtggacaacgtgcaccacaacccccccaccatcgagctgctgcacaggagccgcagccccatcaccaccaaccaccggcccagcccagaccctgagcagaggcccctgcggagccccctggacaacatgatccggcggctgagccctgctgagcgggcccagggcccccggccccaccaggagaacaaccaccaggagagctaccccctgtctgtgagccccatggagaacaaccactgcccagccagcagcgagagccaccccaagcccagcagcccccggcaggagagcaccagggtcatccagctgatgcccagccccatcatgcaccccctcatcctgaaccccaggcacagcgtggacttcaagcagagccggctgtctgaagatggcctgcaccgggagggcaagcccatcaacctgagccaccgggaggacctggcctacatgaaccacatcatggtgtctgtgagccccccagaggagcacgccatgcccatcggcagaattgctgactgccgcctgctgtgggactatgtgtaccagctgctgagtgacagccgctatgagaacttcatccgctgggaggacaaggagagcaagatcttccgcatcgtggaccccaacggcctggcccggctgtggggcaaccacaagaacagaaccaacatgacctatgagaagatgagccgggccctgcggcactactacaagctgaacatcatcaggaaggagcccggccagaggctgctcttccgcttcatgaagaccccagatgagatcatgagcggccgcacagaccggctggagcacctggagagccaggagctggatgagcagatctaccaggaggatgaatgttag

SEQ ID NO: 122812 - DNA, 1359 bp, Artificial Sequence
  derived and/or modified sequence
atgagcgagacccccgcccagtgcagcatcaagcaggagcggatctcgtataccccccccgagtccccggtcccctcatacgcgtcttcgacacctttgcacgtccccgtacctagagcccttcggatggaagaggatagtatccgcctcccggctcacttgcgcttgcagccaatttactggtccagggatgacgtcgcccagtggctgaagtgggctgagaatgagttctctctccggccgattgactctaacacttttgagatgaatggtaaagccctgctgctgctcaccaaggaggacttccgatacaggtccccccactcaggcgacgtgctgtatgagctcctccagcacattctgaagcagagaaaaccccggatcctgttttctccttttttccacccaggcaactcaatccatacgcagcctgaggtgatcctacatcagaatcatgaggaagataattgcgttcagcgcactccgcggccctccgtcgataacgtacaccacaacccacctacaattgaattattacataggagcagaagccccattaccacaaatcaccgaccctctcctgatcctgaacaaagacccttgcggagcccactcgacaacatgatccgcaggttgtctcctgccgaacgcgcccaggggccacgcccccaccaggagaataatcaccaggagtcttaccctttgagcgtgtctccgatggagaacaaccactgccctgccagctccgaaagtcacccgaagcctagtagcccaaggcaggagagcacacgtgtcattcagctgatgccttccccaatcatgcacccactcatcctgaatccaagacactctgtggatttcaagcagagccgcctgagcgaagatggcctgcatcgagaaggaaagccaatcaatctgtcccaccgggaggacctcgcctacatgaaccacataatggtgtccgtttcaccacctgaggagcacgctatgccgattggcaggatcgccgactgtagactactctgggactatgtatatcagcttctgtctgatagccgctatgaaaacttcatcagatgggaggacaaggagagcaagattttcagaatcgtggacccaaacggcttggctagactgtgggggaatcataaaaaccgcactaatatgacctacgaaaagatgagtagagcactgagacactattataagttgaacatcatcagaaaagaacctgggcaacggctgctgttcagattcatgaaaactcccgacgagattatgtcagggcgaactgataggcttgaacatctggaaagtcaggagctagacgaacaaatctaccaagaagacgaatgctag

SEQ ID NO: 122813 - DNA, 1359 bp, Artificial Sequence
  derived and/or modified sequence
atgtccgaaacccccgctcaatgtagcatcaagcaggaacgaatctcctatacccctcctgagtctcccgtgccctcgtacgcatcatccacaccactacacgtgcccgtgccacgagctctgcggatggaggaagacagtataaggctgccagctcatctgagactgcaacccatctattggagccgggatgacgtagcacagtggctaaagtgggccgagaacgagttctctttacggcctattgactccaacacattcgagatgaacggcaaagcactgttattgctcaccaaagaggatttcagatatcggagtccccactccggtgacgtgctctatgaacttttgcagcacattctgaagcaacggaagcctaggattctgtttagcccatttttccaccctgggaactcgatccacactcagccggaggtgattcttcaccagaaccatgaggaggacaattgcgtccagcgaacacctcgcccatctgtcgacaacgtccatcacaaccccccaacaatcgaattgctgcatcgtagtaggtctcccataacgacaaaccaccggccatcccccgacccggagcagcgcccactgagatcccctctggacaatatgatacgacgtctgtcacctgccgaacgagcacaaggaccgaggccccaccaggagaataaccaccaggaatcgtatcccttatccgtgagccccatggagaataatcactgtcctgcaagctccgaatctcaccccaaaccttcttctccccgtcaggagtctacgagagtgattcagctgatgccgagccccatcatgcacccactcattctgaaccctcgccatagtgttgacttcaagcagagccggctgtcggaggatggcctccatagggaaggtaagcctatcaacttgtctcatcgcgaggatctcgcttatatgaaccatatcatggtaagtgtgtctccgcctgaggagcacgctatgcccatcggcaggatcgcagactgccgactgctgtgggactatgtgtatcaactcctgtccgattcccggtatgaaaacttcatccggtgggaggataaggagtccaaaatctttcgcattgtggaccctaacggtctggccagactgtggggcaatcacaagaatagaaccaatatgacctacgagaagatgagccgggcattacgtcactactacaagctaaacattatcaggaaagaacctggccagcggttattgttccggtttatgaagacgccagacgaaatcatgagcggtcggaccgacaggctggagcaccttgagtctcaagagctcgacgagcagatttatcaggaagatgaatgctag

SEQ ID NO: 122814 - DNA, 1359 bp, Artificial Sequence
  derived and/or modified sequence
atgagcgagacccccgcccagtgcagcatcaagcaggagagaatcagctacaccccccccgagagccccgtgcccagctacgccagcagcacccccctgcacgtgcccgtgcccagagccctgagaatggaggaggacagcatcagactgcccgcccacctgagactgcagcccatctactggagcagagacgacgtggcccagtggctgaagtgggccgagaacgagttcagcctgagacccatcgacagcaacaccttcgagatgaacggcaaggccctgctgctgctgaccaaggaggacttcagatacagaagcccccacagcggcgacgtgctgtacgagctgctgcagcacatcctgaagcagagaaagcccagaatcctgttcagccccttcttccaccccggcaacagcatccacacccagcccgaggtgatcctgcaccagaaccacgaggaggacaactgcgtgcagagaacccccagacccagcgtggacaacgtgcaccacaacccccccaccatcgagctgctgcacagaagcagaagccccatcaccaccaaccacagacccagccccgaccccgagcagagacccctgagaagccccctggacaacatgatcagaagactgagccccgccgagagagcccagggccccagaccccaccaggagaacaaccaccaggagagctaccccctgagcgtgagccccatggagaacaaccactgccccgccagcagcgagagccaccccaagcccagcagccccagacaggagagcaccagagtgatccagctgatgcccagccccatcatgcaccccctgatcctgaaccccagacacagcgtggacttcaagcagagcagactgagcgaggacggcctgcacagagagggcaagcccatcaacctgagccacagagaggacctggcctacatgaaccacatcatggtgagcgtgagcccccccgaggagcacgccatgcccatcggcagaatcgccgactgcagactgctgtgggactacgtgtaccagctgctgagcgacagcagatacgagaacttcatcagatgggaggacaaggagagcaagatcttcagaatcgtggaccccaacggcctggccagactgtggggcaaccacaagaacagaaccaacatgacctacgagaagatgagcagagccctgagacactactacaagctgaacatcatcagaaaggagcccggccagagactgctgttcagattcatgaagacccccgacgagatcatgagcggcagaaccgacagactggagcacctggagagccaggagctggacgagcagatctaccaggaggacgagtgctag

SEQ ID NO: 122815 - DNA, 2211 bp, Artificial Sequence
  derived and/or modified sequence
gcgtcccgggtccccgcgccgcgccgcgacctgcagaccccgccgccgcgctcgggcccgtctcccacgcccccgccgccccgcgcgcccaactccgccggccgccccgccccgccccgcgcgctccagacccccggggcggctgccgggagagatgctggaagaaacttcttaaatgaccgcgtctggctggccgtggagcctttctgggttggggagaggaaaggaaagtggaaaaaacctgagaacttcctgatctctctcgctgtgagacatgtctgagactcctgctcagtgtagcattaagcaggaacgaatttcatatacacctccagagagcccagtgccgagttacgcttcctcgacgccacttcatgttccagtgcctcgagcgctcaggatggaggaagactcgatccgcctgcctgcgcacctgcgcttgcagccaatttactggagcagggatgacgtagcccagtggctcaagtgggctgaaaatgagttttctttaaggccaattgacagcaacacgtttgaaatgaatggcaaagctctcctgctgctgaccaaagaggactttcgctatcgatctcctcattcaggtgatgtgctctatgaactccttcagcatattctgaagcagaggaaacctcggattcttttttcaccattcttccaccctggaaactctatacacacacagccggaggtcatactgcatcagaaccatgaagaagataactgtgtccagaggacccccaggccatccgtggataatgtgcaccataaccctcccaccattgaactgttgcaccgctccaggtcacctatcacgacaaatcaccggccttctcctgaccccgagcagcggcccctccggtcccccctggacaacatgatccgccgcctctccccggctgagagagctcagggacccaggccgcaccaggagaacaaccaccaggagtcctaccctctgtcagtgtctcccatggagaataatcactgcccagcgtcctccgagtcccacccgaagccatccagcccccggcaggagagcacacgcgtgatccagctgatgcccagccccatcatgcaccctctgatcctgaacccccggcactccgtggatttcaaacagtccaggctctccgaggacgggctgcatagggaagggaagcccatcaacctctctcatcgggaagacctggcttacatgaaccacatcatggtctctgtctccccgcctgaagagcacgccatgcccattgggagaatagcagactgtagactgctttgggattacgtctatcagttgctttctgacagccggtacgaaaacttcatccgatgggaggacaaagaatccaaaatattccggatagtggatcccaacggactggctcgactgtggggaaaccataagaacagaacaaacatgacctatgagaaaatgtccagagccctgcgccactactacaaactaaacattatcaggaaggagccaggacaaaggcttttgttcaggtttatgaaaaccccagatgaaatcatgagtggccgaacagaccgtctggagcacctagagtcccaggagctggatgaacaaatataccaagaagatgaatgctgaaggaaccaacagtccacctcagcgggccagcagcccagggaacccctgcccaccaggattgctggaagtgtgacggagcaggcgggctgaggagagtggaaaaggaagcgacccagaaatggcagggacacttctcttgcagaccaagagggaccctggagcaccttagacaaactacccagcacaggcggggctggaattctggcggagggcatgagcctgggactccatgtcacgtttccttctgatttggaatctctccatctgtaattcctcaccctcacccttccaccgttgttagtatcatggtgtttttgtttttgtttttgttttaagaacctgcagtttgactcttcatcgttcatctaggggaagacatctgatgttgttttcctatggaaatatatatctattatatatatattttttgcaaatctcacaaagtgcggcaagcccagctggtcaggaaagagaatacttgcagaggggttcaggttcctctttttcctgccacgtggatcaggtctgttcctgttactgttgggtcttggctgaaaaaaaaaaatgcttttaaaaaa

SEQ ID NO: 122816 - protein, 2033 aa, Artificial Sequence
  derived and/or modified sequence
MFKGLSKGSQGKGSPKGSPAKGSPKGSPSRHSRAATQELALLISRMQANADQVERDILETQKRLQQDRLNSEQSQALQHQQETGRSLKEAEVLLKDLFLDVDKARRLKHPQAEEIEKDIKQLHERVTQECAEYRALYEKMVLPPDVGPRVDWARVLEQKQKQVCAGQYGPGMAELEQQIAEHNILQKEIDAYGQQLRSLVGPDAATIRSQYRDLLKAASWRGQSLGSLYTHLQGCTRQLSALAEQQRRILQQDWSDLMADPAGVRREYEHFKQHELLSQEQSVNQLEDDGERMVELRHPAVGPIQAHQEALKMEWQNFLNLCICQETQLQHVEDYRRFQEEADSVSQTLAKLNSNLDAKYSPAPGGPPGAPTELLQQLEAEEKRLAVTERATGDLQRRSRDVAPLPQRRNPPQQPLHVDSICDWDSGEVQLLQGERYKLVDNTDPHAWVVQGPGGETKRAPAACFCIPAPDPDAVARASRLASELQALKQKLATVQSRLKASAVESLRPSQQAPSGSDLANPQAQKLLTQMTRLDGDLGQIERQVLAWARAPLSRPTPLEDLEGRIHSHEGTAQRLQSLGTEKETAQKECEAFLSTRPVGPAALQLPVALNSVKNKFSDVQVLCSLYGEKAKAALDLERQIQDADRVIRGFEATLVQEAPIPAEPGALQERVSELQRQRRELLEQQTCVLRLHRALKASEHACAALQNNFQEFCQDLPRQQRQVRALTDRYHAVGDQLDLREKVVQDAALTYQQFKNCKDNLSSWLEHLPRSQVRPSDGPSQIAYKLQAQKRLTQEIQSRERDRATASHLSQALQAALQDYELQADTYRCSLEPTLAVSAPKRPRVAPLQESIQAQEKNLAKAYTEVAAAQQQLLQQLEFARKMLEKKELSEDIRRTHDAKQGSESPAQAGRESEALKAQLEEERKRVARVQHELEAQRSQLLQLRTQRPLERLEEKEVVEFYRDPQLEGSLSRVKAQVEEEGKRRAGLQADLEVAAQKVVQLESKRKTMQPHLLTKEVTQVERDPGLDSQAAQLRIQIQQLRGEDAVISARLEGLKKELLALEKREVDVKEKVVVKEVVKVEKNLEMVKAAQALRLQMEEDAARRKQAEEAVAKLQARIEDLERAISSVEPKVIVKEVKKVEQDPGLLQESSRLRSLLEEERTKNATLARELSDLHSKYSVVEKQRPKVQLQERVHEIFQVDPETEQEITRLKAKLQEMAGKRSGVEKEVEKLLPDLEVLRAQKPTVEYKEVTQEVVRHERSPEVLREIDRLKAQLNELVNSHGRSQEQLIRLQGERDEWRRERAKVETKTVSKEVVRHEKDPVLEKEAERLRQEVREAAQKRRAAEDAVYELQSKRLLLERRKPEEKVVVQEVVVTQKDPKLREEHSRLSGSLDEEVGRRRQLELEVQQLRAGVEEQEGLLSFQEDRSKKLAVERELRQLTLRIQELEKRPPTVQEKIIMEEVVKLEKDPDLEKSTEALRWDLDQEKTQVTELNRECKNLQVQIDVLQKAKSQEKTIYKEVIRVQKDRVLEDERARVWEMLNRERTARQAREEEARRLRERIDRAETLGRTWSREESELQRARDQADQECGRLQQELRALERQKQQQTLQLQEESKLLSQKTESERQKAAQRGQELSRLEAAILREKDQIYEKERTLRDLHAKVSREELSQETQTRETNLSTKISILEPETGKDMSPYEAYKRGIIDRGQYLQLQELECDWEEVTTSGPCGEESVLLDRKSGKQYSIEAALRCRRISKEEYHLYKDGHLPISEFALLVAGETKPSSSLSIGSIISKSPLASPAPQSTSFFSPSFSLGLGDDSFPIAGIYDTTTDNKCSIKTAVAKNMLDPITGQKLLEAQAATGGIVDLLSRERYSVHKAMERGLIENTSTQRLLNAQKAFTGIEDPVTKKRLSVGEAVQKGWMPRESVLPHLQVQHLTGGLIDPKRTGRIPIQQALLSGMISEELAQLLQDESSYEKDLTDPISKERLSYKEAMGRCRKDPLSGLLLLPAALEGYRCYRSASPTVPRSLR

SEQ ID NO: 122817 - DNA, 6102 bp, Artificial Sequence
  derived and/or modified sequence
atgttcaagggcctgtctaagggatcacagggcaaaggctctccaaagggctccccagctaaaggcagccccaaaggcagccccagtcggcattcccgtgccgccacacaggagctggcgctgctgatttcaagaatgcaagccaacgccgatcaggtggaacgggacattctggagactcagaaacgtttacagcaggaccgtctgaattctgaacagtcacaggctctccagcaccagcaggaaacaggtcggtccctgaaagaggccgaagtccttctcaaagacctgtttctcgacgtcgataaggcacgtagactaaagcatccacaagccgaagagatagagaaggatataaaacagctacacgaacgggtcactcaggagtgtgcggaataccgcgccctttatgagaaaatggtgttgccacctgacgtcggacccagagtcgactgggctcgggtcctcgagcaaaagcagaaacaggtgtgcgcaggacagtacggccccggcatggccgagttagagcagcagatcgccgagcacaacatcctccagaaggagatcgatgcatatggacagcagttgcgatcattggtgggcccagatgccgccactatccggtcgcagtatcgggatctgcttaaggccgccagttggcgtggacagtctttgggcagcctgtatacacatcttcaggggtgtactcgacaactgtcagccctggcagagcagcagagacggattttacaacaggattggtccgacctgatggcagaccctgcgggggttagacgcgaatatgaacacttcaagcaacatgagttgctgtctcaagaacagagtgtgaaccaactggaggacgatggcgagagaatggtggaactgcgccatcccgccgttggcccaattcaggcccatcaggaagcattgaaaatggaatggcaaaacttcttgaatctttgcatttgccaggaaactcagctacagcacgtcgaagactaccgccggtttcaggaagaagctgacagcgtgtcacaaacactggccaaactcaactccaatctcgatgcaaaatacagtcccgctcccggcggtccccctggcgcgccaactgagttactgcaacaactcgaagctgaggagaagagactggccgtgaccgagagagcaacaggggaccttcagcgaaggtctagggatgttgccccgctgccacagcgccgtaatccaccacagcaaccacttcacgtagattctatttgcgattgggactccggcgaggtccagctgttacagggcgagagatacaaactagtagataatacagacccacacgcctgggtggtgcagggtccaggcggagagactaagagggcgcctgccgcctgtttctgtattccagctcccgatccagacgctgtggcaagagcgtccagactggcaagtgagcttcaggccctgaagcagaagctggctactgtgcaaagtaggctgaaggcgtccgccgtggaaagtctgcggccttcccagcaggccccgtctggcagtgatctggcaaaccctcaggcccagaaattgctgacccagatgactaggctcgacggtgacttaggccagatcgaaaggcaagtcctggcctgggcccgggctcctctgtctcggccgactcctttggaggatctggaagggagaatccactctcatgaaggaactgcccaaaggcttcagagcctcgggacagagaaggagaccgctcaaaaagagtgtgaagcttttttaagcaccaggcctgtgggaccagcagctctccagctgccagtggcactgaatagcgtgaaaaacaaattctcagacgtccaggttctttgctccctttatggtgagaaggctaaagctgccttggaccttgaaagacagatacaggatgccgatagagtgatcagaggcttcgaagcgaccttggtgcaggaggcacccattcccgccgagcctggcgccctacaggagcgcgtgagcgagctccagcggcaaaggcgcgagctgctcgaacagcagacttgcgtattgcgcctccacagagctcttaaggccagcgagcacgcctgtgccgccctgcaaaacaacttccaggagttttgtcaggatttaccccgccaacagcgccaagtgcgcgccctcaccgaccgctatcatgcagtgggtgaccagttagacctgcgagagaaggtggtccaagacgctgctctgacctaccagcagtttaaaaattgtaaggataatctctcttcatggctggagcacctgccccgctcccaggtgcggccatctgatggcccctctcagattgcttacaaattacaggcacagaaacgactgactcaagaaatccagagcagggaaagggaccgggccacagcttctcatttgtctcaggccctgcaggcagcactccaggattatgagctccaggccgacacctaccgttgttccctcgagcctactttggcggtatcagctccaaaacggcctagagtggcacctcttcaggaatctatccaagcccaagaaaaaaatctggctaaggcctacaccgaagtcgctgccgcccagcaacaactcctgcagcagctcgaattcgctagaaaaatgcttgaaaaaaaggagctctcagaggacatcaggcgcacacatgatgccaagcagggtagcgagagcccagcacaggcaggtagagagtcggaggcactgaaggcccagctcgaggaggagcggaaaagggtggccagagtccagcacgagctggaagcacagaggtcccaacttctccagctgaggacccaacgccccttggaacgtctcgaagaaaaggaggtggtcgaattttatagagatccccagcttgaaggctcgctctccagggtaaaggctcaagtggaggaagagggtaaaaggcgggccggcctgcaggctgacttagaagtggcagcacaaaaggtggtgcagctggaatctaagaggaaaaccatgcagcctcacttgctaactaaagaggtgacccaggtcgagagggaccccggtctggactctcaggctgcacagctgagaattcaaatacaacagttgcggggagaggatgctgtaatctcagcccggttggaggggctcaagaaagaactgcttgccctcgagaagagagaggtcgacgtcaaagagaaggtcgtcgtcaaggaggtagtcaaggtggaaaagaacctggagatggttaaggccgctcaggccctgcggctgcagatggaggaggatgccgctcgcaggaaacaggctgaggaggcagttgccaagctccaggcgcgaatcgaagatctagagcgcgccatttctagcgtggaacctaaggtcatcgttaaggaagtcaagaaggtggagcaagacccgggactcctgcaggagagctccagattgcgaagtctgttagaagaagaaagaacaaagaatgctactctagcccgtgagctgagtgacctccacagcaagtattccgttgttgagaagcagagacctaaggtccagttacaggaacgggtgcacgagatctttcaggtggatcctgaaaccgagcaagagattacgcggttgaaagccaagctacaggaaatggcagggaaacgctctggcgttgagaaagaggtagaaaagttactgcctgatctggaggttctgcgcgcacagaagcccactgtcgagtacaaggaagtcacgcaggaggtggtgcgccacgagagatcccctgaggtgctcagggaaatcgaccggcttaaagcccagctcaatgaactggtgaattcacacggccgaagccaggagcagcttatcaggttgcagggagagcgagatgagtggcgtcgcgagcgcgccaaggtagagacgaaaacagtgtcgaaagaagtcgtgcgccacgaaaaggatcccgtcttagaaaaagaggccgaacgccttcgacaggaagtgagggaagctgcccagaaacgtagggcagccgaagacgcagtctacgagcttcagagcaaaaggttgctgctcgaaaggagaaagcctgaagaaaaggtggttgtccaagaagtggtggttacacaaaaggatcctaagctgcgggaagaacactctaggctaagtggtagcctggacgaagaggtggggcgtaggcgccagctggagttggaggtccaacagctccgcgctggagtggaggaacaggaagggttactttcatttcaagaggacagaagcaagaaactggcggttgagagagaactaagacagctcaccctcagaatccaggaactcgagaagagaccccctacagtacaggaaaaaattataatggaagaagtggtcaaactggaaaaggaccccgatctcgaaaaatcaaccgaggctttgcggtgggatttagaccaagagaagacccaagtgactgaactaaacagagaatgtaaaaacctccaggtacaaatcgacgtcctccaaaaagccaaatcgcaggaaaaaaccatatataaggaagtgattcgggtccagaaagatcgagtcttagaggatgagcgtgcccgggtgtgggaaatgttgaaccgagaacgcactgcgcgccaagctcgggaggaggaggcacggaggttgcgcgaacgtatcgatagagctgaaacgctgggccggacctggtctagggaggagagcgagctacagcgggctcgggaccaagccgatcaggaatgcggcagactccagcaggaactccgggctttagaacgacagaagcagcagcaaaccctgcagttgcaagaggaaagtaaactgttatcccagaaaactgagtctgagaggcagaaagcggctcaaagagggcaagagctgtcaagacttgaggccgccatccttcgggaaaaggaccagatctacgagaaagagcgcacactgagagatcttcacgcaaaggtgtctcgggaggagctgtcacaggaaactcagacgcgggaaaccaacttaagcactaaaatcagtatattggaacctgagacaggcaaggatatgtccccctatgaagcctacaagagaggaattatcgataggggacaatatttacagctgcaggagctagagtgcgactgggaagaggtcactacatccggtccatgcggggaggaatctgtgctgctcgataggaaaagcggcaaacagtattccatcgaagccgccctcaggtgccggaggattagcaaggaggaatatcatctgtacaaagatggacacctaccaattagtgaattcgccttactggttgcaggcgaaacaaagccatcctcgtcactttctatcggaagcatcatttctaaaagccctctggcatccccagcccctcaatccacaagctttttcagcccttccttttcactgggacttggggatgattccttccctatcgccggcatttatgatacaacaaccgataataaatgctctattaagacagccgttgccaagaatatgctcgacccaattactggacagaaattactcgaggcccaggctgccaccggcggaatcgtggacctgctgtccagggaacgttattctgttcataaagctatggaacgcggccttatcgagaacacctccactcaacgtctactgaatgcgcaaaaggccttcactggcatagaggacccagtgactaaaaagcggctatccgtgggcgaggctgtacagaagggctggatgcccagagaatccgttctgccccatcttcaagtacagcacctgacaggcggtctaatcgatccaaaaaggacaggcaggatccctatacaacaagccttactgagcgggatgatctcagaagagcttgctcaactgctccaggacgagtcttcgtacgaaaaggacctaacagaccctatcagcaaagaaaggctgtcctataaagaggccatgggacgctgtcgcaaagatccccttagcggactgctgctgctccctgctgcacttgagggctacaggtgttatcgttccgcctcccctacagtccctagatcgctgaggtag

SEQ ID NO: 122818 - DNA, 6102 bp, Artificial Sequence
  derived and/or modified sequence
atgttcaagggcctgagcaagggcagccagggcaagggcagccccaagggcagccctgccaagggcagccccaagggcagccccagccgccacagccgggccgccacccaggagctggccctgctgatcagcaggatgcaggccaatgctgaccaggtggagcgggacatcctggagacccagaagaggctgcagcaggaccggctgaacagcgagcagagccaggccctgcagcaccagcaggagaccggccgcagcctgaaggaggccgaggtgctgctgaaggacctcttcctggatgtggacaaggcccggcggctgaagcacccccaggccgaggagattgagaaggacatcaagcagctgcacgagcgggtgacccaggagtgtgccgagtaccgggccctgtatgagaagatggtgctgcccccagatgtgggcccccgggtggactgggcccgggtgctggagcagaagcagaagcaggtgtgtgccggccagtatggccctggcatggccgagctggagcagcagattgctgagcacaacatcctgcagaaggagattgatgcctacggccagcagctgcggagcctggtgggcccagatgctgccaccatccgcagccagtacagagacctgctgaaggccgcctcctggaggggccagagcctgggcagcctgtacacccacctgcagggctgcacccggcagctgagcgccctggccgagcagcagaggcgcatcctgcagcaggactggagcgacctgatggctgaccctgctggggtgagaagagaatatgagcacttcaagcagcacgagctgctgagccaggagcagagcgtgaaccagctggaggatgatggagagaggatggtggagctgcggcaccctgctgtgggccccatccaggcccaccaggaggccctgaagatggagtggcagaacttcctgaacctgtgcatctgccaggagacccagctgcagcacgtggaggactaccgccgcttccaggaggaggccgacagcgtgtcccagaccctggccaagctgaacagcaacctggatgccaagtacagccctgcccctgggggccccccaggggcccccacagagctgctgcagcagctggaggccgaggagaagaggctggccgtgacagagcgggccaccggggacctgcagaggaggagcagagatgtggcccccctgccccagaggagaaatccaccccagcagcccctgcacgtggacagcatctgtgactgggacagcggggaggtgcagctgctgcagggcgagcgctacaagctggtggacaacacagacccccacgcctgggtggtgcagggccctggaggagagaccaagagggccccagctgcctgcttctgcatcccagccccagaccctgatgctgtggcccgggccagccggctggccagcgagctgcaggccctgaagcagaagctggccaccgtgcagagccggctgaaggccagcgctgtggagagcctgcggcccagccagcaggcccccagcggcagtgacctggccaacccccaggcccagaagctgctgacccagatgacccggctggatggagacctgggccagatcgagcggcaggtgctggcctgggcccgggcccccctgagccggcccacccccctggaggacctggagggccgcatccacagccatgagggcacagcccagaggctgcagagcctgggcacagagaaggagacagcccagaaggaatgtgaggccttcctgagcaccaggcctgtgggccctgctgccctgcagctgcctgtggccctgaacagcgtgaagaacaagttcagtgatgtgcaggtgctgtgcagcctgtatggagagaaggccaaggccgccctggacctggagcggcagatccaggatgctgacagagtcatccggggctttgaggccaccctggtgcaggaggcccccatcccagctgagcccggggccctgcaggagcgggtgtctgagctgcagaggcagaggcgggagctgctggagcagcagacctgtgtgctgcggctgcaccgggccctgaaggccagcgagcacgcctgtgccgccctgcagaacaacttccaggagttctgccaggacctgccccggcagcagaggcaggtgcgggccctgacagaccgctaccacgctgtgggggaccagctggacctgcgggagaaggtggtgcaggatgctgccctgacctaccagcagttcaagaactgcaaggacaacctgagctcctggctggagcacctgcccaggagccaggtgcggcccagtgatggccccagccagatcgcctacaagctgcaggcccagaagaggctgacccaggagatccagagccgggagcgggaccgggccacagccagccacctgagccaggccctgcaggccgccctgcaggactatgagctgcaggccgacacctaccgctgcagcctggagcccaccctggccgtgtctgcccccaagaggccccgggtggcccccctgcaggagagcatccaggcccaggagaagaacctggccaaggcctacacagaggtggccgccgcccagcagcagctgctgcagcagctggagtttgccaggaagatgctggagaagaaggagctgtctgaggacatccggaggacccatgatgccaagcagggcagcgagagccctgcccaggccggccgggagagcgaggccctgaaggcccagctggaggaggagaggaagagggtggcccgggtgcagcacgagctggaggcccagaggagccagctgctgcagctgcggacccagaggcccctggagcggctggaggagaaggaggtggtggagttctacagagacccccagctggagggcagcctgagccgggtgaaggcccaggtggaggaggagggcaagagaagagctggcctgcaggccgacctggaggtggccgcccagaaggtggtgcagctggagagcaagaggaagaccatgcagccccacctgctgaccaaggaggtgacccaggtggagcgggaccccggcctggacagccaggccgcccagctgcgcatccagatccagcagctgcggggagaagatgctgtgatcagcgcccggctggagggcctgaagaaggagctgctggccctggagaagcgggaggtggatgtgaaggagaaggtggtggtgaaggaggtggtgaaggtggagaagaacctggagatggtgaaggccgcccaggccctgcggctgcagatggaggaggatgctgcccggaggaagcaggccgaggaggccgtggccaagctgcaggccagaattgaggacctggagcgggccatcagctctgtggagcccaaggtgattgtgaaggaggtgaagaaggtggagcaggaccccggcctgctgcaggagagcagccggctgcggagcctgctggaggaggagaggaccaagaatgccaccctggcccgggagctgagtgacctgcacagcaagtacagcgtggtggagaagcagaggcccaaggtgcagctgcaggagcgggtgcatgagatcttccaggtggaccctgagacagagcaggagatcacccggctgaaggccaagctgcaggagatggccggcaagaggtctggagtggagaaggaggtggagaagctgctgcctgacctggaggtgctgcgggcccagaagcccaccgtggagtacaaggaggtgacccaggaggtggtgagacatgagaggagccctgaggtgctgcgggagattgaccggctgaaggcccagctgaatgagctggtgaacagccacggccgcagccaggagcagctgatccggctgcagggcgagagagatgagtggaggcgggagcgggccaaggtggagaccaagacagtgtccaaggaggtggtgagacatgagaaggaccctgtgctggagaaggaggccgagcggctgcggcaggaggtgcgggaggccgcccagaagagaagagctgctgaagatgctgtgtatgagctgcagagcaagaggctgctgctggagaggaggaagccagaggagaaggtggtggtgcaggaggtggtggtgacccagaaggaccccaagctgcgggaggagcacagccggctgagcggcagcctggatgaggaggtgggcagaagacggcagctggagctggaggtgcagcagctgcgggccggcgtggaggagcaggagggcctgctgtccttccaggaggacaggagcaagaagctggccgtggagcgggagctgcggcagctgaccctgcgcatccaggagctggagaagaggcccccaacagtgcaggagaagatcatcatggaggaggtggtgaagctggagaaggaccctgacctggagaagagcacagaggccctgcgctgggacctggaccaggagaagacccaggtgacagagctgaaccgggagtgcaagaacctgcaggtgcagattgatgtgctgcagaaggccaagagccaggagaagaccatctacaaggaggtgatccgggtgcagaaggacagagtgctggaggatgagcgggcccgggtgtgggagatgctgaaccgggagaggacagcccggcaggcccgggaggaggaggcccggcggctgcgggagagaattgacagagctgagaccctgggccgcacctggagccgggaggagagcgagctgcagagggcccgggaccaggccgaccaggagtgtggccgcctgcagcaggagctgcgggccctggagcggcagaagcagcagcagaccctgcagctgcaggaggagagcaagctgctgagccagaagacagagagcgagcggcagaaggccgcccagaggggccaggagctgagccggctggaggccgccatcctgcgggagaaggaccagatctatgagaaggagaggaccctgcgggacctgcacgccaaggtgtcccgggaggagctgagccaggagacccagacccgggagaccaacctgagcaccaagatcagcatcctggagcctgagaccgggaaggacatgagcccctatgaggcctacaagaggggcatcatcgaccggggccagtacctgcagctgcaggagctggagtgtgactgggaggaggtgaccaccagcggcccctgtggggaggagagcgtgctgctggacaggaagagcggcaagcagtacagcattgaagctgccctgcgctgccgccgcatcagcaaggaggagtaccacctgtacaaggatggccacctgcccatcagcgagtttgccctgctggtggccggggagaccaagcccagcagcagcctgagcatcggcagcatcatcagcaagagccccctggccagccctgccccccagagcaccagcttcttcagccccagcttcagcctgggcctgggagatgacagcttccccatcgccggcatctatgacaccaccacagacaacaagtgcagcatcaagacagctgtggccaagaacatgctggaccccatcaccggccagaagctgctggaggcccaggccgccactggaggcatcgtggacctgctgagccgggagcgctacagcgtgcacaaggccatggagcggggcctgattgagaacaccagcacccagaggctgctgaatgcccagaaggccttcaccggcattgaagatcctgtgaccaagaagaggctgtctgtgggggaggccgtgcagaagggctggatgccccgggagagcgtgctgccccacctgcaggtgcagcacctgactggaggcctgattgaccccaagaggacaggccgcatccccatccagcaggccctgctgagcggcatgatcagcgaggagctggcccagctgctgcaggatgagagcagctatgagaaggacctgacagaccccatcagcaaggagcggctgagctacaaggaggccatgggccgctgcaggaaggaccccctgagcggcctgctgctgctgcctgctgccctggagggctaccgctgctacagaagtgccagccccaccgtgcccaggagcctgaggtag

SEQ ID NO: 122819 - DNA, 6102 bp, Artificial Sequence
  derived and/or modified sequence
atgttcaagggcctgagcaagggcagccagggcaagggcagccccaagggatcccctgctaaaggaagtccgaaaggcagtccaagccgccacagccgggctgccacccaggagctggccctactgatctccagaatgcaagccaatgctgatcaggtggagcgcgacatcctcgaaactcaaaagagactacagcaagatcggctcaattctgaacaaagccaagctctgcagcaccagcaggagacaggccgcagtctaaaggaagcagaagtgctgttgaaggacctctttttggacgtcgacaaggccagacgtctcaaacacccacaagctgaagagattgaaaaagatattaaacagctccatgaacgggtgacccaggaatgcgccgagtaccgggcactctacgaaaaaatggtgctgccacccgacgtgggaccacgcgtggactgggcgcgagtgctcgaacagaagcaaaagcaggtgtgtgctggacagtatggtcctgggatggctgagcttgagcaacagattgccgaacataatatcctccaaaaagagatcgatgcctatgggcagcagctgaggtcactcgtaggaccggatgccgctacaattcgctcacaatatcgggatctgttgaaggctgcaagctggaggggccagagtctagggtctctctacacacacttacaaggctgcacccgccagctttccgcactggctgaacagcagcggaggattctgcagcaggactggagcgatctgatggccgaccccgctggagtacgcagagagtacgagcatttcaagcagcacgaactgctcagccaggagcaatccgtaaatcagctcgaagacgacggtgagaggatggtagagctccgacatcccgcagtgggtccaatacaggcccaccaagaggcactcaagatggaatggcagaacttcctcaatctgtgtatttgtcaggagactcaacttcagcatgtggaagattacagacgctttcaggaggaagctgatagtgtgtctcagaccctggcaaagttgaattccaacctcgatgcgaaatacagcccagcccctgggggaccccccggagccccaactgagcttcttcaacaactggaagccgaagagaagcggctggccgtgacagagagggccaccggcgatttgcaacggagatctagagatgtggcaccccttccccagagaagaaaccctcctcaacagcccctccatgtggactccatttgcgactgggattccggcgaggtccagctgctccagggcgaacgatacaagctggtggacaacacagaccctcatgcatgggtcgtgcagggtccaggcggagagaccaagcgcgccccagctgcatgcttttgcatccccgcacctgaccccgacgccgttgcccgggcctcccgcctcgcctcggagctgcaggccctgaagcagaaactcgccacggtgcagtctcgacttaaggcaagcgcagtagagagtcttcgcccaagtcagcaagcacctagtggcagtgaccttgccaatccgcaggcccagaaattgctgacacagatgacacgtttggatggtgacctcggccagattgagcgacaggtcctggcttgggcacgagccccactgtcaagacccacgccactggaggacctggaggggcggattcattcacacgagggcaccgcacagagactgcagtccctgggtactgagaaagagacagctcagaaggagtgtgaagcatttctgtccaccagaccggtggggcccgccgccctccaattgcccgtggccctcaactcggtgaaaaataaattctctgacgtgcaggtgttatgttccctgtacggggagaaggccaaagcagctcttgatctggagcgccaaattcaggacgcggatcgtgtaatccgagggtttgaagccacactcgtgcaagaagccccaataccggcggaacctggggccctgcaggagcgagtctccgagttacagaggcagaggcgagaactcctggaacaacagacatgtgtgctgaggcttcacagagctctaaaggcctctgaacacgcctgtgctgctcttcaaaataacttccaagagttctgccaggatctgcctaggcaacagaggcaggtacgagctctcaccgataggtatcacgcggtgggtgaccaactggatctgagggaaaaagtagtccaggatgccgccctcacttaccaacagttcaaaaactgcaaagacaacctgtcctcctggttggagcatctcccaaggtctcaagtcaggccgagcgacggtccctcccagatagcctataagctccaggcacaaaaacggctcacccaggaaatccagagtcgagaacgtgacagggctaccgcaagtcatctttcacaggcactgcaggccgcactgcaggactatgagttgcaggctgacacttatcggtgcagcttagagcccacactagctgtgagcgcgcccaagcgaccgagggttgccccgctgcaggagtcaatacaagcccaggaaaaaaacctcgccaaggcatacaccgaggtggccgcggcccagcagcagctcctgcagcagctagaattcgctagaaagatgctggaaaaaaaagagttaagcgaggacatcagacgtacgcacgatgctaagcagggaagcgagtccccggcccaggccggacgtgaatctgaggcgctgaaagcccagctggaagaggagaggaagagagtggcccgcgtgcagcatgagctggaggctcagagaagtcaactactgcagcttaggactcagcggcccctggaacggttggaggaaaaggaagtagtcgaattttatagggacccacagttggagggctccctgtctcgagtcaaagcacaggtggaggaggagggaaagcggcgcgctggcctgcaggcggacctggaagtggcagcgcaaaaggttgtgcagttagagagcaagcgcaagaccatgcagcctcacctgctcacaaaggaagttacccaggtggagcgtgaccccgggctggattcacaggccgcgcaattacggatccagatccagcagctccgtggtgaagacgctgtgatttccgcccgcctggaaggcctcaaaaaggagctgttagccctggagaaaagggaagtggacgttaaggaaaaggtagtggtgaaagaagtagtaaaggtagagaaaaatctggagatggtgaaggcagcccaggccctccgattgcagatggaggaagacgccgcacgtcgtaaacaggcagaagaggcggtagccaagctacaggcgcgaatcgaggatctggagagagccatctccagcgtggaacctaaggtgatcgtcaaggaagtgaaaaaggtggaacaggaccctggcctgctacaggagagctctagactaagatccttgctggaggaggagcggaccaagaatgcaacgctggctcgtgagctcagtgatctgcactccaaatattccgtggtcgaaaaacagcgcccaaaggtgcaactccaagagagagtgcacgagatattccaggtcgaccctgaaacagaacaggagatcactcgccttaaagccaagctgcaagagatggctggtaagaggagcggggtagaaaaagaggttgagaaactgctgccggatctggaggtcttaagagcacagaagcccactgttgagtacaaagaggtgacccaagaggtcgtgaggcatgagcgtagcccggaagtccttcgggagatcgatcgcctgaaagcacagctgaatgagctggtcaacagccatggcaggtcacaggagcagctaatccgcctccagggggaacgcgatgaatggcgtcgcgaaagagccaaagtcgaaacaaagaccgtatccaaagaagtggtgagacatgaaaaggatccggttctcgaaaaggaggcggagaggctacgccaggaagttagggaggctgcgcagaagcggcgggccgctgaggacgccgtgtacgagctacaatctaaacgtctcctgctggagaggcggaagcctgaagagaaggtggtcgtccaggaggtagtcgtgactcagaaagaccccaagttacgggaggagcacagccgcttaagtgggagcttggatgaggaagtcggccggaggcgccagttagaacttgaggtccagcagttacgagccggggtggaggaacaggagggccttctctcgttccaggaggatcgttccaaaaaacttgcagtggaacgagagttgcgtcagctgaccctccgtatccaggaactggaaaaaaggccacccaccgtccaagaaaaaataattatggaggaagttgtgaaactggagaaagatcccgacctggaaaaaagtacggaagccctgcgatgggaccttgaccaggaaaagacccaggtgaccgaacttaatcgcgaatgtaaaaatctgcaggtgcaaattgacgttctgcaaaaggccaagtcccaggaaaagacaatctacaaagaggtcatccgggtgcagaaagatcgagtgttggaagatgagcgggcacgggtgtgggagatgctcaatagagaaagaaccgctcggcaggccagggaagaagaggcaagacgactacgagaaagaatcgaccgcgctgaaactcttggacgaacatggtcaagagaggaatccgaactgcaacgcgcgcgagaccaggccgaccaggagtgcggtcggctgcagcaggaactcagagctttagagcgtcagaagcaacaacaaacacttcagctccaggaagaatccaagctgcttagccagaagacagaatcagagagacagaaggccgcccagcggggccaggaactgtcaagattggaagccgccatcctgcgcgagaaggaccaaatatatgaaaaagagcggactcttagggatctgcatgctaaggtgtcccgagaggaattaagccaggaaacccagacccgcgaaactaacctcagcaccaagatctctattctagaaccggaaacaggtaaggacatgtccccgtatgaggcgtacaaacgcggcataatcgacagggggcagtatttacagctgcaggaactggaatgtgactgggaggaagtgactacaagcggtccgtgcggagaggagtcagtgttgttggataggaagtccgggaagcagtactccatcgaagctgccctgcgctgtcggcgcatttcaaaggaggaataccacctatacaaggacgggcacctgcctattagcgagtttgccttgttggttgccggggagacaaagcctagtagctctctttccatcggctccatcattagcaaaagcccattggcctcaccagcgcctcagagcacctctttctttagcccaagcttttcccttggcctgggtgatgactccttcccaatcgctgggatttatgataccacgacagacaataaatgttccatcaagaccgctgtcgccaagaacatgctggaccccatcacagggcagaagctcctggaggctcaggccgcaactggcggcattgtcgatttgttgagccgcgagagatatagtgtgcacaaagccatggaacgcggactgatcgagaatacgtcgacacagcgcttgttgaatgcacaaaaagcctttacaggcatcgaagatcctgtgaccaagaagagacttagtgtgggagaggcagttcagaagggatggatgccccgagagtctgttttaccccatctgcaggtgcagcatctcacgggtggcctcattgaccccaagcgaacgggacgcattcccattcagcaggcgctattgtccggtatgattagcgaggagctggcacagctgctccaggacgagtccagctacgaaaaggacctaacagatcctatctcgaaagagcgactctcctataaggaagcaatgggaagatgtagaaaggatcccctctcggggctcctgctgctccctgccgctctagaaggctatcgctgctaccgctcagcgtccccaactgtgccgagatcactgaggtag

SEQ ID NO: 122820 - DNA, 6101 bp, Artificial Sequence
  derived and/or modified sequence
atgttcaagggcctgtccaaaggctctcagggaaaaggatcaccaaagggatcacccgcaaaaggttcaccaaaaggctctccatcccgtcacagccgcgctgcaactcaggagctggccctgctcatttcccgcatgcaggcaaacgccgatcaagttgaaagggacatcctggagactcaaaagcgcctgcagcaggatcggctgaattccgagcagagtcaggctctccagcaccagcaggagacggggcgatccctcaaagaggccgaggtcctcctgaaagatctgttcctcgacgttgacaaagctagacgattgaaacaccctcaggccgaagagattgaaaaagacattaagcagttacacgaacgggtcacccaagagtgcgccgagtatcgtgcactgtacgaaaaaatggtgctgcctcctgacgtgggcccaagagtagactgggcacgagtattggagcagaagcagaaacaagtgtgcgcaggccagtatggcccagggatggccgaacttgagcagcagatcgccgaacataatatacttcagaaggaaatcgatgcgtacggtcagcagttgagatccttagtagggcctgacgccgcaacaatccggtctcaatatagagacttactgaaggccgcttcttggcgcggtcagtccctcggcagcctgtatacacatttgcagggctgtactcgacagctgtctgccttggcggaacagcaaagacggattctgcagcaggattggtccgatttgatggctgaccccgcaggcgtacgaagagagtacgagcacttcaaacagcatgagctgctgtcccaagagcagtcggtcaatcagttagaagatgacggcgaaagaatggtggagcttagacatcccgcagtgggccctatacaggcccaccaggaggccttaaagatggagtggcagaatttccttaatttgtgcatatgtcaagaaactcagcttcaacacgtggaggactacagacggttccaagaggaagctgatagcgtcagccagacgctagcaaaactgaattctaatctggacgccaagtactcaccagcccctggaggtcctcctggggctcccactgaattgctgcagcaactggaggccgaggaaaaacgtttggccgtgacggagcgggctaccggtgacctgcagcggagaagccgggacgtcgccccactgccccagcggcgtaacccccctcagcagcctcttcatgtggacagcatttgtgactgggacagtggagaggtgcaactgctgcagggcgagcgatacaagttagtagacaacactgacccacatgcctgggttgtgcaaggacccggaggagaaactaaaagagcccctgcggcttgcttctgcattccagccccagaccccgacgcagtggcccgagcaagcagactggctagcgagttgcaggctttgaagcagaaacttgccacagtgcagagtcgactgaaagccagtgccgtagagtcattacgcccatctcagcaggctccatccggctccgacctggccaacccacaagcccagaagttgctcactcaaatgactaggctggacggggaccttgggcagattgagaggcaggtcctggcctgggcgcgtgcacccctgtccagacccactccccttgaagacttggaaggcagaattcattcccacgagggcacagcccaaaggctgcaatctctgggcaccgaaaaggagactgctcagaaggaatgcgaagcttttctctcgacccgccctgtgggacccgcagccctgcagttgccagtggctctcaactccgtcaaaaacaaattttcagacgtacaagttctttgcagtctctacggagagaaggccaaagcagccctggaccttgaacgccaaattcaggacgctgaccgggtgattcgcggatttgaagcaacgcttgtgcaagaagccccaatccctgctgagccgggtgcactccaggagcgcgttagtgagcttcagcggcaaagacgggagctgcttgaacaacaaacctgtgtgttgcggctacatagagcgctgaaagcgtcagaacacgcctgtgctgcactccagaataactttcaggagttctgtcaggacctcccaagacagcagcgccaggtacgagcactgacggacaggtaccacgctgttggtgatcagttagatctacgggagaaggtagtccaagacgcagctctgacttatcaacagttcaaaaattgtaaagacaacttgtcaagttggttggagcacctgcccagaagccaggtcaggccgtcagatgggcctagtcaaatagcctataagcttcaggcccagaagagattgactcaggagatccagtcccgggaaagggaccgggctactgcctcacaccttagccaggcccttcaagccgctctgcaggattatgagctgcaggcggatacctatcgctgcagtcttgaacccacactcgccgtgtcggcccctaagcgcccacgcgtggcccctcttcaggagtcaatccaggctcaggagaaaaatctagccaaagcatacactgaggtggcagcggcacaacagcagctactgcagcagctggagtttgcacgaaagatgctggaaaagaaggagctgagcgaggacattcgtagaacccacgacgccaaacagggttctgaatctcccgcacaggcagggagggaaagtgaggccctgaaagctcagcttgaagaagagagaaaacgggtggcgagggtccaacatgaactggaggctcagcggagccagctgctgcagctgcgtacccaacgacccctggagagattagaggaaaaagaagtggtggaattttaccgggatcctcagctcgaagggtcgctgtcaagggtgaaagcacaagtggaggaagaaggaaaaagacgggctggactgcaggctgatctggaagtcgctgcccagaaggtcgtccagctggagtctaagagaaaaactatgcagccgcatctgctcacgaaggaggtcactcaggtggagagagacccaggactcgactcgcaggcagctcaattaaggattcagatccaacagctgagaggagaagacgctgtgataagcgctcggctcgaaggcctgaagaaggagctcctggcgctggagaaacgcgaagtagacgtcaaggaaaaggtggttgtcaaagaggtggtgaaagtcgaaaagaatctcgagatggtcaaagctgcgcaagctctgagactccagatggaagaggatgccgctagacgcaagcaagccgaagaggcagtggctaaattacaggcgagaattgaagacttagaaagagccattagctcggtcgaaccaaaagtcatcgtgaaagaggtaaaaaaggtggagcaggaccccggattactgcaagaatccagtcggttgaggagcctgcttgaagaggaaaggacaaagaatgccactttggcacgcgaactgtctgacctgcattcaaagtactctgtagtggagaagcagaggcctaaagtgcagttacaggagcgggtgcatgagattttccaggtggatcccgaaacggagcaagaaatcacaagactgaaagctaaattgcaggagatggccggaaagcggtccggcgttgagaaagaggtcgagaaactgcttcccgacctcgaggtgctgagggcccaaaagccaactgtggaatacaaagaagttacccaagaagtggttcgacatgagcggtcgccagaagtactcagggagatcgacagactgaaagcccagctcaatgagctggtcaattcacatggtcggtctcaggaacagctcattcgcctccagggggagcgggacgaatggagacgcgagcgagccaaggtagagaccaaaaccgtgagcaaggaagtggtgagacacgagaaggaccccgtgctggagaaggaagctgagcgcctgcggcaggaggttagagaggccgcacagaagaggagggccgcagaagatgcagtgtatgagctccagtcgaaaagactcctgctcgaacgccgaaaacctgaggagaaagtcgtggtccaggaagtagttgtaacccagaaggacccaaagttgcgagaggagcacagccgcctgtccgggtcgctggacgaggaagtgggtcggcgtcgccagttggagctggaggtgcagcagctccgcgctggtgtcgaagagcaagaaggactactgtctttccaggaggaccggtccaaaaaactggcagtcgaacgagaattacggcaattgaccctccgcattcaggaactggagaagaggccacctactgtgcaggaaaaaatcatcatggaggaggtcgtcaagctggaaaaagatccagatttggagaagtctacagaagcgctgcggtgggatttggaccaagaaaagacacaagtcacagagcttaaccgagagtgtaaaaatttgcaggtgcagatagatgtactgcaaaaggccaagtctcaggagaaaaccatatacaaggaggtgatcagggttcagaaggaccgggtcctggaggacgagagagcacgggtatgggagatgttgaatcgagaaagaactgctaggcaggcccgagaagaggaggcacgccgtttgagagagaggattgatcgggctgaaacacttggaaggacgtggtcgcgcgaggagagcgagctgcagagagcccgtgatcaggcagatcaggagtgtggcaggctgcagcaggagctacgtgccctggagagacagaaacagcagcaaactctgcaactgcaagaggagagcaagttgctcagtcagaaaacagaaagcgagagacagaaagcagcccagaggggtcaagagttgtcaaggctagaagcagcgattctgcgagaaaaggaccaaatatatgagaaggaaaggactcttagggatcttcatgctaaagtgtcacgagaggaactgagccaggaaacccagactcgcgagactaacctgagcacaaaaatatcaatactggagcccgaaaccggcaaagacatgtccccctacgaagcttataaacggggaatcattgaccggggtcagtacctgcaattacaggaactggaatgcgattgggaagaggtgaccacatcaggaccatgtggcgaagagtcagttctcttggatcggaagagcggcaagcagtattctatagaggctgccctgcgctgcaggcgaatcagtaaggaggagtaccatttatataaggacggccacttaccaatcagtgagtttgctttgttggtggccggagagacaaaacccagcagctccctctcaatcggaagcatcatctccaaaagtcccctcgccagccccgctcctcaatcaacctctttcttttcaccatcattctctttaggactaggtgacgacagtttccccatcgccggaatctacgacacaaccacagacaataagtgttcaattaagactgccgttgcaaaaaatatgctggaccccataaccggtcagaaattgctggaggctcaggctgccacgggaggcatagttgatttgctatctcgcgagaggtacagcgtccacaaggccatggagaggggtctgattgagaacacttctactcagcgattgctcaatgctcagaaggcattcaccggaatcgaggaccctgttactaagaagagactgtctgtcggcgaggctgtgcagaaggggtggatgcctcgcgaatcagtccttccccatctacaggtgcagcatctcactggagggcttatagatcctaagagaacaggtcgtattcctattcagcaggccctcctcagcggaatgatcagcgaggaactggcgcaattgctgcaggacgagtcctcatatgagaaggatctcaccgaccccatcagcaaggagcggctgtcatacaaagaggctatgggcaggtgtcgcaaagatccattgagtggcctgctcctgttaccagccgcattggaaggctatcgctgttaccggtcagcctcgccaaccgtaccacggtcgctgcggta

SEQ ID NO: 122821 - DNA, 6102 bp, Artificial Sequence
  derived and/or modified sequence
atgttcaagggcctgagcaagggcagccagggcaagggcagccccaagggcagccccgccaagggcagccccaagggcagccccagcagacacagcagagccgccacccaggagctggccctgctgatcagcagaatgcaggccaacgccgaccaggtggagagagacatcctggagacccagaagagactgcagcaggacagactgaacagcgagcagagccaggccctgcagcaccagcaggagaccggcagaagcctgaaggaggccgaggtgctgctgaaggacctgttcctggacgtggacaaggccagaagactgaagcacccccaggccgaggagatcgagaaggacatcaagcagctgcacgagagagtgacccaggagtgcgccgagtacagagccctgtacgagaagatggtgctgccccccgacgtgggccccagagtggactgggccagagtgctggagcagaagcagaagcaggtgtgcgccggccagtacggccccggcatggccgagctggagcagcagatcgccgagcacaacatcctgcagaaggagatcgacgcctacggccagcagctgagaagcctggtgggccccgacgccgccaccatcagaagccagtacagagacctgctgaaggccgccagctggagaggccagagcctgggcagcctgtacacccacctgcagggctgcaccagacagctgagcgccctggccgagcagcagagaagaatcctgcagcaggactggagcgacctgatggccgaccccgccggcgtgagaagagagtacgagcacttcaagcagcacgagctgctgagccaggagcagagcgtgaaccagctggaggacgacggcgagagaatggtggagctgagacaccccgccgtgggccccatccaggcccaccaggaggccctgaagatggagtggcagaacttcctgaacctgtgcatctgccaggagacccagctgcagcacgtggaggactacagaagattccaggaggaggccgacagcgtgagccagaccctggccaagctgaacagcaacctggacgccaagtacagccccgcccccggcggcccccccggcgcccccaccgagctgctgcagcagctggaggccgaggagaagagactggccgtgaccgagagagccaccggcgacctgcagagaagaagcagagacgtggcccccctgccccagagaagaaaccccccccagcagcccctgcacgtggacagcatctgcgactgggacagcggcgaggtgcagctgctgcagggcgagagatacaagctggtggacaacaccgacccccacgcctgggtggtgcagggccccggcggcgagaccaagagagcccccgccgcctgcttctgcatccccgcccccgaccccgacgccgtggccagagccagcagactggccagcgagctgcaggccctgaagcagaagctggccaccgtgcagagcagactgaaggccagcgccgtggagagcctgagacccagccagcaggcccccagcggcagcgacctggccaacccccaggcccagaagctgctgacccagatgaccagactggacggcgacctgggccagatcgagagacaggtgctggcctgggccagagcccccctgagcagacccacccccctggaggacctggagggcagaatccacagccacgagggcaccgcccagagactgcagagcctgggcaccgagaaggagaccgcccagaaggagtgcgaggccttcctgagcaccagacccgtgggccccgccgccctgcagctgcccgtggccctgaacagcgtgaagaacaagttcagcgacgtgcaggtgctgtgcagcctgtacggcgagaaggccaaggccgccctggacctggagagacagatccaggacgccgacagagtgatcagaggcttcgaggccaccctggtgcaggaggcccccatccccgccgagcccggcgccctgcaggagagagtgagcgagctgcagagacagagaagagagctgctggagcagcagacctgcgtgctgagactgcacagagccctgaaggccagcgagcacgcctgcgccgccctgcagaacaacttccaggagttctgccaggacctgcccagacagcagagacaggtgagagccctgaccgacagataccacgccgtgggcgaccagctggacctgagagagaaggtggtgcaggacgccgccctgacctaccagcagttcaagaactgcaaggacaacctgagcagctggctggagcacctgcccagaagccaggtgagacccagcgacggccccagccagatcgcctacaagctgcaggcccagaagagactgacccaggagatccagagcagagagagagacagagccaccgccagccacctgagccaggccctgcaggccgccctgcaggactacgagctgcaggccgacacctacagatgcagcctggagcccaccctggccgtgagcgcccccaagagacccagagtggcccccctgcaggagagcatccaggcccaggagaagaacctggccaaggcctacaccgaggtggccgccgcccagcagcagctgctgcagcagctggagttcgccagaaagatgctggagaagaaggagctgagcgaggacatcagaagaacccacgacgccaagcagggcagcgagagccccgcccaggccggcagagagagcgaggccctgaaggcccagctggaggaggagagaaagagagtggccagagtgcagcacgagctggaggcccagagaagccagctgctgcagctgagaacccagagacccctggagagactggaggagaaggaggtggtggagttctacagagacccccagctggagggcagcctgagcagagtgaaggcccaggtggaggaggagggcaagagaagagccggcctgcaggccgacctggaggtggccgcccagaaggtggtgcagctggagagcaagagaaagaccatgcagccccacctgctgaccaaggaggtgacccaggtggagagagaccccggcctggacagccaggccgcccagctgagaatccagatccagcagctgagaggcgaggacgccgtgatcagcgccagactggagggcctgaagaaggagctgctggccctggagaagagagaggtggacgtgaaggagaaggtggtggtgaaggaggtggtgaaggtggagaagaacctggagatggtgaaggccgcccaggccctgagactgcagatggaggaggacgccgccagaagaaagcaggccgaggaggccgtggccaagctgcaggccagaatcgaggacctggagagagccatcagcagcgtggagcccaaggtgatcgtgaaggaggtgaagaaggtggagcaggaccccggcctgctgcaggagagcagcagactgagaagcctgctggaggaggagagaaccaagaacgccaccctggccagagagctgagcgacctgcacagcaagtacagcgtggtggagaagcagagacccaaggtgcagctgcaggagagagtgcacgagatcttccaggtggaccccgagaccgagcaggagatcaccagactgaaggccaagctgcaggagatggccggcaagagaagcggcgtggagaaggaggtggagaagctgctgcccgacctggaggtgctgagagcccagaagcccaccgtggagtacaaggaggtgacccaggaggtggtgagacacgagagaagccccgaggtgctgagagagatcgacagactgaaggcccagctgaacgagctggtgaacagccacggcagaagccaggagcagctgatcagactgcagggcgagagagacgagtggagaagagagagagccaaggtggagaccaagaccgtgagcaaggaggtggtgagacacgagaaggaccccgtgctggagaaggaggccgagagactgagacaggaggtgagagaggccgcccagaagagaagagccgccgaggacgccgtgtacgagctgcagagcaagagactgctgctggagagaagaaagcccgaggagaaggtggtggtgcaggaggtggtggtgacccagaaggaccccaagctgagagaggagcacagcagactgagcggcagcctggacgaggaggtgggcagaagaagacagctggagctggaggtgcagcagctgagagccggcgtggaggagcaggagggcctgctgagcttccaggaggacagaagcaagaagctggccgtggagagagagctgagacagctgaccctgagaatccaggagctggagaagagaccccccaccgtgcaggagaagatcatcatggaggaggtggtgaagctggagaaggaccccgacctggagaagagcaccgaggccctgagatgggacctggaccaggagaagacccaggtgaccgagctgaacagagagtgcaagaacctgcaggtgcagatcgacgtgctgcagaaggccaagagccaggagaagaccatctacaaggaggtgatcagagtgcagaaggacagagtgctggaggacgagagagccagagtgtgggagatgctgaacagagagagaaccgccagacaggccagagaggaggaggccagaagactgagagagagaatcgacagagccgagaccctgggcagaacctggagcagagaggagagcgagctgcagagagccagagaccaggccgaccaggagtgcggcagactgcagcaggagctgagagccctggagagacagaagcagcagcagaccctgcagctgcaggaggagagcaagctgctgagccagaagaccgagagcgagagacagaaggccgcccagagaggccaggagctgagcagactggaggccgccatcctgagagagaaggaccagatctacgagaaggagagaaccctgagagacctgcacgccaaggtgagcagagaggagctgagccaggagacccagaccagagagaccaacctgagcaccaagatcagcatcctggagcccgagaccggcaaggacatgagcccctacgaggcctacaagagaggcatcatcgacagaggccagtacctgcagctgcaggagctggagtgcgactgggaggaggtgaccaccagcggcccctgcggcgaggagagcgtgctgctggacagaaagagcggcaagcagtacagcatcgaggccgccctgagatgcagaagaatcagcaaggaggagtaccacctgtacaaggacggccacctgcccatcagcgagttcgccctgctggtggccggcgagaccaagcccagcagcagcctgagcatcggcagcatcatcagcaagagccccctggccagccccgccccccagagcaccagcttcttcagccccagcttcagcctgggcctgggcgacgacagcttccccatcgccggcatctacgacaccaccaccgacaacaagtgcagcatcaagaccgccgtggccaagaacatgctggaccccatcaccggccagaagctgctggaggcccaggccgccaccggcggcatcgtggacctgctgagcagagagagatacagcgtgcacaaggccatggagagaggcctgatcgagaacaccagcacccagagactgctgaacgcccagaaggccttcaccggcatcgaggaccccgtgaccaagaagagactgagcgtgggcgaggccgtgcagaagggctggatgcccagagagagcgtgctgccccacctgcaggtgcagcacctgaccggcggcctgatcgaccccaagagaaccggcagaatccccatccagcaggccctgctgagcggcatgatcagcgaggagctggcccagctgctgcaggacgagagcagctacgagaaggacctgaccgaccccatcagcaaggagagactgagctacaaggaggccatgggcagatgcagaaaggaccccctgagcggcctgctgctgctgcccgccgccctggagggctacagatgctacagaagcgccagccccaccgtgcccagaagcctgagatag

SEQ ID NO: 122822 - DNA, 6587 bp, Artificial Sequence
  derived and/or modified sequence
agtgtggccgttgtgggtgcatgcgcgtcaggcctgggacccggccgcccgcccgctgcctcacctgcaaggaggggcctcccagaaactcccttccccagtgcccagccgccccacctcgccagacttagctgaccagccagtgaggacgcccgctgcctcccacctgccctcctgccgtctttcgccagccaagcccagcctgagccagcacttgcctttacgaccatgttcaaggggctgagcaaaggctcccaggggaaggggtcccccaagggctcccccgccaaggggtcccccaaaggctcccccagcaggcacagccgggctgccacccaggagctggcccttctcatctcccgcatgcaagccaacgccgaccaggtggagcgggacatcctggagacgcagaagaggctgcagcaggaccggctgaacagtgagcagagccaggccctgcagcaccagcaggagacgggccgcagcctgaaggaggctgaggtgctgctcaaggacctcttcctggacgtggacaaggcccggcggctcaagcacccgcaggctgaggagattgagaaggacatcaagcagctgcacgagcgggtgacccaggagtgtgcggagtaccgtgccctgtacgagaagatggtgctgccccccgacgtgggacccagggtcgactgggcacgcgtgctggagcagaaacagaagcaggtctgcgcaggccagtacgggccgggcatggcggagctggagcaacagatcgccgagcacaacatcctgcagaaggagatcgacgcctatgggcagcagctgcggagcctcgtggggccggatgcagccaccatccggagccaataccgagacctactgaaggcggcgtcgtggcgcgggcagagcctgggcagcctgtacacgcacctccagggctgcacgcggcagctgagcgccctggctgagcagcagcgccgcatcctgcagcaggactggagcgacctcatggccgaccctgcgggcgtgcggcgggagtacgagcacttcaagcagcacgagctgctgagccaggagcagagcgtgaaccagctggaggacgacggcgagcgcatggtggagctgcggcaccccgcggtggggcccatccaggcccaccaggaggccctgaagatggagtggcagaacttcctgaacctgtgtatctgccaggagacccagctgcagcacgtggaggactaccgccggttccaggaagaggccgactcagtcagccagaccctggcgaagctcaactccaacttggatgccaagtacagccctgcacctgggggcccccctggcgcccccacagagctgctgcaacagctggaggcagaggaaaaacggctggccgtcaccgagagggccactggggacctgcagcggcgaagccgggatgtggcccctctgccacagcgaagaaacccccctcagcagcccctgcacgtggacagcatctgcgactgggactcaggagaagtgcagctgctgcagggtgagcggtataagctggtagataacactgacccgcacgcctgggtcgtgcagggccctggcggggagaccaagcgtgctcccgccgcctgcttctgcatcccagcaccagaccctgatgctgtggccagggcctcccggctggcctcagagctgcaggccctgaagcagaaattggccacagtccagagccgcctgaaggccagtgctgtggagtctcttcggcccagccagcaggctccatctggctcagacctggccaacccacaggcccagaagctcctgacacagatgacccggctggatggagacctgggacagatagagaggcaggtgctggcctgggcgcgggccccgctgagccgccccacacccttggaggacttggagggccgcatccacagccatgagggcacagcccagcgcctgcagagcctgggaacggagaaggagacagcccagaaggagtgcgaggcgtttctgtccacgcggcccgtgggccccgctgccctgcagctgcccgtagccctcaacagcgtgaagaacaagttcagtgacgtgcaggttctgtgcagcctctacggggagaaagccaaggctgccctggatctggagcggcagatccaggatgcggacagggtcatccgaggcttcgaggccaccctggtgcaggaggcccccatccctgctgaaccgggggctctgcaggagagggtcagcgagctgcagcgccagcggagggagctgctggaacagcagacctgcgtgctgcggctacaccgcgcgctgaaggcctcggagcacgcatgcgctgccctgcagaacaacttccaggagttctgccaagacctgcctcgccagcagcgccaggtgcgagccctcaccgaccgctaccacgccgtaggggaccagctggacctgcgggagaaggtggtgcaggatgccgccctcacctaccagcagttcaagaactgcaaggataacctgagctcctggctggagcacctgccccgcagccaggtgcggcccagcgacggccccagccagatcgcctacaagctgcaggcgcagaagaggctgacgcaggagatccagagccgagagcgggacagggccacagcatcccacctctcccaggccctgcaggcagcgctccaggactatgagctccaggcagacacctaccgctgctctttggagcccaccctggcagtgtcagcccccaagagaccccgagtggctcccctgcaagagagcatccaagcccaggagaagaaccttgcaaaggcctatactgaggttgcagcagcacagcagcagctgctccagcagctggagtttgctagaaaaatgctggagaagaaggagctcagtgaggacatccgaaggacccatgatgcaaagcagggctccgagagccctgcccaagcagggagagagtcagaggccctgaaggcccagctggaagaggagaggaagcgggtggcccgggtgcagcatgagctggaggcgcagaggagccaactgctgcagctgaggacccagcggcccttggagaggctggaggagaaggaagtggtagagttctaccgggacccccagctggagggcagcctgtccagggtgaaggcccaggtggaggaggagggcaagcggcgggctggcctgcaggcagacctggaagtggcagcccagaaggtcgtgcagctggaaagcaagaggaagaccatgcagcctcatctgctgaccaaggaggtcacccaggtggagagggaccccggcctggacagccaggcggcccagctcaggatccagatccagcagctccgcggggaggatgccgtcatctcggcccggctggaagggctgaagaaggagctactggcccttgagaagagggaggtggacgtgaaggagaaggtcgtggtgaaagaggtagtcaaggtggagaagaatctggaaatggtcaaggcagcccaggctctgaggctgcagatggaggaggatgctgcgcggaggaagcaggcggaggaggctgtggccaagctacaggctcgcatcgaagacctggagcgggctatcagctcggtggagcccaaggtcatcgtgaaggaggtgaagaaggtggagcaggacccagggctcctccaggagtcctccaggctgaggagcctcctcgaggaggagaggaccaagaacgcgacgctggccagggagctgagcgacctgcacagcaagtacagcgtggtggagaagcagaggcccaaagtgcagctccaggagcgcgtccacgagatcttccaggtggatccggagacagagcaggagatcactcggctcaaggccaagctgcaggagatggcgggcaagaggagcggtgtggagaaggaggtggagaagctgctgcccgacctggaggtcctgcgggcccagaagcccacggtggagtacaaggaggtgacccaggaggtggtgaggcatgagaggagccccgaggtgctgcgtgagatcgaccgcctgaaggctcagctcaacgagctcgtcaacagccacgggcgctcccaggagcagctcatccgcctgcagggtgagcgcgacgagtggaggcgcgagcgggccaaggtggagaccaagacggtgagcaaggaggtggtgcgccacgagaaggacccggtgctggagaaagaagcagagcggctccgccaggaggtgcgggaggcggcccagaagaggcgggccgcggaggacgcggtgtacgagctgcagagcaagcgcctgctgctggagaggaggaagcccgaggagaaggtggtggtgcaggaggtggtggtcacccagaaggacccgaagctgcgcgaggagcacagccggctgagcgggagcctggatgaggaggtgggccggcggcgccagctagagcttgaggtgcagcagctgcgggccggcgtggaggagcaggagggcctgctcagcttccaggaggaccgcagcaagaagctggccgtggagagggagctgcggcagctgaccttgaggatccaggagctcgagaagcggcctcccacggtgcaggagaagatcatcatggaggaagtggtcaagctggagaaggacccggacctggagaagtccacggaagccctgcggtgggacctggaccaggagaagacccaggtaaccgagctgaatcgggagtgcaagaacctgcaggtccagattgacgtcctccagaaagccaaatcgcaggagaagaccatctacaaggaagtgatccgggtgcagaaggaccgcgtcctggaagatgagcgggcccgcgtgtgggagatgctcaacagggagcgcacggcccggcaggcccgggaggaggaggcacggcgcctgcgggagcgcattgaccgggccgagacgctggggagaacctggtcccgggaggagtccgagctgcagagggcccgggaccaggccgaccaggagtgtgggcggctgcagcaggagctgcgggctctggagaggcagaagcagcagcagacactgcagctgcaggaggagtcgaagctgctcagccagaagacggagagcgagcgacagaaggcggcccagcggggccaggagctctcgcggctggaggcggccatcctccgcgagaaggaccagatctacgagaaggagcggacgctccgggacctccacgccaaggtgagccgggaggagctcagccaggagacccagacgcgagagaccaacctttccaccaagatctccatcctggaacccgagacggggaaggacatgtccccatacgaggcctacaagaggggcatcatcgacaggggccagtacttgcagctgcaggagctcgagtgtgactgggaggaggtcaccacctcggggccctgtggggaggagtctgtgctcctggaccgcaagagcgggaagcagtactccatcgaggccgccctccgctgccggcgcatctctaaggaggagtaccatctgtacaaggacggccacctgcccatctccgagtttgcgctgcttgtagctggggagaccaagccaagctcctcactctccatcggctctatcatctccaagtccccgctcgcctccccggccccccagagcaccagtttcttctctcccagcttctctctcgggctcggtgatgacagcttccctatcgccgggatctatgacacaaccacagacaacaagtgcagcatcaagacggccgtggccaagaacatgctggaccccatcactgggcagaagctactggaggcccaggcggccacagggggcatcgtggacctgctcagccgtgagcgctactctgtgcacaaggcgatggagaggggcctgatcgagaacacctccacacagaggctgcttaacgcccagaaggccttcaccggcatcgaggaccccgtcaccaagaagaggctctcggtgggcgaggccgtccagaagggctggatgccccgggagagcgtgctcccacacctgcaggtgcagcacctgaccggggggctcatcgaccccaagaggacaggccgcatccccatccagcaggccctcctctccgggatgatcagtgaagagctggcccagctcctgcaggacgagtccagctacgagaaggatttgacagaccccatctccaaggaacggctgagctacaaggaggccatgggccgctgccgcaaagaccccctgagcggcctgctgctcctgccagcggcactggaggggtaccgctgctaccgctccgcctcccccaccgtcccgcgctcccttcgctgacacgggccaaggagccagtggggaagtgcgtgtgttgggccaggtaggatacgtacacctcttgcctcagagcagcctcatcccaggcagtgggtcttccctctgtccaaccactgttttattattttactaacatggtgatgggctccctcccctaaccttggtgcctgatccatccccagaccaggacagcagccactcagttcttcctccacctccacccagtgatcccaataaacgaattctgtctccccgtg

SEQ ID NO: 122823 - protein, 407 aa, Artificial Sequence
  derived and/or modified sequence
MESRKDMVVFLDGGQLGTLVGKRVSNLSEAVGSPLPEPPEKMVPRGCLSPRAVPPATRERGGGGPEEEPVDGLAGSAAGPGAEPQVAGAAMLGPGPPAPSVDSLSGQGQPSSSDTESDFYEEIEVSCTPDCATGNAEYQHSKGSGSEALVGSPNGGSETPKSNGGSGGGGSQGTLACSASDQMRRYRTAFTREQIARLEKEFYRENYVSRPRRCELAAALNLPETTIKVWFQNRRMKDKRQRLAMTWPHPADPAFYTYMMSHAAAAGGLPYPFPSHLPLPYYSPVGLGAASAASAAASPFSGSLRPLDTFRVLSQPYPRPELLCAFRHPPLYPGPAHGLGASAGGPCSCLACHSGPANGLAPRAAAASDFTCASTSRSDSFLTFAPSVLSKASSVALDQREEVPLTR

SEQ ID NO: 122824 - protein, 225 aa, Artificial Sequence
  derived and/or modified sequence
MRRYRTAFTREQIARLEKEFYRENYVSRPRRCELAAALNLPETTIKVWFQNRRMKDKRQRLAMTWPHPADPAFYTYMMSHAAAAGGLPYPFPSHLPLPYYSPVGLGAASAASAAASPFSGSLRPLDTFRVLSQPYPRPELLCAFRHPPLYPGPAHGLGASAGGPCSCLACHSGPANGLAPRAAAASDFTCASTSRSDSFLTFAPSVLSKASSVALDQREEVPLTR

SEQ ID NO: 122825 - DNA, 1858 bp, Artificial Sequence
  derived and/or modified sequence
ctctgcctgggtgtctccctctctcagtgtgtgtgtctctctgtctgttttcacactctcctccccaatcgagcgaggcccacacctggcgcatcactgccgagccattagctgcgggtttcctttcatcttcgctgtggcagacgtttctatttatccacttgcgctcgccgagtggcgtcaccagcggtactgtaatgacgattgcagcaggaggatgacagcttagaaagaagagggcaatggggcttcctcccagaggcggtgcggcacagaggagcgctcgcttcacaaggtgaccctagctcccaccgccaccgccgcggtcgcggtccagaccgcgctccagcagctccgcgccctcccaggcacccggcctttctttctccctcttgcaaccaagatccgtccggccgctggagacccagggagccggggttaggaactcacttggggctttcccctcccccaccggagagccccgggatggagagccgaaaggacatggttgtgtttctggatgggggtcagcttggcactctggttggcaagagagtctcaaatttgtccgaagccgtgggcagcccgctgccggagccgcccgagaaaatggtgccccgtggttgcctgagccctcgggccgtccctccggccacccgggagcgcggcgggggaggcccggaggaggagccggtagatggactcgcaggcagcgcggcggggccgggcgccgagccccaggtagctggggcggccatgctcggcccaggacccccggccccctcagtcgacagcctctccggacaggggcaacccagtagctcggacaccgagtcggatttctatgaagaaatcgaggtgagctgcaccccggactgcgccaccgggaacgccgagtaccagcacagcaaagggtccggctccgaggcgctggtcggcagtccgaacggagggagcgagacccccaagagcaacggcggcagtggtgggggcggctcgcaaggcaccctggcgtgcagcgccagtgaccagatgcgtcgttaccgcaccgccttcacccgagagcagattgcgcggctggagaaggaattctaccgggagaactacgtatccaggccgcggagatgtgagctggcggccgccctaaacctgccggaaaccaccatcaaggtgtggttccagaaccggcgcatgaaggacaagcggcagcgcctggccatgacgtggccgcacccggcggaccccgccttctacacttacatgatgagccatgcggcggccgcgggcggcctgccctaccccttcccatcgcacctgcccctgccctactactcgccggtgggcctgggcgccgcatccgccgcctccgccgccgcctcgcccttcagcggctcgctgcgcccgctcgacacgttccgcgtgctgtcgcagccctacccgcggcccgaactgctgtgcgccttccgccacccgccgctctaccccgggcccgcgcacggactgggcgcctctgccggcggcccctgctcctgcctcgcctgtcacagcggcccggccaacgggctggcgccccgggctgccgccgcctcggacttcacctgtgcctccacctcccgctcggactccttcctcaccttcgcgccctcggtgctcagcaaggcctcctccgtcgcgctggaccagagggaggaggtgcccctcactagataaggggccgccggctggctgccggctccatgacgcccgtggggtcaccccccggccccgggactcagccagcctcgctcctcgctcctcgctcctcgcccctaggacgccaagggggaaaggagagggcggaaaaggaccagcgggatcc

SEQ ID NO: 122826 - DNA, 2713 bp, Artificial Sequence
  derived and/or modified sequence
ctctgcctgggtgtctccctctctcagtgtgtgtgtctctctgtctgttttcacactctcctccccaatcgagcgaggcccacacctggcgcatcactgccgagccattagctgcgggtttcctttcatcttcgctgtggcagacgtttctatttatccacttgcgctcgccgagtggcgtcaccagcggtactgtaatgacgattgcagcaggaggatgacagcttagaaagaagagggcaatggggcttcctcccagaggcggtgcggcacagaggagcgctcgcttcacaaggtgaccctagctcccaccgccaccgccgcggtcgcggtccagaccgcgctccagcagctccgcgccctcccaggcacccggcctttctttctccctcttgcaaccaagatccgtccggccgctggagacccagggagccggggttaggaactcacttggggctttcccctcccccaccggagagccccgggatggagagccgaaaggacatggttgtgtttctggatgggggtcagcttggcactctggttggcaagagagtctcaaatttgtccgaagccgtgggcagcccgctgccggagccgcccgagaaaatggtgccccgtggttgcctgagccctcgggccgtccctccggccacccgggagcgcggcgggggaggcccggaggaggagccggtagatggactcgcaggcagcgcggcggggccgggcgccgagccccaggtagctggggcggccatgctcggcccaggacccccggccccctcagtcgacagcctctccggacaggggcaacccagtagctcggacaccgagtcggatttctatgaagaaatcgaggtgagctgcaccccggactgcgccaccgggaacgccgagtaccagcacagcaaagggtccggctccgaggcgctggtcggcagtccgaacggagggagcgagacccccaagagcaacggcggcagtggtgggggcggctcgcaaggcaccctggcgtgcagcgccagtgaccagatgcgtcgttaccgcaccgccttcacccgagagcagattgcgcggctggagaaggaattctaccgggagaactacgtatccaggccgcggagatgtgagctggcggccgccctaaacctgccggaaaccaccatcaaggtgtggttccagaaccggcgcatgaaggacaagcggcagcgcctggccatgacgtggccgcacccggcggaccccgccttctacacttacatgatgagccatgcggcggccgcgggcggcctgccctaccccttcccatcgcacctgcccctgccctactactcgccggtgggcctgggcgccgcatccgccgcctccgccgccgcctcgcccttcagcggctcgctgcgcccgctcgacacgttccgcgtgctgtcgcagccctacccgcggcccgaactgctgtgcgccttccgccacccgccgctctaccccgggcccgcgcacggactgggcgcctctgccggcggcccctgctcctgcctcgcctgtcacagcggcccggccaacgggctggcgccccgggctgccgccgcctcggacttcacctgtgcctccacctcccgctcggactccttcctcaccttcgcgccctcggtgctcagcaaggcctcctccgtcgcgctggaccagagggaggaggtgcccctcactagataaggggccgccggctggctgccggctccatgacgcccgtggggtcaccccccggccccgggactcagccagcctcgctcctcgctcctcgctcctcgcccctaggacgccaagggggaaaggagagggcggaaaaggaccagcgggatccggccgcaagaattggaaagcctaggaagtggcggtggctggcgcgtttggggagcaggagtggggatagggaagcagagcttgagagaccttcctccggggcagcctccggacccaccgccccccaccagggtcgaggctgtagctccaaagctaaacaaaacttagcagcaacagcaaccaatatccagtccctcggcccctcggcccctcaccctccacctcacactcccttctcaccgggccccctctccccagccaaggcccaagcactggaaagggaaattgctgtctctctgaacaaaatgctgtgtatgcagagcaggtagagattaatctttgccagcttttccaaggcatgacaaggggctggtggatggcaacataccagtcatttggaggagagagtgagagatgatttactaccagggagaatccagccccttggcatgggacctggagcctcgactacacagcatcttctgggtctggcgtctgccagcacctgatctctttcctcattcccagctttgtgacacttctcaacttgcggctccatctctccctgcccccacttttttgttggccagggaggctgcagatgccccaggagccctttgccgcttctatgaggccaagccttttttccctgggcccagcacacaccctgattagcaagtgatgtgtgcgaggagggtttgtgaatgttgaatgtgtaataatgatcaccatggagctggccactgaccccagagctgagctgttaacaaggcgcccagggaagagcttagggagtgggaacttcacctccctctctcggtatctggcggtaaattagaggcaattttcatccttt

SEQ ID NO: 122827 - DNA, 1635 bp, Artificial Sequence
  derived and/or modified sequence
cggacaccgagtcggatttctatgaagaaatcgagcctccttcccataaccctcagaacaacctggactccactcacatatactaagggtccggctccgaggcgctggtcggcagtccgaacggagggagcgagacccccaagagcaacggcggcagtggtgggggcggctcgcaaggcaccctggcgtgcagcgccagtgaccagatgcgtcgttaccgcaccgccttcacccgagagcagattgcgcggctggagaaggaattctaccgggagaactacgtatccaggccgcggagatgtgagctggcggccgccctaaacctgccggaaaccaccatcaaggtgtggttccagaaccggcgcatgaaggacaagcggcagcgcctggccatgacgtggccgcacccggcggaccccgccttctacacttacatgatgagccatgcggcggccgcgggcggcctgccctaccccttcccatcgcacctgcccctgccctactactcgccggtgggcctgggcgccgcatccgccgcctccgccgccgcctcgcccttcagcggctcgctgcgcccgctcgacacgttccgcgtgctgtcgcagccctacccgcggcccgaactgctgtgcgccttccgccacccgccgctctaccccgggcccgcgcacggactgggcgcctctgccggcggcccctgctcctgcctcgcctgtcacagcggcccggccaacgggctggcgccccgggctgccgccgcctcggacttcacctgtgcctccacctcccgctcggactccttcctcaccttcgcgccctcggtgctcagcaaggcctcctccgtcgcgctggaccagagggaggaggtgcccctcactagataaggggccgccggctggctgccggctccatgacgcccgtggggtcaccccccggccccgggactcagccagcctcgctcctcgctcctcgctcctcgcccctaggacgccaagggggaaaggagagggcggaaaaggaccagcgggatccggccgcaagaattggaaagcctaggaagtggcggtggctggcgcgtttggggagcaggagtggggatagggaagcagagcttgagagaccttcctccggggcagcctccggacccaccgccccccaccagggtcgaggctgtagctccaaagctaaacaaaacttagcagcaacagcaaccaatatccagtccctcggcccctcggcccctcaccctccacctcacactcccttctcaccgggccccctctccccagccaaggcccaagcactggaaagggaaattgctgtctctctgaacaaaatgctgtgtatgcagagcaggtagagattaatctttgccagcttttccaaggcatgacaaggggctggtggatggcaacataccagtcatttggaggagagagtgagagatgatttactaccagggagaatccagccccttggcatgggacctggagcctcgactacacagcatcttctgggtctggcgtctgccagcacctgatctctttcctcattcccagctttgtgacacttctcaacttgcggctccatctctccctgcccccacttttttgttggccagggaggctgcagatg

SEQ ID NO: 122828 - DNA, 1224 bp, Artificial Sequence
  derived and/or modified sequence
atggagagtaggaaagatatggtggtattcctggatggtggccagctgggaaccctggtcggaaaaagagtgagtaacctctccgaggctgtcgggtcgcctctgccagagccacctgaaaagatggtgcctcgaggttgtttaagtccacgggccgtcccaccagctactagagagagaggaggtggcgggcccgaggaggaacctgttgacggacttgcagggtcagctgcaggcccgggtgctgaaccgcaggtggctggcgcagccatgcttggtcccggtcctccagctccttcggtcgactctctgtccggccagggccagccgagcagctcggatacagagtctgacttctacgaggaaatagaagtgagctgcacaccagactgcgcaactggcaacgctgagtaccagcactccaaagggagtggcagtgaagccctcgtggggagtcctaacgggggctctgaaaccccgaagagtaatggcggcagcggcgggggcgggtcacagggcaccctcgcctgctctgcctccgaccagatgaggcgctacaggaccgccttcacgagggagcagatcgcccgtttggaaaaggagttctaccgggagaattacgtaagccgtcctcgcagatgcgagttggccgccgcgctgaacctcccggaaacaaccattaaagtttggttccagaaccgaaggatgaaggacaagagacagcggctggccatgacatggccacaccctgcggatcccgccttctatacctatatgatgtctcatgccgctgctgccggcgggctgccttatcccttccctagtcatcttccactcccttactatagccctgtaggcctcggagcagcctccgccgcttccgcagccgcctcgcccttctcaggatccctgagaccactggacacctttagagtgttatcccagccctatcctcgccctgagctgctctgtgcttttcgccatccccccctgtatccggggcccgcccatggactcggggcttctgctggcggtccctgcagctgcctcgcctgccattcgggccccgcaaacggtctcgccccacgggccgctgccgcatccgacttcacatgcgcttctactagtcgctccgattcattcctgacctttgccccctccgttctatccaaggcttcgagcgtggcactcgaccagagagaggaggtccccctcacacggtag

SEQ ID NO: 122829 - DNA, 1224 bp, Artificial Sequence
  derived and/or modified sequence
atggagagcaggaaggacatggtggtgttcctggatggcggccagctgggcaccctggtgggcaagagggtgagcaacctgtctgaggccgtgggcagccccctgcctgagcccccagagaagatggtgccccggggctgcctgagccccagggctgtgcccccagccacccgggagcggggcggcggcggccctgaggaggagcctgtggatggcctggccggcagcgctgctggccctggagctgagccccaggtggccggggccgccatgctgggccctggccccccagcccccagcgtggacagcctgagcggccagggccagcccagcagcagtgacacagaaagtgacttctatgaggagattgaggtgtcctgcaccccagactgtgccactggaaatgctgagtaccagcacagcaagggcagcggcagcgaggccctggtgggcagccccaacggcggcagcgagacccccaagagcaatggaggcagcggcggcggcggcagccagggcaccctggcctgcagcgccagtgaccagatgaggcgctacagaacagccttcacccgggagcagatcgcccggctggagaaggagttctacagagaaaattatgtgtcccggccccggcgctgtgagctggccgccgccctgaacctgcctgagaccaccatcaaggtgtggttccagaacagaaggatgaaggacaagaggcagaggctggccatgacctggccccaccctgctgaccctgccttctacacctacatgatgagccatgctgctgctgctgggggcctgccctaccccttccccagccacctgcccctgccctactacagccctgtgggcctgggcgccgccagcgctgccagcgctgctgccagccccttcagcggcagcctgcggcccctggacaccttccgggtgctgagccagccctaccccaggcctgagctgctgtgtgccttccgccacccccccctgtacccaggccctgcccacggcctgggcgccagcgctgggggcccctgcagctgcctggcctgccacagcggccctgccaacggcctggcccccagggctgctgctgccagtgacttcacctgtgccagcaccagcagaagtgacagcttcctgacctttgcccccagcgtgctgagcaaggccagctctgtggccctggaccagcgggaggaggtgcccctgaccaggtag

SEQ ID NO: 122830 - DNA, 1224 bp, Artificial Sequence
  derived and/or modified sequence
atggagagccggaaggacatggtggtgttcctggacggcggccagctcggaaccttggtcggaaagcgggtctccaacctctcagaagctgtggggagccctctgcctgagccccccgagaaaatggtgccccgcggctgccttagcccacgcgctgtccctcctgccacccgagagcggggcggtggaggcccagaagaggagcccgttgatggactggccggatcggctgccggccccggggctgagcctcaagtggcaggtgctgcgatgctgggcccggggcctccagccccgagcgttgactcgctgtctggccaggggcaaccgagttcaagtgataccgaaagtgacttctatgaagagatcgaggtttcctgcacacccgactgcgccactggcaacgcagagtatcagcattcgaaggggagcggatcagaggctttggttggatccccaaacggaggatcggagacacctaaatccaacggcggcagcggcggcggcggttcccagggaacacttgcttgtagcgctagtgaccagatgagacgctacaggacagcctttaccagggagcagattgcccgattggagaaagaattttatcgagagaattacgtctctcgtcctcgtagatgtgagctagcagccgcactgaatctgccagagactacaatcaaggtctggtttcagaacaggcggatgaaagataagcggcaacgtcttgcaatgacctggcctcaccctgcagacccagccttctatacctatatgatgtctcatgctgccgcagccggcggcctgccttatcctttcccgagtcacttacctctaccatattactctcctgtcggactcggcgctgcttcagcagcttccgctgcagcctcccccttcagcggctctctgagacccttagatacattccgggtgctgagccagccctatcccaggcccgaactcctgtgcgcattccgtcaccccccactgtacccaggcccggcgcacggtctgggcgctagcgcaggcggcccctgttcttgtctggcatgtcatagcgggccagcgaatggattggcacctcgcgcggctgctgccagcgacttcacttgcgcctccactagcaggagcgactcgtttctgaccttcgcacccagtgtcctgagtaaggcttcatccgtggccctcgatcagagggaagaggtgcctttgaccagatag

SEQ ID NO: 122831 - DNA, 1224 bp, Artificial Sequence
  derived and/or modified sequence
atggagtcccgcaaggacatggtggtgtttctagacgggggacagctgggcaccctggtgggaaagcgggttagcaatttgagcgaagctgtcggttctccgctcccagaaccgccagagaagatggtgccaaggggttgtctttcaccacgcgctgtgccacctgctactcgcgagaggggcggaggaggccctgaggaagagccagtggatggcctggcaggcagtgccgctgggcctggagctgagcctcaggtggctggggcagccatgctgggtcccggacccccagccccttccgtggattcactttcagggcaaggccaacctagcagttctgacaccgaaagcgatttttacgaggagatcgaagtttcctgcacccctgattgcgccaccggaaacgctgagtaccagcactcaaaggggtctggcagtgaagcccttgtgggcagtcctaacgggggatctgaaacccccaagagtaatggaggttctgggggaggtggctcacagggcacgctggcctgcagtgcgagcgaccagatgcgcaggtatcgtacggcattcactcgcgaacagattgctagacttgagaaggaattctatagggaaaactacgtctcgcggccacgcagatgtgaactggccgcagcactgaatctgccggagactactattaaggtgtggttccagaatcggagaatgaaggacaagaggcaaagattagcaatgacctggccccacccagcggaccctgctttttatacatacatgatgtcacatgccgcagccgctggcggactcccttatccgttcccttcccacctgcccctgccgtactatagcccagtaggcctgggggctgcctcagccgctagtgcggctgcaagccctttttccggttcactaaggcccctcgacacatttcgagttctgtcccagccttaccctagacccgaactgctgtgtgcctttcgacacccccctctgtatccagggccagcacatggtctcggtgccagtgccggaggcccttgttcttgtttggcctgtcatagtggtccggcaaatggactcgcaccgcgagctgcggcagcgagcgattttacatgcgcttccacctctcgttctgattcatttcttacatttgcccctagcgtgctatccaaagcatcctccgtcgcgctggatcagcgggaagaagtgcccttgacccgctag

SEQ ID NO: 122832 - DNA, 1224 bp, Artificial Sequence
  derived and/or modified sequence
atggagagcagaaaggacatggtggtgttcctggacggcggccagctgggcaccctggtgggcaagagagtgagcaacctgagcgaggccgtgggcagccccctgcccgagccccccgagaagatggtgcccagaggctgcctgagccccagagccgtgccccccgccaccagagagagaggcggcggcggccccgaggaggagcccgtggacggcctggccggcagcgccgccggccccggcgccgagccccaggtggccggcgccgccatgctgggccccggcccccccgcccccagcgtggacagcctgagcggccagggccagcccagcagcagcgacaccgagagcgacttctacgaggagatcgaggtgagctgcacccccgactgcgccaccggcaacgccgagtaccagcacagcaagggcagcggcagcgaggccctggtgggcagccccaacggcggcagcgagacccccaagagcaacggcggcagcggcggcggcggcagccagggcaccctggcctgcagcgccagcgaccagatgagaagatacagaaccgccttcaccagagagcagatcgccagactggagaaggagttctacagagagaactacgtgagcagacccagaagatgcgagctggccgccgccctgaacctgcccgagaccaccatcaaggtgtggttccagaacagaagaatgaaggacaagagacagagactggccatgacctggccccaccccgccgaccccgccttctacacctacatgatgagccacgccgccgccgccggcggcctgccctaccccttccccagccacctgcccctgccctactacagccccgtgggcctgggcgccgccagcgccgccagcgccgccgccagccccttcagcggcagcctgagacccctggacaccttcagagtgctgagccagccctaccccagacccgagctgctgtgcgccttcagacacccccccctgtaccccggccccgcccacggcctgggcgccagcgccggcggcccctgcagctgcctggcctgccacagcggccccgccaacggcctggcccccagagccgccgccgccagcgacttcacctgcgccagcaccagcagaagcgacagcttcctgaccttcgcccccagcgtgctgagcaaggccagcagcgtggccctggaccagagagaggaggtgcccctgaccagatag

SEQ ID NO: 122833 - DNA, 2244 bp, Artificial Sequence
  derived and/or modified sequence
atggagatacctaatcctcccacaagtaaatgcatcacatattggaagaggaaggtgaagtctgagtacatgcgcctgagacagctgaaacgtctccaggcgaacatgggcgctaaagctctgtatgtcgccaacttcgcaaaagtacaggagaaaactcaaatactgaacgaagagtggaaaaaactgagagttcagccagtacagagtatgaagccagtttcaggacatcctttcctgaagaaatgtaccatcgagtctattttccctggctttgcttcacagcatatgttaatgcgatcccttaacaccgtcgctctagttccaatcatgtactcctggagccccctccaacagaacttcatggtcgaggatgaaacagttctctgcaacataccttatatgggagatgaggtcaaggaggaagacgaaacctttatcgaagagctgataaataactatgacggaaaggtccatggcgaggaagagatgatccctggatcagtgctgatttctgacgccgtgtttctggagcttgtagatgcccttaaccaatactcagacgaagaagaggagggacacaatgatactagtgacggaaagcaggatgactccaaagaagacctgccagtgacccgaaagagaaagaggcacgctattgaggggaacaagaagtccagcaagaagcagtttcccaatgatatgatattttctgccatagcatccatgttccctgagaatggggtccctgacgatatgaaagaacgctacagagaactgacagagatgagcgaccctaacgccctgccacctcagtgtaccccaaatatagacggaccgaacgcgaaaagcgtgcagagggaacaatccctgcactcctttcatacccttttctgccgtcgctgctttaagtacgactgcttcctgcatccgttccatgctacacctaacgtatacaagcgaaagaataaggagatcaagatcgagcctgaaccctgtggcaccgactgttttctgctgctggaaggcgcaaaggagtacgctatgctccataatccgaggagtaagtgtagtggaagacgcaggagacggcaccacattgtgagcgcctcctgttcaaacgcctcagcctccgcagttgctgagacgaaggagggggattcggatcgggacacagggaacgactgggcatctagctcatccgaggctaattcgaggtgccagactcctactaagcaaaaagcgagtcccgctccaccccagctgtgcgttgtggaggccccatcggagcctgttgaatggaccggcgccgaagaaagcctgttcagggtattccatggcacctacttcaataacttttgctctattgcacggctgttggggacaaagacatgcaaacaggtcttccagtttgctgtgaaggaatcccttatcctgaaactgcccacagacgaattgatgaacccctctcagaaaaagaaacgaaaacatcggctgtgggcagcccattgtagaaagattcagctcaaaaaggataacagctccacacaggtttacaattaccagccatgcgaccacccagatcggccttgcgattctacctgtccttgcatcatgacccagaatttctgtgagaaattttgccagtgtaaccccgattgccagaaccgatttccaggatgtagatgtaaaacacaatgtaacactaaacagtgtccttgctatttggccgtccgagaatgcgatccggatctctgccttacatgtggcgctagtgaacactgggactgtaaggtggtgagttgtaagaattgctcaatccagaggggtctgaagaaacacttactcctcgcccccagcgatgtcgccggatggggaacatttataaaagaatcggtccagaaaaatgagttcatctcagaatattgcggcgagctgatctcacaggacgaggccgaccgccggggcaaggtgtatgacaaatacatgtcaagttttctttttaacctgaataacgatttcgtggttgatgcaacacggaaaggcaacaagattcggtttgctaatcactcagtcaaccctaactgttatgccaaggtggtgatggtgaatggtgaccaccggatcgggattttcgcaaaacgggcgatccaagcaggggaggagttatttttcgactaccggtattcccaagcggacgccctgaaatacgtcggaatcgagcgcgaaacagatgtgctgtag

SEQ ID NO: 122834 - DNA, 1827 bp, Artificial Sequence
  derived and/or modified sequence
atggaggaagcaagctgccctacatgtagcgtaaacgaggcttgcgagtggacgccttttagccagaaggagatgatcccgggatccgtcctaatttccgatgccgtgttcttagagctggtggacgctcttaatcaatactctgacgaagaggaagagggccacaacgatacctccgatggaaaacaagacgactccaaggaggacttgcctgtgaccagaaaaaggaagaggcacgccatcgaaggcaacaagaagtcctcgaagaagcaatttccaaacgacatgatcttctccgctattgcttccatgtttccagagaatggggttcccgatgatatgaaggaaaggtaccgcgaactgaccgaaatgtcagatcccaacgcgctgcctccccaatgtacacctaatatagatggacctaatgcaaaatcagtccagcgggagcagagcctgcattcctttcatacacttttctgccggcgctgctttaagtacgactgtttccttcacccttttcatgcgacccctaatgtttacaaaaggaaaaacaaagagatcaaaatcgaaccggaaccgtgtggaaccgactgttttctgcttttggaaggtgccaaagaatacgctatgctgcacaaccctaggtccaagtgctccgggcgtcgacgccgacgtcatcacatcgtgtccgcttcctgttccaacgctagtgcatccgccgtagcagaaacaaaagagggcgactctgatcgagataccggtaatgattgggcatcctcctcatctgaggcaaactcccgatgtcaaacccctaccaagcaaaaggctagcccggctccgccccaactgtgtgtcgtagaggcaccatccgagccggtggaatggaccggtgcagaggaatctctttttcgggtgtttcacggcacatattttaacaacttctgttcgatcgctcgtctgctggggactaaaacttgtaagcaagtgtttcagttcgctgtcaaggagtctctcatcctcaaactgcctacagatgaactgatgaatccaagccaaaagaagaaacgaaaacaccgactgtgggccgcacactgcaggaaaattcagctgaagaaggacaattcatcaacccaggtgtataattatcaaccctgtgaccacccggatcggccttgtgatagcacttgcccatgcattatgacccaaaatttctgtgaaaaattctgtcagtgcaatcctgactgccagaacagatttccaggatgcagatgtaagacacaatgtaatactaagcagtgcccatgttatctggccgtgagagaatgtgaccccgacctgtgcctcacttgcggggcaagcgagcattgggattgcaaagtggtgagctgcaaaaattgtagtatccagcggggactcaaaaaacacctgctgctggcgccaagtgacgtggccggttggggtacatttattaaggagtccgtgcagaagaatgagttcatctccgaatattgcggcgaacttatcagccaggatgaagcggacagaagaggcaaagtgtatgataagtatatgtcatcctttctgttcaacctgaacaacgattttgtcgtggacgctactagaaagggcaataagatcaggttcgccaatcattccgtgaaccccaattgttacgcaaaggtcgttatggtcaatggcgaccatcggattggcattttcgccaaacgggccatacaagcgggcgaggaactgttctttgattacaggtacagccaggctgacgcactgaagtacgtgggtatcgagagggagacagatgtgctttag

SEQ ID NO: 122835 - DNA, 2244 bp, Artificial Sequence
  derived and/or modified sequence
atggagatccccaacccccccaccagcaagtgcatcacctactggaagaggaaggtgaagtctgagtacatgaggctgcggcagctgaagaggctgcaggccaacatgggcgccaaggccctgtatgtggccaactttgccaaggtgcaggagaagacccagatcctgaatgaggagtggaagaagctgcgggtgcagcctgtgcagagcatgaagcctgtgtctggccaccccttcctgaagaagtgcaccatcgagagcatcttccctggctttgccagccagcacatgctgatgaggagcctgaacacagtggccctggtgcccatcatgtacagctggagccccctgcagcagaacttcatggtggaggatgaaacagtgctgtgcaacatcccctacatgggagatgaggtgaaggaggaggatgagaccttcatcgaggagctgatcaacaactatgatggcaaggtgcatggagaggaggagatgatccctggctctgtgctgatcagtgatgctgtgttcctggagctggtggatgccctgaaccagtacagtgatgaggaggaggagggccacaatgacaccagtgatggcaagcaggatgacagcaaagaagacctgcctgtgaccaggaagaggaagagacatgccatcgagggcaacaagaagagcagcaagaagcagttccccaatgacatgatcttcagcgccatcgcctccatgtttcctgaaaatggagtgcctgatgacatgaaggagcgctaccgggagctgacagagatgtctgaccccaatgccctgcccccccagtgcacccccaacattgatggccccaatgccaagtctgtgcagcgggagcagagcctgcacagcttccacaccctcttctgccgccgctgcttcaagtatgactgcttcctgcaccccttccacgccaccccaaatgtgtacaagaggaagaacaaggagatcaagattgagcctgagccctgtggcacagactgcttcctgctgctggagggcgccaaggagtatgccatgctgcacaaccccaggagcaagtgcagcggcagaagaagaagaagacaccacatcgtgtctgccagctgcagcaatgccagcgccagcgctgtggccgagaccaaggagggggacagcgaccgggacacaggaaatgactgggccagcagcagcagcgaggccaacagccgctgccagacccccaccaagcagaaggccagccctgccccaccccagctgtgtgtggtggaggcccccagcgagcctgtggagtggacaggagctgaggagagcctcttccgggtcttccacggcacctacttcaacaacttctgcagcatcgcccggctgctgggcaccaagacctgcaagcaggtgttccagtttgctgtgaaggagagcctcatcctgaagctgcccacagatgagctgatgaaccccagccagaagaagaagaggaagcaccggctgtgggccgcccactgcaggaagatccagctgaagaaggacaacagcagcacccaggtgtacaactaccagccctgtgaccacccagaccggccctgtgacagcacctgcccctgcatcatgacccagaacttctgtgagaagttctgccagtgcaacccagactgccagaaccgcttccctggctgccgctgcaagacccagtgcaacaccaagcagtgcccctgctacctggccgtgcgggagtgtgaccctgacctgtgcctgacctgtggggccagcgagcactgggactgcaaggtggtgtcctgcaagaactgcagcatccagaggggcctgaagaagcacctgctgctggcccccagtgatgtggccggctggggcaccttcatcaaggagagcgtgcagaagaatgagttcatcagcgagtactgtggggagctgatcagccaggatgaggccgaccggcggggcaaggtgtatgacaagtacatgagcagcttcctgttcaacctgaacaatgactttgtggtggatgccaccaggaaaggaaacaagatccgctttgccaaccacagcgtgaaccccaactgctacgccaaggtggtgatggtgaatggagaccacagaattggcatctttgccaagagggccatccaggccggggaggagctgttctttgactaccgctacagccaggctgatgccctgaagtatgtgggcatcgagcgggagacagatgtgctgtag

SEQ ID NO: 122836 - DNA, 1827 bp, Artificial Sequence
  derived and/or modified sequence
atggaggaggccagctgccccacctgcagcgtgaatgaggcctgtgagtggacccccttcagccagaaggagatgatccctggctctgtgctgatcagtgatgctgtgttcctggagctggtggatgccctgaaccagtacagtgatgaggaggaggagggccacaatgacaccagtgatggcaagcaggatgacagcaaggaggacctgcctgtgaccaggaagaggaagagacatgccatcgagggcaacaagaagagcagcaagaagcagttccccaatgacatgatcttcagcgccatcgcctccatgtttcctgaaaatggagtgcctgatgacatgaaggagcgctaccgggagctgacagagatgtctgaccccaatgccctgcccccccagtgcacccccaacattgatggccccaatgccaagtctgtgcagcgggagcagagcctgcacagcttccacaccctcttctgccgccgctgcttcaagtatgactgcttcctgcaccccttccacgccacccccaacgtgtacaagaggaagaacaaggagatcaagattgagcctgagccctgtggcacagactgcttcctgctgctggagggcgccaaggagtatgccatgctgcacaaccccaggagcaaatgttctggaagaagaagaagaagacaccacatcgtgtctgccagctgcagcaatgccagcgccagcgctgtggccgagaccaaggagggggacagcgaccgggacacaggaaatgactgggccagcagcagcagcgaggccaacagccgctgccagacccccaccaagcagaaggccagccctgccccaccccagctgtgtgtggtggaggcccccagcgagcctgtggagtggacaggagctgaggagagcctcttccgggtcttccacggcacctacttcaacaacttctgcagcatcgcccggctgctgggcaccaagacctgcaagcaggtgttccagtttgctgtgaaggagagcctcatcctgaagctgcccacagatgagctgatgaaccccagccagaagaagaagaggaagcaccggctgtgggccgcccactgcaggaagatccagctgaagaaggacaacagcagcacccaggtgtacaactaccagccctgtgaccacccagaccggccctgtgacagcacctgcccctgcatcatgacccagaacttctgtgagaagttctgccagtgcaacccagactgccagaaccgcttccctggctgccgctgcaagacccagtgcaacaccaagcagtgcccctgctacctggccgtgagagaatgtgaccctgacctgtgcctgacctgtggggccagcgagcactgggactgcaaggtggtgtcctgcaagaactgcagcatccagaggggcctgaagaagcacctgctgctggcccccagtgatgtggccggctggggcaccttcatcaaggagagcgtgcagaagaatgagttcatcagcgagtactgtggggagctgatcagccaggatgaagctgacagaagaggcaaggtgtatgacaagtacatgagcagcttcctgttcaacctgaacaatgactttgtggtggatgccaccaggaagggcaacaagatccgctttgccaaccacagcgtgaaccccaactgctacgccaaggtggtgatggtgaatggagaccaccgcatcggcatctttgccaagagggccatccaggccggggaggagctgttctttgactaccgctacagccaggctgatgccctgaagtatgtgggcatcgagcgggagacagatgtgctgtag

SEQ ID NO: 122837 - DNA, 2244 bp, Artificial Sequence
  derived and/or modified sequence
atggagatccccaacccccccaccagcaagtgcatcacctactggaagagaaaagttaagtctgagtatatgcgcctgcgtcagctcaaacggcttcaggctaacatgggtgcaaaggcactctatgtcgctaattttgcaaaagtacaagagaaaacacagatcctgaatgaagaatggaagaaactgagagtgcagcccgtgcagagtatgaagcccgtgtcgggacatccattcttaaagaaatgcacgatcgagtctattttcccaggttttgcttctcaacatatgctcatgagaagcctgaatacggtggcactggtcccgatcatgtactcttggtctcctcttcagcagaacttcatggtggaagacgaaacagtgctgtgcaacatcccctacatgggcgatgaggtgaaagaggaggacgagaccttcatcgaagaacttattaataattatgacgggaaagtacacggggaagaggagatgattccaggctctgttctaatctctgacgccgtgttcctggaactcgtggacgccctaaaccagtactctgacgaggaagaggaaggccataatgacacatcagatgggaaacaagacgatagtaaagaggatttgccggtgactagaaagaggaagcggcacgctattgagggcaataagaaatccagcaaaaaacagttcccaaatgatatgatcttcagtgcaatcgccagcatgttcccagagaacggcgtcccagatgatatgaaagagagatatcgggagttgactgaaatgtctgaccccaatgcactgcccccccagtgtacccctaatattgacggccctaacgcaaagtccgtgcagcgcgagcagagcctgcattccttccatacattattctgtcggcgctgttttaagtatgactgctttctgcatccattccacgctactcccaatgtatataaacgcaaaaataaagaaatcaagattgagcctgaaccctgcggtacagactgtttcctgctcctagagggagccaaggagtacgcaatgctacacaatccaagatctaagtgctcaggccgaagaaggaggcgccaccatatcgtctcagcctcatgctccaacgcaagcgcctctgccgtggccgagaccaaggaaggggattccgacagggacactgggaacgactgggcatcatcctcttccgaagccaattctcgatgtcagaccccaaccaagcagaaagcctctcctgcccctccacagctctgtgtcgttgaagccccaagcgaaccagtggagtggacgggcgcggaggagtctctttttcgagtctttcacggcacctattttaacaacttctgtagcattgccagattgctgggaactaagacctgcaagcaggttttccagtttgcagtgaaggagagcctgatcctcaagctgccgacggacgagctaatgaacccatcccagaaaaagaaaagaaaacaccggctgtgggctgcacactgtcgaaagattcagctaaaaaaggataatagttccacgcaggtgtacaattatcagccgtgtgaccacccagaccgcccctgcgattcaacatgtccttgcatcatgactcaaaacttttgcgaaaaattttgtcagtgtaatcccgattgccagaatagatttcctgggtgtcgatgcaagacgcagtgtaacacgaaacaatgcccctgttatctcgccgtgagagagtgcgacccagacctgtgtctgacatgcggagcatctgagcattgggactgcaaggttgtgtcttgcaagaactgcagtatacaacgaggacttaaaaagcaccttctgctggcgccctctgatgtcgctggatgggggacgttcatcaaagagagcgtacagaagaacgagtttatctctgagtactgcggggagcttatcagccaggacgaggcggaccgccgtggcaaggtgtatgacaagtatatgtcttcatttctcttcaatctgaataatgactttgtggtagatgctacgaggaaaggcaataaaattaggtttgctaaccacagtgtgaaccccaattgttacgccaaagtcgtgatggtgaacggtgaccataggatcgggatttttgcaaaaagggccattcaggccggagaggaattgtttttcgactacagatatagccaggccgatgcccttaagtatgtgggaatcgaacgggagaccgatgtgctctag

SEQ ID NO: 122838 - DNA, 1827 bp, Artificial Sequence
  derived and/or modified sequence
atggaggaggccagctgccccacctgcagcgtgaacgaggcctgcgagtggactccctttagtcagaaggaaatgattccagggagtgtcctgatctccgatgccgttttcctggaactggttgatgccttgaaccagtatagcgacgaagaagaagagggccacaacgataccagcgacggcaagcaagacgatagcaaagaggatctgcccgtaactcgtaagaggaagcggcacgccatcgaaggtaataagaagtccagcaagaaacagtttcccaacgatatgatcttttccgccatcgcttcaatgtttcccgagaatggcgtacctgacgatatgaaagagcgctaccgggagttaaccgagatgagcgaccctaacgctttgcccccccagtgcacaccaaacatcgatggccctaacgcaaaatccgtgcagagggagcagtcactgcacagtttccacacgctgttctgtagaagatgctttaagtacgactgttttctgcatccatttcacgccacacccaacgtgtataaacggaagaataaggagattaaaattgagcccgaaccctgtgggacagattgtttcttgttactggaaggcgctaaagaatatgcaatgttacataaccccagatcgaaatgctcgggcaggagacgcaggcggcaccacattgtctcagccagctgttctaatgcctccgcttccgccgtggccgagacgaaggagggtgatagcgatcgggacacgggaaatgattgggcttctagctcgagcgaagccaattccaggtgccagacaccaactaagcagaaggcctccccagccccaccgcagctgtgtgttgtcgaagctcctagtgagcccgttgagtggaccggggcggaagagtccctgttccgcgttttccacgggacatattttaacaatttctgttctatcgccaggcttctcggtacgaaaacatgcaaacaggtgttccagttcgccgtaaaggaaagcctcatcctcaaactaccaactgacgagctcatgaaccccagccagaagaaaaaacgcaagcatagattgtgggctgcccactgtcgcaagatccagcttaagaaagacaatagtagtacacaagtgtacaactaccaaccatgtgaccaccccgatcggccctgcgactctacctgtccttgcatcatgacccaaaacttctgtgaaaaattttgtcaatgcaaccccgactgtcaaaacaggtttccggggtgccgctgtaagactcaatgcaacacaaagcaatgtccttgttatttggccgtgagggaatgcgaccctgatctctgtctgacttgtggcgcttccgagcattgggattgtaaggtagtttcatgtaaaaattgctccatacagcgggggctaaaaaaacatttactgttggcaccaagtgatgtcgcaggctggggtacctttattaaggaatcagtccagaaaaatgagtttattagcgaatactgtggcgagctgatttcacaggatgaagctgacagaaggggcaaggtctatgataagtacatgagcagctttctgtttaatctaaacaatgacttcgttgtggacgcgaccagaaaggggaacaagatcaggtttgctaaccatagtgtgaatccaaactgttatgctaaggtggtgatggtgaatggtgatcaccgaataggcattttcgccaagagagcaatccaggcgggggaagaactgtttttcgattatagatacagccaagctgacgctcttaaatatgtcgggattgagagagaaactgatgtgttatag

SEQ ID NO: 122839 - DNA, 2244 bp, Artificial Sequence
  derived and/or modified sequence
atggaaattcccaaccctcctacttccaagtgtataacatattggaagagaaaagtcaaaagcgagtacatgaggctccgccaattgaaaagattgcaggccaatatgggtgctaaagccctttacgtggcgaacttcgccaaggtgcaagaaaaaactcagatactgaatgaagaatggaaaaaactccgcgtacagcctgtgcagtccatgaaaccagtgtcggggcacccctttctgaagaaatgtactatcgagtcaatcttcccgggatttgcatctcaacatatgctgatgagaagcctcaatacagttgccctggtgcctatcatgtattcttggtcgcctttacagcaaaactttatggtggaagatgagacagttctttgcaacatcccctacatgggcgacgaagtcaaagaagaagatgaaacattcatcgaagagttaatcaataattatgacggtaaggtgcatggtgaggaggagatgatccccggaagcgtcctgattagcgatgccgtctttctcgagctggtggatgccctcaaccagtattcagacgaagaagaggaaggccataatgacacaagtgacggcaaacaggatgacagcaaagaggacttgcccgtcaccagaaagcgcaagcgacatgctatagaggggaacaaaaaaagctcaaaaaaacagttcccgaacgatatgatcttcagcgcaattgctagcatgttccccgaaaacggcgtgccagacgatatgaaagagaggtaccgggaactgacagagatgagcgatccaaacgccctcccacctcaatgcacccccaacatcgacggcccaaatgccaagagtgtgcagcgagagcaatcactccacagtttccacacactcttctgccggaggtgttttaagtacgactgcttcctgcatccctttcatgccacccccaacgtgtacaagcggaaaaacaaggaaatcaagatcgagcctgaaccttgtggaaccgattgtttccttctgctggagggagccaaagaatacgccatgctccacaacccgagatcgaagtgtagcggacggagaaggagacgtcaccacatagtcagtgcttcatgttccaatgcttctgcctcggctgtggcagagaccaaggagggcgacagcgatcgcgataccggcaacgactgggcctcatcctcctccgaggctaactccagatgccaaactcctactaaacagaaggcatctccagctccacctcaactctgcgtggttgaagctccttcagagccggtagagtggaccggcgctgaggaaagtctgtttagggttttccatgggacctatttcaacaatttttgttccatcgccagactgctgggtacaaagacctgcaagcaggtctttcagttcgcagtgaaggagagtctgattttaaagcttcctaccgacgagctgatgaaccctagtcagaagaagaagagaaaacataggctgtgggcggcacactgccgtaaaatccagttgaagaaggataactcctctacgcaagtgtacaactatcagccctgcgaccatccggaccgaccctgcgatagcacctgtccatgtatcatgacgcagaatttttgtgaaaaattctgtcaatgcaatcctgattgtcagaatcggttccctgggtgcagatgtaagactcaatgtaacaccaagcagtgcccatgttatctggctgtacgcgagtgtgatcctgacctctgtctcacttgtggcgctagcgagcattgggactgtaaggtggtgtcttgtaaaaactgcagtattcagcgcggattgaaaaaacatctcctcctggccccttctgatgtggccggttgggggacatttatcaaagagagtgtacaaaaaaacgaattcatctctgagtattgcggcgagctgataagtcaagacgaggctgatcgcaggggaaaagtctatgacaagtatatgagttcctttctgttcaatctcaacaatgacttcgtggtggatgcgactaggaaaggtaacaagattcgttttgctaaccattccgtgaacccaaattgctacgccaaagtggtcatggtgaatggcgaccatagaattggaatctttgcgaagcgggctatccaggctggcgaagaactcttcttcgattataggtacagccaggccgacgcccttaagtacgtcggcattgaaagggagacagatgtcctgtag

SEQ ID NO: 122840 - DNA, 1827 bp, Artificial Sequence
  derived and/or modified sequence
atggaagaggcttcatgcccaacttgctctgttaacgaggcctgcgagtggactccttttagccagaaggaaatgatcccaggcagcgtgctcatcagcgacgcggtatttttggagttggtggacgcacttaatcagtactccgacgaagaagaagagggacataacgacacgagcgatggtaaacaggacgactctaaagaagacttaccagttacccgtaaaaggaagcgccatgccatcgagggcaataaaaaaagttctaagaaacagtttcccaacgacatgatcttttctgctatcgcaagtatgtttccagagaatggcgtgcctgatgatatgaaagagagatatcgcgaattgaccgaaatgagcgatcctaatgctttgcctcctcagtgcacccctaacatcgatgggcctaatgccaaatccgtgcagcgcgaacaatctctgcattcctttcacacgctcttttgccgcaggtgctttaagtacgattgcttcctacacccttttcacgcgacaccgaacgtctacaaaagaaagaataaagagattaagattgaaccagagccctgtggcacagattgctttcttttgctcgagggtgccaaagagtacgcgatgctccacaaccctcgttctaagtgcagcgggcgtaggcgacgcagacatcacatcgtgtccgccagctgtagcaatgcttcagccagtgccgtggctgagactaaagagggagactccgaccgcgacactggaaatgattgggcttcctcttcttcagaagccaacagcaggtgtcagacccctaccaagcagaaggccagcccggcaccaccacaactctgcgttgttgaggctccctcggaaccagtagaatggacaggcgcagaagagtctcttttcagagtgtttcacggcacctatttcaacaacttttgtagtatagcaaggctgttgggaacaaaaacctgcaaacaggtgttccagtttgccgtgaaggaaagcctgatactgaaactgccaacagatgaactgatgaacccttctcaaaaaaaaaaacgcaagcatcgattatgggcagcgcactgtcggaagattcagctcaaaaaggacaactcctcaacacaggtctataattatcagccgtgtgatcaccctgacagaccctgcgactccacctgcccctgtatcatgacccaaaacttttgcgaaaaattttgtcagtgtaacccagactgccagaacaggtttcccggatgtcggtgcaaaacgcagtgcaataccaagcaatgcccctgttacctggccgttcgcgagtgcgatcctgatctttgtcttacatgcggcgcttcagaacattgggattgcaaggtagtttcctgcaagaactgctcgattcagcgcggactcaagaagcacctgctgctggcccctagtgatgtagcaggctggggtacctttattaaagaaagcgtgcaaaagaatgagttcatttccgaatactgtggagagttaatcagccaggatgaggctgataggcggggaaaagtatatgataagtacatgagctcgtttctgtttaacctgaacaacgactttgttgttgacgccacccgtaagggcaataaaatccgctttgccaatcatagcgttaacccaaactgctatgcaaaagtggtgatggtgaacggagatcatcgtatcgggatttttgctaaacgggcaatccaggctggcgaagagctttttttcgattacaggtactcgcaggccgacgccctgaaatacgtgggcatcgagcgcgagactgatgtgctgtag

SEQ ID NO: 122841 - DNA, 2244 bp, Artificial Sequence
  derived and/or modified sequence
atggagatccccaacccccccaccagcaagtgcatcacctactggaagagaaaggtgaagagcgagtacatgagactgagacagctgaagagactgcaggccaacatgggcgccaaggccctgtacgtggccaacttcgccaaggtgcaggagaagacccagatcctgaacgaggagtggaagaagctgagagtgcagcccgtgcagagcatgaagcccgtgagcggccaccccttcctgaagaagtgcaccatcgagagcatcttccccggcttcgccagccagcacatgctgatgagaagcctgaacaccgtggccctggtgcccatcatgtacagctggagccccctgcagcagaacttcatggtggaggacgagaccgtgctgtgcaacatcccctacatgggcgacgaggtgaaggaggaggacgagaccttcatcgaggagctgatcaacaactacgacggcaaggtgcacggcgaggaggagatgatccccggcagcgtgctgatcagcgacgccgtgttcctggagctggtggacgccctgaaccagtacagcgacgaggaggaggagggccacaacgacaccagcgacggcaagcaggacgacagcaaggaggacctgcccgtgaccagaaagagaaagagacacgccatcgagggcaacaagaagagcagcaagaagcagttccccaacgacatgatcttcagcgccatcgccagcatgttccccgagaacggcgtgcccgacgacatgaaggagagatacagagagctgaccgagatgagcgaccccaacgccctgcccccccagtgcacccccaacatcgacggccccaacgccaagagcgtgcagagagagcagagcctgcacagcttccacaccctgttctgcagaagatgcttcaagtacgactgcttcctgcaccccttccacgccacccccaacgtgtacaagagaaagaacaaggagatcaagatcgagcccgagccctgcggcaccgactgcttcctgctgctggagggcgccaaggagtacgccatgctgcacaaccccagaagcaagtgcagcggcagaagaagaagaagacaccacatcgtgagcgccagctgcagcaacgccagcgccagcgccgtggccgagaccaaggagggcgacagcgacagagacaccggcaacgactgggccagcagcagcagcgaggccaacagcagatgccagacccccaccaagcagaaggccagccccgcccccccccagctgtgcgtggtggaggcccccagcgagcccgtggagtggaccggcgccgaggagagcctgttcagagtgttccacggcacctacttcaacaacttctgcagcatcgccagactgctgggcaccaagacctgcaagcaggtgttccagttcgccgtgaaggagagcctgatcctgaagctgcccaccgacgagctgatgaaccccagccagaagaagaagagaaagcacagactgtgggccgcccactgcagaaagatccagctgaagaaggacaacagcagcacccaggtgtacaactaccagccctgcgaccaccccgacagaccctgcgacagcacctgcccctgcatcatgacccagaacttctgcgagaagttctgccagtgcaaccccgactgccagaacagattccccggctgcagatgcaagacccagtgcaacaccaagcagtgcccctgctacctggccgtgagagagtgcgaccccgacctgtgcctgacctgcggcgccagcgagcactgggactgcaaggtggtgagctgcaagaactgcagcatccagagaggcctgaagaagcacctgctgctggcccccagcgacgtggccggctggggcaccttcatcaaggagagcgtgcagaagaacgagttcatcagcgagtactgcggcgagctgatcagccaggacgaggccgacagaagaggcaaggtgtacgacaagtacatgagcagcttcctgttcaacctgaacaacgacttcgtggtggacgccaccagaaagggcaacaagatcagattcgccaaccacagcgtgaaccccaactgctacgccaaggtggtgatggtgaacggcgaccacagaatcggcatcttcgccaagagagccatccaggccggcgaggagctgttcttcgactacagatacagccaggccgacgccctgaagtacgtgggcatcgagagagagaccgacgtgctgtag

SEQ ID NO: 122842 - DNA, 1827 bp, Artificial Sequence
  derived and/or modified sequence
atggaggaggccagctgccccacctgcagcgtgaacgaggcctgcgagtggacccccttcagccagaaggagatgatccccggcagcgtgctgatcagcgacgccgtgttcctggagctggtggacgccctgaaccagtacagcgacgaggaggaggagggccacaacgacaccagcgacggcaagcaggacgacagcaaggaggacctgcccgtgaccagaaagagaaagagacacgccatcgagggcaacaagaagagcagcaagaagcagttccccaacgacatgatcttcagcgccatcgccagcatgttccccgagaacggcgtgcccgacgacatgaaggagagatacagagagctgaccgagatgagcgaccccaacgccctgcccccccagtgcacccccaacatcgacggccccaacgccaagagcgtgcagagagagcagagcctgcacagcttccacaccctgttctgcagaagatgcttcaagtacgactgcttcctgcaccccttccacgccacccccaacgtgtacaagagaaagaacaaggagatcaagatcgagcccgagccctgcggcaccgactgcttcctgctgctggagggcgccaaggagtacgccatgctgcacaaccccagaagcaagtgcagcggcagaagaagaagaagacaccacatcgtgagcgccagctgcagcaacgccagcgccagcgccgtggccgagaccaaggagggcgacagcgacagagacaccggcaacgactgggccagcagcagcagcgaggccaacagcagatgccagacccccaccaagcagaaggccagccccgcccccccccagctgtgcgtggtggaggcccccagcgagcccgtggagtggaccggcgccgaggagagcctgttcagagtgttccacggcacctacttcaacaacttctgcagcatcgccagactgctgggcaccaagacctgcaagcaggtgttccagttcgccgtgaaggagagcctgatcctgaagctgcccaccgacgagctgatgaaccccagccagaagaagaagagaaagcacagactgtgggccgcccactgcagaaagatccagctgaagaaggacaacagcagcacccaggtgtacaactaccagccctgcgaccaccccgacagaccctgcgacagcacctgcccctgcatcatgacccagaacttctgcgagaagttctgccagtgcaaccccgactgccagaacagattccccggctgcagatgcaagacccagtgcaacaccaagcagtgcccctgctacctggccgtgagagagtgcgaccccgacctgtgcctgacctgcggcgccagcgagcactgggactgcaaggtggtgagctgcaagaactgcagcatccagagaggcctgaagaagcacctgctgctggcccccagcgacgtggccggctggggcaccttcatcaaggagagcgtgcagaagaacgagttcatcagcgagtactgcggcgagctgatcagccaggacgaggccgacagaagaggcaaggtgtacgacaagtacatgagcagcttcctgttcaacctgaacaacgacttcgtggtggacgccaccagaaagggcaacaagatcagattcgccaaccacagcgtgaaccccaactgctacgccaaggtggtgatggtgaacggcgaccacagaatcggcatcttcgccaagagagccatccaggccggcgaggagctgttcttcgactacagatacagccaggccgacgccctgaagtacgtgggcatcgagagagagaccgacgtgctgtag

SEQ ID NO: 122843 - DNA, 4404 bp, Artificial Sequence
  derived and/or modified sequence
gcgcatgcgtcctagcagcgggacccgcggctcgggatggaggctggacacctgttctgctgttgtgtcctgccattctcctgaagaacagaggcacactgtaaaacccaacacttccccttgcattctataagattacagcaagatggaaataccaaatccccctacctccaaatgtatcacttactggaaaagaaaagtgaaatctgaatacatgcgacttcgacaacttaaacggcttcaggcaaatatgggtgcaaaggctttgtatgtggcaaattttgcaaaggttcaagaaaaaacccagatcctcaatgaagaatggaagaagcttcgtgtccaacctgttcagtcaatgaagcctgtgagtggacacccttttctcaaaaagagatgatccctggatccgttctgattagtgatgctgtttttctggagttggtcgatgccctgaatcagtactcagatgaggaggaggaagggcacaatgacacctcagatggaaagcaggatgacagcaaagaagatctgccagtaacaagaaagagaaagcgacatgctattgaaggcaacaaaaagagttccaagaaacagttcccaaatgacatgatcttcagtgcaattgcctcaatgttccctgagaatggtgtcccagatgacatgaaggagaggtatcgagaactaacagagatgtcagaccccaatgcacttccccctcagtgcacacccaacatcgatggccccaatgccaagtctgtgcagcgggagcaatctctgcactccttccacacacttttttgccggcgctgctttaaatacgactgcttccttcacccttttcatgccacccctaatgtatataaacgcaagaataaagaaatcaagattgaaccagaaccatgtggcacagactgcttccttttgctggaaggagcaaaggagtatgccatgctccacaacccccgctccaagtgctctggtcgtcgccggagaaggcaccacatagtcagtgcttcctgctccaatgcctcagcctctgctgtggctgagactaaagaaggagacagtgacagggacacaggcaatgactgggcctccagttcttcagaggctaactctcgctgtcagactcccacaaaacagaaggctagtccagccccacctcaactctgcgtagtggaagcaccctcggagcctgtggaatggactggggctgaagaatctctttttcgagtcttccatggcacctacttcaacaacttctgttcaatagccaggcttctggggaccaagacgtgcaagcaggtctttcagtttgcagtcaaagaatcacttatcctgaagctgccaacagatgagctcatgaacccctcacagaagaagaaaagaaagcacagattgtgggctgcacactgcaggaagattcagctgaagaaagataactcttccacacaagtgtacaactaccaaccctgcgaccacccagaccgcccctgtgacagcacctgcccctgcatcatgactcagaatttctgtgagaagttctgccagtgcaacccagactgtcagaatcgtttccctggctgtcgctgtaagacccagtgcaataccaagcaatgtccttgctatctggcagtgcgagaatgtgaccctgacctgtgtctcacctgtggggcctcagagcactgggactgcaaggtggtttcctgtaaaaactgcagcatccagcgtggacttaagaagcacctgctgctggccccctctgatgtggccggatggggcaccttcataaaggagtctgtgcagaagaacgaattcatttctgaatactgtggtgagctcatctctcaggatgaggctgatcgacgcggaaaggtctatgacaaatacatgtccagcttcctcttcaacctcaataatgattttgtagtggatgctactcggaaaggaaacaaaattcgatttgcaaatcattcagtgaatcccaactgttatgccaaagtggtcatggtgaatggagaccatcggattgggatctttgccaagagggcaattcaagctggcgaagagctcttctttgattacaggtacagccaagctgatgctctcaagtacgtggggatcgagagggagaccgacgtcctttagccctcccaggccccacggcagcacttatggtagcggcactgtcttggctttcgtgctcacaccactgctgctcgagtctcctgcactgtgtctcccacactgagaaaccccccaacccactccctctgtagtgaggcctctgccatgtccagagggcacaaaactgtctcaatgagaggggagacagaggcagctagggcttggtctcccaggacagagagttacagaaatgggagactgtttctctggcctcagaagaagcgagcacaggctggggtggatgacttatgcgtgatttcgtgtcggctccccaggctgtggcctcaggaatcaacttaggcagttcccaacaagcgctagcctgtaattgtagctttccacatcaagagtccttatgttattgggatgcaggcaaacctctgtggtcctaagacctggagaggacaggctaagtgaagtgtggtccctggagcctacaagtggtctgggttagaggcgagcctggcaggcagcacagactgaactcagaggtagacaggtcaccttactacctcctccctcgtggcagggctcaaactgaaagagtgtgggttctaagtacaggcattcaaggctgggggaaggaaagctacgccatccttccttagccagagagggagaaccagccagatgatagtagttaaactgctaagcttgggcccaggaggctttgagaaagccttctctgtgtactctggagatagatggagaagtgttttcagattcctgggaacagacaccagtgctccagctcctccaaagttctggcttagcagctgcaggcaagcattatgctgctattgaagaagcattaggggtatgcctggcaggtgtgagcatcctggctcgctggatttgtgggtgttttcaggccttccattccccatagaggcaaggcccaatggccagtgttgcttatcgcttcagggtaggtgggcacaggcttggactagagaggagaaagattggtgtaatctgctttcctgtctgtagtgcctgctgtttggaaagggtgagttagaatatgttccaaggttggtgaggggctaaattgcacgcgtttaggctggcaccccgtgtgcagggcacactggcagagggtatctgaagtgggagaagaagcaggtagaccacctgtcccaggctgtggtgccaccctctctggcattcatgcagagcaaagcactttaaccatttcttttaaaaggtctatagattggggtagagtttggcctaaggtctctagggtccctgcctaaatcccactcctgagggagggggaagaagagagggtgggagattctcctccagtcctgtctcatctcctgggagaggcagacgagtgagtttcacacagaagaatttcatgtgaatggggccagcaagagctgccctgtgtccatggtgggtgtgccgggctggctgggaacaaggagcagtatgttgagtagaaagggtgtgggcgggtatagattggcctgggagtgttacagtagggagcaggcttctcccttctttctgggactcagagccccgcttcttcccactccacttgttgtcccatgaaggaagaagtggggttcctcctgacccagctgcctcttacggtttggtatgggacatgcacacacactcacatgctctcactcaccacactggagggcacacacgtaccccgcacccagcaactcctgacagaaagctcctcccacccaaatgggccaggccccagcatgatcctgaaatctgcatccgccgtggtttgtattcattgtgcatatcagggataccctcaagctggactgtgggttccaaattactcatagaggagaaaaccagagaaagatgaagaggaggagttaggtctatttgaaatgccaggggctcgctgtgaggaataggtgaaaaaaaacttttcaccagcctttgagagactagactgaccccacccttccttcagtgagcagaatcactgtggtcagtctcctgtcccagcttcagttcatgaatactcctgttcctccagtttcccatcctttgtccctgctgtcccccacttttaaagatgggtctcaacccctccccaccacgtcatgatggatggggcaaggtggtggggactaggggagcctggtatacatgcggcttcattgccaataaatttcatgcactttaaagtcctgtggcttgtgacctcttaataaagtgttagaatcc

SEQ ID NO: 122844 - protein, 425 aa, Artificial Sequence
  derived and/or modified sequence
MGPRRLLLVAACFSLCGPLLSARTRARRPESKATNATLDPRSFLLRNPNDKYEPFWEDEEKNESGLTEYRLVSINKSSPLQKQLPAFISEDASGYLTSSWLTLFVPSVYTGVFVVSLPLNIMAIVVFILKMKVKKPAVVYMLHLATADVLFVSVLPFKISYYFSGSDWQFGSELCRFVTAAFYCNMYASILLMTVISIDRFLAVVYPMQSLSWRTLGRASFTCLAIWALAIAGVVPLLLKEQTIQVPGLNITTCHDVLNETLLEGYYAYYFSAFSAVFFFVPLIISTVCYVSIIRCLSSSAVANRSKKSRALFLSAAVFCIFIICFGPTNVLLIAHYSFLSHTSTTEAAYFAYLLCVCVSSISCCIDPLIYYYASSECQRYVYSILCCKESSDPSSYNSSGQLMASKMDTCSSNLNNSIYKKLLT

SEQ ID NO: 122845 - DNA, 1278 bp, Artificial Sequence
  derived and/or modified sequence
atgggtcccaggagactcctcctggtcgcagcttgttttagtctgtgcgggccgttactgagtgcccgaacacgtgcccgtaggcctgagagtaaggccaccaatgccacgcttgatcccaggagctttcttttgagaaatcctaatgacaaatatgagcccttctgggaggatgaagaaaaaaatgagtcgggcctgactgaatacagactagtaagcattaataaatcctcacccttgcagaaacagcttccagcattcatttccgaggatgcttcgggatacctgacaagttcttggttgaccctgttcgtcccaagcgtgtacacaggcgttttcgttgttagtctccccctgaacattatggcgatcgtggtgtttatacttaagatgaaggtgaagaaacccgccgtcgtctacatgttgcatttggccacagccgatgtgctctttgtcagtgtgcttccctttaagatcagttattatttttccgggtctgactggcagtttggcagtgagctctgccgcttcgtcactgcagcattttactgtaacatgtatgcctcgatactgctgatgaccgttatatccattgatcggttccttgcagtggtttaccccatgcagagtctgtcctggcgcactctcggacgcgccagctttacatgcctcgctatctgggcactggctattgcaggagtggtcccattgttgctaaaggagcagaccatccaggtgcccggcctaaacatcacaacgtgtcacgatgtgctgaatgagactctgcttgagggttactatgcttattatttttctgcctttagcgctgtttttttttttgtcccccttatcattagcaccgtgtgttacgtctctatcatccggtgtctttcctcttccgcagtcgcgaacaggtctaaaaaatccagagccctgtttctcagcgccgctgtgttttgcatctttatcatttgttttggtcccactaacgtcttactaattgcgcattattccttcctgagccacacctccaccaccgaggcggcttatttcgcttatctcctatgcgtttgtgtctcttcaatatcttgctgcatagatccgctgatctactactatgccagttcggagtgccagcggtacgtgtattctatcttatgctgcaaagagagttcagatccttcttcttacaattctagcggacaacttatggcatctaaaatggatacatgctcctctaacctgaacaatagcatctataaaaagctgctgacatag

SEQ ID NO: 122846 - DNA, 1278 bp, Artificial Sequence
  derived and/or modified sequence
atgggcccccggcggctgctgctggtggccgcctgcttcagcctgtgtggccccctgctgagcgcccggacccgggcccggcggcctgagagcaaggccaccaatgccaccctggaccccaggagcttcctgctgaggaaccccaatgacaagtatgagcccttctgggaggatgaggagaagaatgaaagtggcctgacagagtaccgcctggtgtccatcaacaagagcagccccctgcagaagcagctgcctgccttcatcagtgaagatgccagcggctacctgaccagctcctggctgaccctgtttgtgcccagcgtgtacacaggagtgtttgtggtgtccctgcccctgaacatcatggccatcgtggtgttcatcctgaagatgaaggtgaagaagccagctgtggtgtacatgctgcacctggccacagcagatgtgctgtttgtgtctgtgctgcccttcaagatctcctactacttcagcggcagtgactggcagtttggcagcgagctgtgccgctttgtgacagctgccttctactgcaacatgtatgccagcatcctgctgatgaccgtcatcagcattgaccgcttcctggccgtggtgtaccccatgcagagcctgtcctggaggaccctgggccgggccagcttcacctgcctggccatctgggccctggccatcgccggcgtggtgcccctgctgctgaaggagcagaccatccaggtgcccggcctgaacatcaccacctgccatgatgtgctgaatgagaccctgctggagggctactatgcctactacttcagcgccttctctgctgtgttcttctttgtgcccctcatcatcagcacagtgtgctacgtgtccatcatccgctgcctgagcagcagcgctgtggccaacagaagcaagaagagccgggccctcttcctgtctgctgctgtgttctgcatcttcatcatctgcttcggccccaccaacgtgctgctgattgcccactacagcttcctgagccacaccagcaccacagaggccgcctactttgcctacctgctgtgtgtgtgtgtgagcagcatcagctgctgcatcgaccccctcatctactactatgccagcagcgagtgccagagatatgtgtacagcatcctgtgctgcaaggagagcagtgaccccagcagctacaacagcagcggccagctgatggccagcaagatggacacctgcagcagcaacctgaacaacagcatctacaagaagctgctgacctag

SEQ ID NO: 122847 - DNA, 1278 bp, Artificial Sequence
  derived and/or modified sequence
atgggcccccggcggctgctgctggtggccgcctgcttcagcctgtgtggacccttgctgtcggcaaggacacgcgccaggaggcctgaaagcaaggcaaccaatgctacactcgatccacgatccttcctgctcagaaatccaaacgataaatatgaacctttttgggaggacgaagagaagaacgaaagtgggctgaccgaatataggttagtttcaataaacaaatcctctccactgcaaaagcagctgcctgcttttatctccgaagatgcttcaggctacctgacatcatcatggctgacccttttcgttccatctgtttatactggagtttttgtagtatccttgcccctcaatattatggccatcgtggtgttcatcctgaaaatgaaagtaaaaaagcctgctgttgtgtatatgctgcatctggctacagcagacgtcctgttcgtctctgtgctgccatttaagattagctactatttctcaggctccgactggcagttcggctccgagctgtgtcgattcgtcacggccgcattctactgcaacatgtatgcgagtatattgctgatgaccgtcatttcgatcgacaggttcttggctgtggtatatccaatgcagagtctgtcttggcggacattaggccgcgctagttttacgtgtcttgccatctgggccctggccattgctggcgtggtgcctcttttgctcaaagagcagaccatccaggttccagggctgaacatcaccacatgccacgacgtgctaaacgagaccctgctggaaggctactatgcatattatttctctgcgttcagcgccgtgttcttttttgtgcctctgatcatttcgacggtttgctatgtgagtatcattcgctgtctgagcagcagtgcagtggcaaacagaagtaaaaagtctagggcactcttccttagcgcagccgtgttctgcatctttatcatttgtttcggaccgaccaatgttctgctgatcgcacattacagcttcctgtcacacactagtactactgaagcagcatacttcgcctacctactgtgcgtgtgcgtcagttctatttcatgttgtattgacccccttatttactactatgccagttccgaatgtcagaggtacgtgtactccatcctgtgttgcaaagaaagcagcgatccttcttcttacaattcatcaggtcagctaatggcttccaagatggacacctgtagttctaacctgaacaacagtatctacaagaagctgctgacttag

SEQ ID NO: 122848 - DNA, 1278 bp, Artificial Sequence
  derived and/or modified sequence
atggggccaaggagacttctgctggtggccgcatgtttctctctttgtgggccactactgagcgcgagaactagggccagaaggccagaatctaaagccaccaatgcgacccttgaccctaggtccttcctgcttaggaatccgaatgacaaatacgaacccttttgggaggatgaggaaaagaacgagtcaggactcaccgaataccgcttggtatccattaacaagtcttcacctctgcaaaaacagttgcctgcgtttatttcagaagacgcaagcggctacctgacctcctcatggctgaccctttttgtgccctccgtatacacaggcgtcttcgtggtgtctctgcctctcaacatcatggctattgtggtattcattctgaagatgaaagtgaaaaaacccgcagtcgtgtacatgcttcacttggccacggcagacgtgcttttcgtcagcgtcttgcccttcaagatctcctactacttcagtgggagcgactggcagtttggatcagagctctgtagattcgtaacagcagcattttactgcaatatgtacgcttctattctgctgatgaccgttatcagcatcgacaggttcctggctgtcgtctacccaatgcaatccctctcttggcgcactcttggcagggcctccttcacctgccttgctatttgggcgctggccattgcaggggtggtgcctcttttactcaaggaacagaccattcaggtgccagggctgaatatcactacctgccacgacgtcctgaatgagacattactggaaggatattatgcctattatttctctgctttttcagccgtctttttcttcgtgccattgatcatatctacagtgtgctacgtgtccatcatacgctgcctgtccagctccgcagtggccaacaggtctaagaaaagcagggcattgttcctcagcgcggcagttttctgcatatttataatttgttttggcccaaccaatgtactactcatcgcccactacagcttcctttcacacacttcaactactgaagctgcttactttgcctacctcctttgtgtctgtgtgtcttctatctcctgttgcatcgacccgctgatctactattatgcctcatctgagtgccagcgctacgtctattctatcttgtgctgtaaggagtctagtgacccttccagctacaatagcagcggccagctgatggcttctaagatggacacttgctcatcaaatcttaacaatagcatatacaaaaagctgcttacatag

SEQ ID NO: 122849 - DNA, 3821 bp, Artificial Sequence
  derived and/or modified sequence
agagactctcactgcacgccggagggcgcccttcctcgctcgcgcccgcgcgaccgcgcgccccagtcccgccccgccccgctaaccgccccagacacagcgctcgccgagggtcgcttggaccctgatcttacccgtgggcaccctgcgctctgcctgccgcgaagaccggctccccgacccgcagaagtcaggagagagggtgaagcggagcagcccgaggcggggcagcctcccggagcagcgccgcgcagagcccgggacaatggggccgcggcggctgctgctggtggccgcctgcttcagtctgtgcggcccgctgttgtctgcccgcacccgggcccgcaggccagaatcaaaagcaacaaatgccaccttagatccccggtcatttcttctcaggaaccccaatgataaatatgaaccattttgggaggatgaggagaaaaatgaaagtgggttaactgaatacagattagtctccatcaataaaagcagtcctcttcaaaaacaacttcctgcattcatctcagaagatgcctccggatatttgaccagctcctggctgacactctttgtcccatctgtgtacaccggagtgtttgtagtcagcctcccactaaacatcatggccatcgttgtgttcatcctgaaaatgaaggtcaagaagccggcggtggtgtacatgctgcacctggccacggcagatgtgctgtttgtgtctgtgctcccctttaagatcagctattacttttccggcagtgattggcagtttgggtctgaattgtgtcgcttcgtcactgcagcattttactgtaacatgtacgcctctatcttgctcatgacagtcataagcattgaccggtttctggctgtggtgtatcccatgcagtccctctcctggcgtactctgggaagggcttccttcacttgtctggccatctgggctttggccatcgcaggggtagtgcctctgctcctcaaggagcaaaccatccaggtgcccgggctcaacatcactacctgtcatgatgtgctcaatgaaaccctgctcgaaggctactatgcctactacttctcagccttctctgctgtcttcttttttgtgccgctgatcatttccacggtctgttatgtgtctatcattcgatgtcttagctcttccgcagttgccaaccgcagcaagaagtcccgggctttgttcctgtcagctgctgttttctgcatcttcatcatttgcttcggacccacaaacgtcctcctgattgcgcattactcattcctttctcacacttccaccacagaggctgcctactttgcctacctcctctgtgtctgtgtcagcagcataagctgctgcatcgaccccctaatttactattacgcttcctctgagtgccagaggtacgtctacagtatcttatgctgcaaagaaagttccgatcccagcagttataacagcagtgggcagttgatggcaagtaaaatggatacctgctctagtaacctgaataacagcatatacaaaaagctgttaacttaggaaaagggactgctgggaggttaaaaagaaaagtttataaaagtgaataacctgaggattctattagtccccacccaaactttattgattcacctcctaaaacaacagatgtacgacttgcatacctgctttttatgggagctgtcaagcatgtatttttgtcaattaccagaaagataacaggacgagatgacggtgttattccaagggaatattgccaatgctacagtaataaatgaatgtcacttctggatatagctaggtgacatatacatacttacatgtgtgtatatgtagatgtatgcacacacatatattatttgcagtgcagtatagaataggcactttaaaacactctttccccgcaccccagcaattatgaaaataatctctgattccctgatttaatatgcaaagtctaggttggtagagtttagccctgaacatttcatggtgttcatcaacagtgagagactccatagtttgggcttgtaccacttttgcaaataagtgtattttgaaattgtttgacggcaaggtttaagttattaagaggtaagacttagtactatctgtgcgtagaagttctagtgttttcaattttaaacatatccaagtttgaattcctaaaattatggaaacagatgaaaagcctctgttttgatatgggtagtattttttacattttacacactgtacacataagccaaaactgagcataagtcctctagtgaatgtaggctggctttcagagtaggctattcctgagagctgcatgtgtccgcccccgatggaggactccaggcagcagacacatgccagggccatgtcagacacagattggccagaaaccttcctgctgagcctcacagcagtgagactggggccactacatttgctccatcctcctgggattggctgtgaactgatcatgtttatgagaaactggcaaagcagaatgtgatatcctaggaggtaatgaccatgaaagacttctctacccatcttaaaaacaacgaaagaaggcatggacttctggatgcccatccactgggtgtaaacacatctagtagttgttctgaaatgtcagttctgatatggaagcacccattatgcgctgtggccactccaataggtgctgagtgtacagagtggaataagacagagacctgccctcaagagcaaagtagatcatgcatagagtgtgatgtatgtgtaataaatatgtttcacacaaacaaggcctgtcagctaaagaagtttgaacatttgggttactatttcttgtggttataacttaatgaaaacaatgcagtacaggacatatattttttaaaataagtctgatttaattgggcactatttatttacaaatgttttgctcaatagattgctcaaatcaggttttcttttaagaatcaatcatgtcagtctgcttagaaataacagaagaaaatagaattgacattgaaatctaggaaaattattctataatttccatttacttaagacttaatgagactttaaaagcattttttaacctcctaagtatcaagtatagaaaatcttcatggaattcacaaagtaatttggaaattaggttgaaacatatctcttatcttacgaaaaaatggtagcattttaaacaaaatagaaagttgcaaggcaaatgtttatttaaaagagcaggccaggcgcggtggctcacgcctgtaatcccagcactttgggaggctgaggcgggtggatcacgaggtcaggagatcgagaccatcctggctaacacggtgaaacccgtctctactaaaaatgcaaaaaaaattagccgggcgtggtggcaggcacctgtagtcccagctactcgggaggctgaggcaggagactggcgtgaacccaggaggcggaccttgtagtgagccgagatcgcgccactgtgctccagcctgggcaacagagcaagactccatctcaaaaaataaaaataaataaaaaataaaaaaataaaagagcaaactatttccaaataccatagaataacttacataaaagtaatataactgtattgtaagtagaagctagcactggttttattaatttagtgactattcattttatctaaatcagtgaagatttactgtcattgtttattagtctgtatatattaaaatatgatatcattaatgtacttacaaaatagtatgtcactgtttttatgttcattcttaaaaacataacctgtattaataaatgtgaacatttgcttggtatctctttggaa

SEQ ID NO: 122850 - DNA, 1278 bp, Artificial Sequence
  derived and/or modified sequence
atgggccccagaagactgctgctggtggccgcctgcttcagcctgtgcggccccctgctgagcgccagaaccagagccagaagacccgagagcaaggccaccaacgccaccctggaccccagaagcttcctgctgagaaaccccaacgacaagtacgagcccttctgggaggacgaggagaagaacgagagcggcctgaccgagtacagactggtgagcatcaacaagagcagccccctgcagaagcagctgcccgccttcatcagcgaggacgccagcggctacctgaccagcagctggctgaccctgttcgtgcccagcgtgtacaccggcgtgttcgtggtgagcctgcccctgaacatcatggccatcgtggtgttcatcctgaagatgaaggtgaagaagcccgccgtggtgtacatgctgcacctggccaccgccgacgtgctgttcgtgagcgtgctgcccttcaagatcagctactacttcagcggcagcgactggcagttcggcagcgagctgtgcagattcgtgaccgccgccttctactgcaacatgtacgccagcatcctgctgatgaccgtgatcagcatcgacagattcctggccgtggtgtaccccatgcagagcctgagctggagaaccctgggcagagccagcttcacctgcctggccatctgggccctggccatcgccggcgtggtgcccctgctgctgaaggagcagaccatccaggtgcccggcctgaacatcaccacctgccacgacgtgctgaacgagaccctgctggagggctactacgcctactacttcagcgccttcagcgccgtgttcttcttcgtgcccctgatcatcagcaccgtgtgctacgtgagcatcatcagatgcctgagcagcagcgccgtggccaacagaagcaagaagagcagagccctgttcctgagcgccgccgtgttctgcatcttcatcatctgcttcggccccaccaacgtgctgctgatcgcccactacagcttcctgagccacaccagcaccaccgaggccgcctacttcgcctacctgctgtgcgtgtgcgtgagcagcatcagctgctgcatcgaccccctgatctactactacgccagcagcgagtgccagagatacgtgtacagcatcctgtgctgcaaggagagcagcgaccccagcagctacaacagcagcggccagctgatggccagcaagatggacacctgcagcagcaacctgaacaacagcatctacaagaagctgctgacctag

SEQ ID NO: 122851 - protein, 661 aa, Artificial Sequence
  derived and/or modified sequence
MRLKNLTFIIILIISGELYAEEKPCGFPHVENGRIAQYYYTFKSFYFPMSIDKKLSFFCLAGYTTESGRQEEQTTCTTEGWSPEPRCFKKCTKPDLSNGYISDVKLLYKIQENMRYGCASGYKTTGGKDEEVVQCLSDGWSSQPTCRKEHETCLAPELYNGNYSTTQKTFKVKDKVQYECATGYYTAGGKKTEEVECLTYGWSLTPKCTKLKCSSLRLIENGYFHPVKQTYEEGDVVQFFCHENYYLSGSDLIQCYNFGWYPESPVCEGRRNRCPPPPLPINSKIQTHSTTYRHGEIVHIECELNFEIHGSAEIRCEDGKWTEPPKCIEGQEKVACEEPPFIENGAANLHSKIYYNGDKVTYACKSGYLLHGSNEITCNRGKWTLPPECVENNENCKHPPVVMNGAVADGILASYATGSSVEYRCNEYYLLRGSKISRCEQGKWSSPPVCLEPCTVNVDYMNRNNIEMKWKYEGKVLHGDLIDFVCKQGYDLSPLTPLSELSVQCNRGEVKYPLCTRKESKGMCTSPPLIKHGVIISSTVDTYENGSSVEYRCFDHHFLEGSREAYCLDGMWTTPPLCLEPCTLSFTEMEKNNLLLKWDFDNRPHILHGEYIEFICRGDTYPAELYITGSILRMQCDRGQLKYPRCIPRQSTLSYQEPLRT

SEQ ID NO: 122852 - DNA, 1986 bp, Artificial Sequence
  derived and/or modified sequence
atgcgccttaaaaacctcaccttcatcataatcctgataatctctggcgagctgtacgccgaagagaaaccatgcggttttccccacgtcgaaaatggccgcattgcacagtattattatacttttaagtcattctactttcccatgtccatagataagaaattatctttcttttgtttggccgggtataccacggagagcggtcggcaggaggaacagacaacatgtacaaccgagggttggagcccagaaccgagatgttttaagaaatgcacaaagccggacctatctaatggctacatttccgacgtcaagttgctttataagattcaggagaatatgcggtatggttgcgcctccggttataagacaacaggcggcaaggatgaggaggtggtccagtgcctttctgatgggtggagttcgcagccaacatgccgcaaagagcatgaaacctgcctcgcacctgagctctataatggcaactattcaaccacacaaaagaccttcaaggttaaagataaagtgcaatatgaatgcgctactggctactacaccgctggtggaaagaaaacagaggaagtcgaatgcctgacttacggttggagcctgacacccaaatgtaccaagttgaaatgctccagcctcaggctgatcgagaacggatatttccacccagtgaagcaaacatacgaagagggagacgttgtgcagttcttttgtcatgaaaattattacttgagtggttcagatcttattcagtgttataattttggctggtacccggaatctcccgtatgtgaaggacgcagaaaccgctgccctcccccgcccctacctattaactcaaagatacagactcattccacaacctatagacacggcgagattgtgcacatcgagtgcgaactgaattttgagattcatgggtctgccgaaatccgatgtgaggacgggaagtggactgagccgcccaagtgcattgagggccaggaaaaggtggcctgcgaggaaccgcctttcatagaaaacggcgcagcaaacctgcactccaagatatactacaatggagataaagtgacctacgcttgtaaaagcggctatcttttgcacggcagtaacgagatcacctgcaatcgggggaagtggacattaccccccgaatgtgtggagaacaatgagaattgcaaacatccccctgttgtcatgaatggcgccgtggccgatggaatcctggcctcttacgcgactgggagcagcgtggagtatagatgtaacgagtactatctgcttcggggatctaaaatcagcagatgcgaacagggaaaatggtcgtccccccctgtgtgtctggagccatgtaccgtgaacgtcgactacatgaatcgcaataacattgagatgaagtggaagtacgagggtaaagttctgcacggtgatctgatcgacttcgtgtgcaagcaaggatacgacctctccccactaaccccactctctgaactcagcgtgcagtgtaatcggggcgaggtcaagtaccctctctgcacccgcaaagagagtaaagggatgtgtacttccccccccctgatcaagcatggagtgattatcagttccaccgtggatacatacgagaatgggagctcagtagagtaccgctgttttgaccaccactttctagaagggagcagagaggcatactgcttagatggtatgtggactactcctcctctatgtttggagccttgcactttatcattcactgagatggaaaagaacaacctgcttctcaagtgggacttcgacaacaggccccatatactgcatggagagtatatcgagttcatttgccggggagatacttatcccgcagagctctatattaccggttcaatcctgaggatgcagtgcgatcgtggtcagttgaaatatccaagatgcattccaaggcagagtacgctgtcctatcaagagccactacgcacgtag

SEQ ID NO: 122853 - DNA, 1986 bp, Artificial Sequence
  derived and/or modified sequence
atgaggctgaagaacctgaccttcatcatcatcctgatcatctctggagagctgtatgcagaggagaagccctgtggcttcccccacgtggagaatggaagaattgcccagtactactacaccttcaagagcttctacttccccatgagcattgacaagaagctgtccttcttctgcctggccggctacaccacagaaagtggccggcaggaggagcagaccacctgcaccacagagggctggagccctgagccccgctgcttcaagaagtgcaccaagccagacctgagcaatggctacatcagtgatgtgaagctgctgtacaagatccaggagaacatgagatatggctgtgccagcggctacaagaccactggaggcaaggatgaggaggtggtgcagtgcctgagtgatggctggagcagccagcccacctgcaggaaggagcacgagacctgcctggcccctgagctgtacaacggcaactacagcaccacccagaagaccttcaaggtgaaggacaaggtgcagtatgaatgtgccaccggctactacacagctgggggcaagaagacagaggaggtggagtgcctgacctacggctggagcctgacccccaagtgcaccaagctgaagtgcagcagcctgcggctgattgaaaatggctacttccaccctgtgaagcagacctatgaggagggagatgtggtgcagttcttctgccacgagaactactacctgagcggcagtgacctgatccagtgctacaactttggctggtacccagagagccctgtgtgtgagggcagaagaaaccgctgccccccaccacccctgcccatcaacagcaagatccagacccacagcaccacctaccgccacggggagatcgtgcacattgaatgtgagctgaactttgagatccacggcagcgctgagatccgctgtgaagatggcaagtggacagagccccccaagtgcatcgagggccaggagaaggtggcctgtgaggagccccccttcattgaaaatggagctgccaacctgcacagcaagatctactacaacggggacaaggtgacctacgcctgcaagagcggctacctgctgcacggcagcaatgagatcacctgcaacagaggcaagtggaccctgcccccagaatgtgtggagaacaatgaaaactgcaagcacccccctgtggtgatgaatggagctgtggctgatggcatcctggccagctatgccaccggcagctctgtggagtaccgctgcaatgagtactacctgctgcggggcagcaagatcagccgctgtgagcagggcaagtggagcagcccccctgtgtgcctggagccctgcaccgtgaatgtggactacatgaacagaaacaacatcgagatgaagtggaagtatgagggcaaggtgctgcacggggacctgattgactttgtgtgcaagcagggctatgacctgagccccctgacccccctgtctgagctgtctgtgcagtgcaacagaggagaggtgaagtaccccctgtgcaccaggaaggagagcaagggcatgtgcaccagccccccactcatcaagcacggcgtcatcatcagcagcacagtggacacctatgaaaatggcagctctgtggagtaccgctgctttgaccaccacttcctggagggcagccgggaggcctactgcctggatggcatgtggaccaccccacccctgtgcctggagccctgcaccctgtccttcacagagatggagaagaacaacctgctgctgaagtgggactttgacaaccggccccacatcctgcacggggagtacatcgagttcatctgccgcggggacacctacccagctgagctgtacatcaccggcagcatcctgaggatgcagtgtgaccggggccagctgaagtacccccgctgcatcccccggcagagcaccctgagctaccaggagcccctgcggacctag

SEQ ID NO: 122854 - DNA, 1986 bp, Artificial Sequence
  derived and/or modified sequence
atgcggctgaagaacctgaccttcatcatcatcctgatcatcagcggcgaactttatgcagaggagaagccatgtgggttcccccacgtcgagaacggccggatcgctcaatactactatactttcaagagtttctacttcccaatgtcaatagacaaaaaactctctttcttttgtctcgccggctacaccacagaaagcggcagacaggaggaacagaccacatgtaccaccgagggatggtcccccgagccaagatgctttaaaaagtgcaccaaacccgaccttagtaatgggtatattagtgatgtcaaactgttgtacaagattcaggagaatatgagatacggttgtgcatccggatacaaaacaacagggggaaaagacgaggaagtcgtacagtgcctaagcgacggctggtcctcccagcctacctgtcgcaaagaacatgagacttgtctcgcccccgagctttacaatggtaattacagcacaacacaaaagacattcaaagtgaaagacaaggtacagtatgaatgcgcgacgggctactacacggcaggaggcaagaaaaccgaggaggtggagtgtcttacttacggctggagcctgacacccaagtgcactaagctgaaatgttccagcctcagactaattgagaacggttatttccatccagtgaaacaaacttacgaagaaggtgacgtagtacagttcttttgtcatgagaattattatctgagcggatcagatctaatacagtgctacaattttggctggtacccagagagtcccgtttgcgagggaaggagaaaccgctgcccacccccccccctgccaatcaattcaaagattcagactcacagtacgacttaccgccatggggagatagttcatattgagtgtgaactgaattttgaaattcatggtagcgcagaaattaggtgcgaagatggaaaatggacagagccccctaagtgcatcgaagggcaggaaaaggtcgcctgtgaagagccaccttttattgagaatggcgccgccaatttgcactcaaagatctattacaacggcgataaagtaacatacgcctgcaaatctggctatcttctgcacggaagtaacgaaatcacctgcaacaggggtaagtggacactgccccccgagtgcgtcgaaaataatgagaattgtaaacacccccctgtcgtgatgaatggtgcggttgccgatggcatcctggcgtcctacgctacaggtagtagtgtggaatacagatgtaatgaatattatcttctcaggggcagcaagatctcccgctgtgagcaggggaagtggtctagcccaccggtgtgtctggagccatgcacagtgaacgtggactatatgaacagaaacaacatcgagatgaaatggaagtacgaaggcaaggtgcttcacggggacctaatcgatttcgtgtgcaaacaggggtatgaccttagccctctgactcccctatctgagctaagcgtgcaatgtaatcgcggggaggtgaagtatcccctctgcacacggaaagagtcaaaagggatgtgtacctcaccgcctcttattaaacatggggtgataatatcctcgacagtggacacatacgaaaacggaagcagcgtcgagtatcggtgtttcgatcatcacttcttggaaggtagtcgggaggcatactgtctcgatggcatgtggaccacaccgccactttgcctggagccatgcactctgagctttacagagatggaaaagaataacctgctgctgaagtgggatttcgacaaccgtccacacatcctacatggggaatacattgagttcatatgtaggggggatacttatcccgcagagctatacataactgggtccatcctgcgaatgcagtgcgatcgggggcaattaaaataccccagatgtattcctcgccagtctaccctgtcataccaagagccacttagaacctag

SEQ ID NO: 122855 - DNA, 1986 bp, Artificial Sequence
  derived and/or modified sequence
atgcggcttaagaatctgacgttcatcatcatcctgataatttcaggagagttgtatgccgaagagaaaccttgcggcttcccacacgtggaaaatgggagaatcgctcagtactactatacattcaaatctttctattttccaatgagcattgataaaaagctgtctttcttttgccttgccggatataccaccgagagtggcagacaggaagagcaaacgacttgtacaaccgaaggctggtcaccagaacccagatgttttaagaagtgtactaagcccgacctctcaaacggctacatatctgatgtcaaactcctgtacaagatccaggagaatatgcgctatgggtgcgcaagcgggtacaaaacaacaggcggtaaggatgaggaggttgtccagtgcctaagtgatgggtggtcctcccagcctacctgccgcaaggagcacgagacctgtttagcccctgagctgtacaacggaaattactccactacccagaagacttttaaagtcaaggacaaagtgcagtacgaatgcgcgaccggctactataccgctgggggtaagaagactgaggaggtcgaatgtctgacttatggctggagcctcacgccaaagtgcacaaagctgaagtgtagctcactcagattgattgagaatggctacttccatcccgtgaagcagacgtacgaagaaggtgatgttgtgcagttcttctgtcatgaaaattattatctgagtggctcagatctgatacagtgctataacttcggatggtatccagagagccctgtgtgtgagggtcgcaggaacaggtgtccaccaccccctttgccaattaacagcaagattcagacacatagcactacttatcgccacggagaaattgttcacatcgaatgcgagttgaatttcgaaattcacggatcggctgagatccgttgcgaggacggaaagtggacagagccgccaaaatgcatcgaaggccaagagaaggtcgcgtgcgaggagccacctttcatcgagaatggtgcggctaatctccactcaaagatctattacaacggtgacaaagtgacatacgcttgcaagtcaggctatctgctgcatggtagcaatgagatcacgtgtaacaggggtaagtggaccctgccgcctgagtgcgtagaaaacaatgaaaactgcaagcacccacctgtcgtcatgaacggtgccgtggcagatggaattctggcctcttacgctactgggtcctccgtggaatataggtgtaatgaatactacctcttgcgaggaagcaaaatctccagatgcgaacaaggaaaatggagcagcccaccagtatgcctggagccctgcaccgttaacgtggattacatgaaccggaataatatcgagatgaaatggaagtatgagggcaaggtattacatggagacctcatcgatttcgtatgtaaacagggctacgatctgagtccactgacacccctgtctgagctgagcgttcagtgcaatcggggtgaagtgaaataccccctgtgcacgcgcaaggaaagtaagggtatgtgcacatcacctccccttatcaagcatggcgttataatctcttccaccgtagatacctacgagaatggctcttcagtcgagtaccggtgtttcgaccaccacttcctggaaggctcaagggaagcatattgcctggatggaatgtggaccacaccacccctgtgtctggagccctgtaccttatcattcaccgaaatggagaaaaacaacctgctgctcaaatgggattttgataacagacctcacatcctgcacggagagtacatcgagtttatctgtaggggagatacgtaccccgcagaactgtacattacaggatctatcttaaggatgcaatgcgataggggccagctcaagtaccctcggtgcatccctcgccagagcaccttgtcctaccaggaacccctcaggacatag

SEQ ID NO: 122856 - DNA, 2217 bp, Artificial Sequence
  derived and/or modified sequence
agtgcttagaattgttaaaatctttgtgaagcacaccactgaagatgaggttgaaaaacctgacttttatcatcatattgataatctcaggagaactctatgcagaagagaaaccctgtggttttcctcatgtggaaaatggaagaattgcccaatattactatacttttaaaagcttttactttccaatgagcatagacaaaaaattgtcatttttctgcttggctggttataccactgaaagtggaagacaagaagagcaaaccacgtgtacaacagaaggctggtctccagagccaaggtgcttcaaaaaatgcactaagcctgacctgagtaatggttacatctctgatgtaaagttattgtataaaattcaagagaacatgcgttatggttgcgcttcagggtacaaaaccactggagggaaggatgaagaagtggttcaatgtctctctgatggatggtcttctcaaccaacctgtaggaaagaacatgaaacatgtttggctcctgaattatataatggaaattattccacaacacagaaaacattcaaagtgaaggacaaagtacaatacgaatgtgctactggctactacacagctggaggaaagaagacagaggaggtagaatgtctcacatacggatggtctctcacaccaaaatgtaccaaattaaagtgctcttctttaagattaattgaaaatggttattttcatcctgtaaagcaaacctatgaagaaggagatgtcgttcagtttttctgtcatgaaaattattatctaagtggatctgatttaattcaatgctataactttggttggtacccagaatctcctgtatgcgaaggaagaagaaacagatgtcctcctccacctctgcccataaactccaaaattcaaacacattcaacaacttatcgtcatggagaaatagttcatatagaatgtgaacttaattttgagatccatgggtcagcagaaatacgttgtgaagatggaaaatggacagaacctccaaaatgcattgaaggacaggagaaggtagcctgtgaggaaccacccttcattgaaaatggtgcagcaaatttacactctaagatttattacaatggggataaagtgacatatgcatgtaaaagcggctaccttctccatggatcgaatgagataacttgtaatcgtggaaaatggacacttcctcctgagtgtgttgaaaataatgagaattgtaagcatcctcctgttgtaatgaatggggctgttgcagacgggatattggcaagctatgcaacaggatcctcagtggaatatagatgcaatgaatattacttactgaggggatcaaaaatatctcgttgcgaacaaggaaaatggtcatccccacctgtttgcttggaaccatgtactgttaatgtggattacatgaacagaaataacatagaaatgaagtggaaatatgaagggaaagtcttacatggagatttaatagattttgtatgtaaacagggatatgacttatctccattaaccccattgtctgaattatctgtgcagtgcaacagaggagaagtgaaatatcctttatgtactagaaaagaatctaaaggaatgtgcacatctcctcctcttattaaacatggagtcattattagttcaacagtagacacctatgaaaatggctcttcagtagaatacagatgttttgatcaccatttcctagaaggatctagggaggcctattgtttagatggaatgtggactacaccaccattgtgtttagagccatgcacattatcttttactgaaatggaaaagaataatttacttctgaaatgggattttgacaatagaccacacattttgcatggtgaatatattgagtttatttgtagaggagatacttatccagctgaattatatattactggatctatacttagaatgcaatgtgacagagggcagttaaaatatccaagatgtattccaagacaaagcactctgtcttatcaagaacccttaagaacatagaaatgaatggcagaaagaggagtcatatttcaatacatcatgaaattccttataaaatataattttgaggaaataagttaaaaacttcggagtttttccttgcttaaatatttgaatctaaattatttgtgctgaacatttcgttatttataaatgaaaaccaataaatgtctaatttttagtttgt

SEQ ID NO: 122857 - DNA, 1986 bp, Artificial Sequence
  derived and/or modified sequence
atgagactgaagaacctgaccttcatcatcatcctgatcatcagcggcgagctgtacgccgaggagaagccctgcggcttcccccacgtggagaacggcagaatcgcccagtactactacaccttcaagagcttctacttccccatgagcatcgacaagaagctgagcttcttctgcctggccggctacaccaccgagagcggcagacaggaggagcagaccacctgcaccaccgagggctggagccccgagcccagatgcttcaagaagtgcaccaagcccgacctgagcaacggctacatcagcgacgtgaagctgctgtacaagatccaggagaacatgagatacggctgcgccagcggctacaagaccaccggcggcaaggacgaggaggtggtgcagtgcctgagcgacggctggagcagccagcccacctgcagaaaggagcacgagacctgcctggcccccgagctgtacaacggcaactacagcaccacccagaagaccttcaaggtgaaggacaaggtgcagtacgagtgcgccaccggctactacaccgccggcggcaagaagaccgaggaggtggagtgcctgacctacggctggagcctgacccccaagtgcaccaagctgaagtgcagcagcctgagactgatcgagaacggctacttccaccccgtgaagcagacctacgaggagggcgacgtggtgcagttcttctgccacgagaactactacctgagcggcagcgacctgatccagtgctacaacttcggctggtaccccgagagccccgtgtgcgagggcagaagaaacagatgcccccccccccccctgcccatcaacagcaagatccagacccacagcaccacctacagacacggcgagatcgtgcacatcgagtgcgagctgaacttcgagatccacggcagcgccgagatcagatgcgaggacggcaagtggaccgagccccccaagtgcatcgagggccaggagaaggtggcctgcgaggagccccccttcatcgagaacggcgccgccaacctgcacagcaagatctactacaacggcgacaaggtgacctacgcctgcaagagcggctacctgctgcacggcagcaacgagatcacctgcaacagaggcaagtggaccctgccccccgagtgcgtggagaacaacgagaactgcaagcacccccccgtggtgatgaacggcgccgtggccgacggcatcctggccagctacgccaccggcagcagcgtggagtacagatgcaacgagtactacctgctgagaggcagcaagatcagcagatgcgagcagggcaagtggagcagcccccccgtgtgcctggagccctgcaccgtgaacgtggactacatgaacagaaacaacatcgagatgaagtggaagtacgagggcaaggtgctgcacggcgacctgatcgacttcgtgtgcaagcagggctacgacctgagccccctgacccccctgagcgagctgagcgtgcagtgcaacagaggcgaggtgaagtaccccctgtgcaccagaaaggagagcaagggcatgtgcaccagcccccccctgatcaagcacggcgtgatcatcagcagcaccgtggacacctacgagaacggcagcagcgtggagtacagatgcttcgaccaccacttcctggagggcagcagagaggcctactgcctggacggcatgtggaccaccccccccctgtgcctggagccctgcaccctgagcttcaccgagatggagaagaacaacctgctgctgaagtgggacttcgacaacagaccccacatcctgcacggcgagtacatcgagttcatctgcagaggcgacacctaccccgccgagctgtacatcaccggcagcatcctgagaatgcagtgcgacagaggccagctgaagtaccccagatgcatccccagacagagcaccctgagctaccaggagcccctgagaacctag

SEQ ID NO: 122858 - protein, 683 aa, Artificial Sequence
  derived and/or modified sequence
MERAAPSRRVPLPLLLLGGLALLAAGVDADVLLEACCADGHRMATHQKDCSLPYATESKECRMVQEQCCHSQLEELHCATGISLANEQDRCATPHGDNASLEATFVKRCCHCCLLGRAAQAQGQSCEYSLMVGYQCGQVFQACCVKSQETGDLDVGGLQETDKIIEVEEEQEDPYLNDRCRGGGPCKQQCRDTGDEVVCSCFVGYQLLSDGVSCEDVNECITGSHSCRLGESCINTVGSFRCQRDSSCGTGYELTEDNSCKDIDECESGIHNCLPDFICQNTLGSFRCRPKLQCKSGFIQDALGNCIDINECLSISAPCPIGHTCINTEGSYTCQKNVPNCGRGYHLNEEGTRCVDVDECAPPAEPCGKGHRCVNSPGSFRCECKTGYYFDGISRMCVDVNECQRYPGRLCGHKCENTLGSYLCSCSVGFRLSVDGRSCEDINECSSSPCSQECANVYGSYQCYCRRGYQLSDVDGVTCEDIDECALPTGGHICSYRCINIPGSFQCSCPSSGYRLAPNGRNCQDIDECVTGIHNCSINETCFNIQGGFRCLAFECPENYRRSAATRCERLPCHENRECSKLPLRITYYHLSFPTNIQAPAVVFRMGPSSAVPGDSMQLAITGGNEEGFFTTRKVSPHSGVVALTKPVPEPRDLLLTVKMDLSRHGTVSSFVAKLFIFVSAEL

SEQ ID NO: 122859 - protein, 566 aa, Artificial Sequence
  derived and/or modified sequence
MERAAPSRRVPLPLLLLGGLALLAAGVDADVLLEACCADGHRMATHQKDCSLPYATESKECRMVQEQCCHSQLEELHCATGISLANEQDRCATPHGDNASLEATFVKRCCHCCLLGRAAQAQGQSCEYSLMVGYQCGQVFQACCVKSQETGDLDVGGLQETDKIIEVEEEQEDPYLNDRCRGGGPCKQQCRDTGDEVVCSCFVGYQLLSDGVSCEDVNECITGSHSCRLGESCINTVGSFRCQRDSSCGTGYELTEDNSCKDIDECESGIHNCLPDFICQNTLGSFRCRPKLQCKSGFIQDALGNCIDINECLSISAPCPIGHTCINTEGSYTCQKNVPNCGRGYHLNEEGTRCVDVDECAPPAEPCGKGHRCVNSPGSFRCECKTGYYFDGISRMCVDVNECQRYPGRLCGHKCENTLGSYLCSCSVGFRLSVDGRSCEDINECSSSPCSQECANVYGSYQCYCRRGYQLSDVDGVTCEDIDECALPTGGHICSYRCINIPGSFQCSCPSSGYRLAPNGRNCQDIDECVTGIHNCSINETCFNIQGGFRCLAFECPENYRRSAAT

SEQ ID NO: 122860 - protein, 721 aa, Artificial Sequence
  derived and/or modified sequence
MERAAPSRRVPLPLLLLGGLALLAAGVDADVLLEACCADGHRMATHQKDCSLPYATESKECRAVGLASLCQDLNGAWAVWKVGRASQAEGTASARAQRRGMVQEQCCHSQLEELHCATGISLANEQDRCATPHGDNASLEATFVKRCCHCCLLGRAAQAQGQSCEYSLMVGYQCGQVFQACCVKSQETGDLDVGGLQETDKIIEVEEEQEDPYLNDRCRGGGPCKQQCRDTGDEVVCSCFVGYQLLSDGVSCEDVNECITGSHSCRLGESCINTVGSFRCQRDSSCGTGYELTEDNSCKDIDECESGIHNCLPDFICQNTLGSFRCRPKLQCKSGFIQDALGNCIDINECLSISAPCPIGHTCINTEGSYTCQKNVPNCGRGYHLNEEGTRCVDVDECAPPAEPCGKGHRCVNSPGSFRCECKTGYYFDGISRMCVDVNECQRYPGRLCGHKCENTLGSYLCSCSVGFRLSVDGRSCEDINECSSSPCSQECANVYGSYQCYCRRGYQLSDVDGVTCEDIDECALPTGGHICSYRCINIPGSFQCSCPSSGYRLAPNGRNCQDIDECVTGIHNCSINETCFNIQGGFRCLAFECPENYRRSAATRCERLPCHENRECSKLPLRITYYHLSFPTNIQAPAVVFRMGPSSAVPGDSMQLAITGGNEEGFFTTRKVSPHSGVVALTKPVPEPRDLLLTVKMDLSRHGTVSSFVAKLFIFVSAEL

SEQ ID NO: 122861 - protein, 189 aa, Artificial Sequence
  derived and/or modified sequence
MNSYTRGSRRPSAKAASPAASVTSRVSPSGPGVPVDADVLLEACCADGHRMATHQKDCSLPYATESKECRMVQEQCCHSQLEELHCATGISLANEQDRCATPHGDNASLEATFVKRCCHCCLLGRAAQAQGQSCEYSLMVGYQCGQVFQACCVKSQETGDLDVGGLQETDKIIEVEEEQEDPYLNDRCR

SEQ ID NO: 122862 - protein, 26 aa, Artificial Sequence
  derived and/or modified sequence
MATHQKDCSLPYATESKECRMVQEQC

SEQ ID NO: 122863 - protein, 65 aa, Artificial Sequence
  derived and/or modified sequence
MATHQKDCSLPYATESKECRMVQEQCCHSQLEELHCATGISLANEQDRCATPHGDNASLEATFVK

SEQ ID NO: 122864 - DNA, 2251 bp, Artificial Sequence
  derived and/or modified sequence
gttggctgccgaggctcggccggagcgtggagcccgcgccgctgccccaggaccgcgcccgcgcctttgtccgccgccgcccaccgcccgtcgcccgccgcccatggagcgcgccgcgccgtcgcgccgggtcccgcttccgctgctgctgctcggcggccttgcgctgctggcggccggagtggacgcggatgtcctcctggaggcctgctgtgcggacggacaccggatggccactcatcagaaggactgctcgctgccatatgctacggaatccaaagaatgcaggatggtgcaggagcagtgctgccacagccagctggaggagctgcactgtgccacgggcatcagcctggccaacgagcaggaccgctgtgccacgccccacggtgacaacgccagcctggaggccacatttgtgaagaggtgctgccattgctgtctgctggggagggcggcccaggcccagggccagagctgcgagtacagcctcatggttggctaccagtgtggacaggtcttccaggcatgctgtgtcaagagccaggagaccggagatttggatgtcgggggcctccaagaaacggataagatcattgaggttgaggaggaacaagaggacccatatctgaatgaccgctgccgaggaggcgggccctgcaagcagcagtgccgagacacgggtgacgaggtggtctgctcctgcttcgtgggctaccagctgctgtctgatggtgtctcctgtgaagatgtcaatgaatgcatcacgggcagccacagctgccggcttggagaatcctgcatcaacacagtgggctctttccgctgccagcgggacagcagctgcgggactggctatgagctcacagaggacaatagctgcaaagatattgacgagtgtgagagtggtattcataactgcctccccgattttatctgtcagaatactctgggatccttccgctgccgacccaagctacagtgcaagagtggctttatacaagatgctctaggcaactgtattgatatcaatgagtgtttgagtatcagtgccccgtgccctatcgggcatacatgcatcaacacagagggctcctacacgtgccagaagaacgtgcccaactgtggccgtggctaccatctcaacgaggagggaacgcgctgtgttgatgtggacgagtgcgcgccacctgctgagccctgtgggaagggacatcgctgcgtgaactctcccggcagtttccgctgcgaatgcaagacgggttactattttgacggcatcagcaggatgtgtgtcgatgtcaacgagtgccagcgctaccccgggcgcctgtgtggccacaagtgcgagaacacgctgggctcctacctctgcagctgttccgtgggcttccggctctctgtggatggcaggtcatgtgaagacatcaatgagtgcagcagcagcccctgtagccaggagtgtgccaacgtctacggctcctaccagtgttactgccggcgaggctaccagctcagcgatgtggatggagtcacctgtgaagacatcgacgagtgcgccctgcccaccgggggccacatctgctcctaccgctgcatcaacatccctggaagcttccagtgcagctgcccctcgtctggctacaggctggcccccaatggccgcaactgccaagacattgatgagtgtgtgactggcatccacaactgctccatcaacgagacctgcttcaacatccagggcggcttccgctgcctggccttcgagtgccctgagaactaccgccgctccgcagccacccgctgtgagcgcttgccttgccatgagaatcgggagtgctccaagctgcctctgagaataacctactaccacctctctttccccaccaacatccaagcgcccgcggtggttttccgcatgggcccctccagtgctgtccccggggacagcatgcagctggccatcaccggcggcaatgaggagggctttttcaccacccggaaggtgagcccccacagtggggtggtggccctcaccaagcctgtccccgagcccagggacttgctcctgaccgtcaagatggatctctctcgccacggcaccgtcagctcctttgtggccaagcttttcatctttgtgtctgcagagctctgagcactcgcttcgcgtcgcggggtctccctcctgttgctttcctaaccctgccctccggggcgttaataaagtcttagcaagcgtcccacacagtga

SEQ ID NO: 122865 - DNA, 2355 bp, Artificial Sequence
  derived and/or modified sequence
gttggctgccgaggctcggccggagcgtggagcccgcgccgctgccccaggaccgcgcccgcgcctttgtccgccgccgcccaccgcccgtcgcccgccgcccatggagcgcgccgcgccgtcgcgccgggtcccgcttccgctgctgctgctcggcggccttgcgctgctggcggccggagtggacgcggatgtcctcctggaggcctgctgtgcggacggacaccggatggccactcatcagaaggactgctcgctgccatatgctacggaatccaaagaatgcagagccgtggggttggcctcactgtgccaggacctgaatggggcgtgggcagtatggaaagtgggaagagcatcccaggccgagggaacagccagcgcaagagcccagaggagagggatggtgcaggagcagtgctgccacagccagctggaggagctgcactgtgccacgggcatcagcctggccaacgagcaggaccgctgtgccacgccccacggtgacaacgccagcctggaggccacatttgtgaagaggtgctgccattgctgtctgctggggagggcggcccaggcccagggccagagctgcgagtacagcctcatggttggctaccagtgtggacaggtcttccaggcatgctgtgtcaagagccaggagaccggagatttggatgtcgggggcctccaagaaacggataagatcattgaggttgaggaggaacaagaggacccatatctgaatgaccgctgccgaggaggcgggccctgcaagcagcagtgccgagacacgggtgacgaggtggtctgctcctgcttcgtgggctaccagctgctgtctgatggtgtctcctgtgaagatgtcaatgaatgcatcacgggcagccacagctgccggcttggagaatcctgcatcaacacagtgggctctttccgctgccagcgggacagcagctgcgggactggctatgagctcacagaggacaatagctgcaaagatattgacgagtgtgagagtggtattcataactgcctccccgattttatctgtcagaatactctgggatccttccgctgccgacccaagctacagtgcaagagtggctttatacaagatgctctaggcaactgtattgatatcaatgagtgtttgagtatcagtgccccgtgccctatcgggcatacatgcatcaacacagagggctcctacacgtgccagaagaacgtgcccaactgtggccgtggctaccatctcaacgaggagggaacgcgctgtgttgatgtggacgagtgcgcgccacctgctgagccctgtgggaagggacatcgctgcgtgaactctcccggcagtttccgctgcgaatgcaagacgggttactattttgacggcatcagcaggatgtgtgtcgatgtcaacgagtgccagcgctaccccgggcgcctgtgtggccacaagtgcgagaacacgctgggctcctacctctgcagctgttccgtgggcttccggctctctgtggatggcaggtcatgtgaagacatcaatgagtgcagcagcagcccctgtagccaggagtgtgccaacgtctacggctcctaccagtgttactgccggcgaggctaccagctcagcgatgtggatggagtcacctgtgaagacatcgacgagtgcgccctgcccaccgggggccacatctgctcctaccgctgcatcaacatccctggaagcttccagtgcagctgcccctcgtctggctacaggctggcccccaatggccgcaactgccaagacattgatgagtgtgtgactggcatccacaactgctccatcaacgagacctgcttcaacatccagggcggcttccgctgcctggccttcgagtgccctgagaactaccgccgctccgcagccacccgctgtgagcgcttgccttgccatgagaatcgggagtgctccaagctgcctctgagaataacctactaccacctctctttccccaccaacatccaagcgcccgcggtggttttccgcatgggcccctccagtgctgtccccggggacagcatgcagctggccatcaccggcggcaatgaggagggctttttcaccacccggaaggtgagcccccacagtggggtggtggccctcaccaagcctgtccccgagcccagggacttgctcctgaccgtcaagatggatctctctcgccacggcaccgtcagctcctttgtggccaagcttttcatctttgtgtctgcagagctctgagcactcgcttcgcgtcgcggggtctccctcctgttgctttcctaaccctgccctccggggcgttaataaagtcttagcaagcgtcc

SEQ ID NO: 122866 - DNA, 2052 bp, Artificial Sequence
  derived and/or modified sequence
atggagcgcgccgccccttccagacgggtgccattgcccttactcttacttggaggcctggccttgctggctgccggagtcgacgccgacgtgctgctggaggcctgttgtgcagacggtcaccggatggcgacgcaccagaaggactgctcattgccctatgccaccgagtctaaagagtgccggatggtacaggagcagtgctgccatagccagctggaggagctccactgtgccacagggatatccctcgccaacgagcaggataggtgcgccacgccacacggcgacaatgcaagcctggaggcaacctttgtaaaacggtgttgtcactgctgcctgctcggtcgggctgcacaggcgcaggggcagagttgtgaatacagcctgatggtaggatatcagtgcggccaggtgtttcaggcctgctgcgtgaaatcccaagaaacgggtgatcttgacgtcggaggcctgcaagaaactgacaagatcatcgaagtggaggaggagcaggaggacccctaccttaatgaccggtgtcgagggggcggtccttgcaaacagcagtgcagagacacaggcgatgaggtggtgtgttcatgtttcgtagggtaccaactactgtccgatggtgtgtcatgtgaagacgtgaacgagtgcataacaggcagtcacagctgcagactcggggaaagctgcattaacacagtcggctcattcaggtgccagagagatagctcctgtggcaccgggtatgagctgacggaggacaacagctgtaaagacatcgacgagtgcgagagtgggattcacaactgtctccctgattttatttgccagaataccctgggctccttcaggtgtagacctaaactgcagtgtaagtctgggttcatccaagatgctttaggcaattgcatagatatcaatgagtgcttgagtattagtgctccctgccccatcggacatacatgtattaatacagaaggctcatacacatgtcagaagaacgtgcctaattgtgggcggggctatcatctgaatgaggaggggacccgctgcgtggacgtcgatgagtgtgcccccccagcggaaccatgcggaaaaggccaccgttgcgtcaactcaccagggtctttccggtgcgagtgcaaaacaggctattactttgacggtatatcccgaatgtgcgttgatgtgaacgaatgccagaggtatcctgggcggttgtgcggacataaatgcgagaatacactggggagctacctctgctcgtgcagcgtgggttttcggttatctgtcgacggtcgatcctgtgaagatattaacgaatgctccagttccccatgttctcaggaatgtgccaacgtgtatggtagctaccagtgttattgccggcgcggctaccagctgagtgatgtggacggtgttacatgcgaggacatcgacgagtgcgcactccctacaggcggccacatttgcagctaccgttgtatcaatatccccggctcctttcagtgcagctgtccgagcagcggctaccgtctggcaccaaatgggcgtaactgtcaggacatcgacgagtgtgttacgggcattcataattgctccataaacgaaacctgtttcaatatacaaggggggtttcggtgtcttgcgttcgaatgccccgagaactataggaggtcagcagcgacaaggtgcgagaggctgccctgccacgaaaacagggagtgttcgaagctgccactcagaatcacctattatcacctcagcttccccacaaatatacaggcccctgcagtcgtgtttagaatgggaccctcatctgccgttccaggcgattctatgcagttggcgatcacgggaggcaatgaagaggggttctttacaacacgcaaggtcagtccccatagcggggtggtggcattgaccaaacctgtgcctgaaccgcgggacctgctgctgactgtgaaaatggatctgagtcgccacggtactgtgagttcctttgtggccaagttgtttatctttgtgagcgctgaactgtag

SEQ ID NO: 122867 - DNA, 2166 bp, Artificial Sequence
  derived and/or modified sequence
atggaaagggctgctcctagcaggcgcgtccctcttccccttttgctgctgggtggattggcgctcctggcagcaggagtggacgcagatgtgctcctggaggcatgctgcgccgacggccatcggatggctacacatcagaaagactgctccttgccttacgccactgagagcaaagagtgccgggctgtcggactcgcttctctctgccaggatttaaatggcgcatgggcagtctggaaggtcggtcgagcatcacaggctgagggtactgcctccgcaagagcccagcgtcggggtatggtgcaagaacagtgctgtcattcccagctggaggaactgcattgtgcaacaggaattagcttggctaatgaacaggacagatgtgcaacgccacacggtgataatgcatcacttgaggccacattcgtcaagcgttgttgccattgctgtctgttagggcgagcagcacaagcccagggacagagctgtgagtattcactcatggtaggctaccagtgtggccaggtttttcaggcctgttgcgtgaagagccaagagaccggtgatcttgatgttggggggctgcaagaaacggacaagatcatagaggtggaggaagaacaggaagacccgtatctaaatgataggtgtcgcggtggcggcccttgcaagcagcaatgccgtgataccggggatgaagttgtctgttcttgttttgtcggatatcagctcctgagtgacggagtaagttgtgaagacgtgaatgaatgtattactggaagtcattcatgtcgattgggagagagctgcatcaacactgtaggatctttccgctgccagcgagactcatcttgcggaactgggtacgagctgacagaggacaactcctgcaaagatatcgatgaatgcgagagtggtatccataattgtctccctgactttatttgtcaaaatactttgggctcattccgctgcagacccaagttgcagtgcaagagcggatttattcaagatgccctcggtaattgcatcgatatcaatgagtgtctgtcaatcagtgcaccttgtcctatagggcacacgtgtatcaataccgaggggtcctacacgtgccaaaagaatgtgcctaactgtggacgtggttatcatctgaatgaggaagggaccaggtgcgttgacgttgacgagtgcgcccctccggccgagccatgtgggaagggccacaggtgcgtcaatagtcctggctcctttaggtgtgagtgtaaaaccggctattacttcgacggcattagccgtatgtgcgttgatgtgaacgagtgtcagaggtatccgggacgtctgtgtgggcataagtgtgagaacacgctgggaagctacttatgtagctgcagcgtcggttttagactgtcagtagacggccgctcttgcgaagacatcaacgagtgtagttcatcaccttgttcacaggaatgcgctaacgtatatggctcttatcagtgctattgtcgcagagggtaccagctctcggatgtggatggtgtgacgtgcgaggatatagacgagtgcgcactgcccactgggggccatatatgcagttatagatgcatcaatatcccaggaagcttccagtgctcttgcccttcctccggatacagactcgcccccaatggaagaaactgccaagacatcgatgaatgcgttactgggatccacaactgttcaatcaacgaaacgtgtttcaacatccaaggcggttttaggtgtctggccttcgagtgtccagagaattaccggaggagtgccgcgacaagatgcgagaggcttccttgtcacgagaatcgggaatgctctaaattacctttaaggatcacatactatcacctctcgttccctacaaatattcaggcccctgccgtggtgtttcgaatggggccatcgagcgcggtcccgggggacagtatgcaactcgctatcacaggcgggaacgaggaggggttctttactaccaggaaggtatccccccatagcggcgtggtagctctgacgaagccagtgcccgagccacgggacctgcttctaacagtgaagatggatctgtcccggcacggtactgtgagctcattcgtggctaaactgtttatctttgtcagcgccgagctctag

SEQ ID NO: 122868 - DNA, 2052 bp, Artificial Sequence
  derived and/or modified sequence
atggagcgggccgcccccagccggcgggtgcccctgcccctgctgctgctgggcggcctggccctgctggccgccggcgtggatgctgatgtgctgctggaggcctgctgtgctgatggccacaggatggccacccaccagaaggactgcagcctgccctatgccacagagagcaaggagtgcaggatggtgcaggagcagtgctgccacagccagctggaggagctgcactgtgccaccggcatcagcctggccaatgagcaggacagatgtgccacccctcatggagacaatgccagcctggaggccacctttgtgaagcgctgctgccactgctgcctgctgggccgggccgcccaggcccagggccagagctgtgagtacagcctgatggtgggctaccagtgtggccaggtgttccaggcctgctgcgtgaagagccaggagaccggggacctggatgtgggcggcctgcaggagacagacaagatcatcgaggtggaggaggagcaggaggacccctacctgaatgaccgctgccggggcggcggcccctgcaagcagcagtgccgggacacaggagatgaggtggtgtgcagctgctttgtgggctaccagctgctgagtgatggagtgtcctgtgaagatgtgaatgaatgcatcaccggcagccacagctgccgcctgggggagagctgcatcaacacagtgggcagcttccgctgccagagggacagcagctgtggcaccggctatgagctgacagaggacaacagctgcaaggacattgatgaatgtgagagcggcatccacaactgcctgcctgacttcatctgccagaacaccctgggcagcttccgctgccggcccaagctgcagtgcaagagcggcttcatccaggatgccctgggcaactgcatcgacatcaatgaatgtctgagcatcagcgccccctgccccatcggccacacctgcatcaacacagagggcagctacacctgccagaagaatgtgcccaactgtggccggggctaccacctgaatgaggagggcacccgctgtgtggatgtggatgaatgtgcccccccagctgagccctgtgggaagggccaccgctgtgtgaacagccctggcagcttccgctgtgagtgcaagacaggctactactttgatggcatcagcaggatgtgtgtggatgtgaatgaatgccagcgctacccaggccgcctgtgtggccacaagtgtgagaacaccctgggcagctacctgtgcagctgcagcgtgggcttccggctgtctgtggatggccgcagctgtgaggacatcaatgaatgtagcagcagcccctgcagccaggagtgtgccaacgtgtatggcagctaccagtgctactgccggcggggctaccagctgagtgatgtggatggagtgacctgtgaggacattgatgaatgtgccctgcccactggaggccacatctgcagctaccgctgcatcaacatccctggcagcttccagtgcagctgccccagcagcggctaccgcctggccccaaatggaagaaactgccaggacattgatgaatgtgtgacaggcatccacaactgcagcatcaatgagacctgcttcaacatccagggcggcttccgctgcctggcctttgaatgtcctgagaactacagaagatctgctgccacccgctgtgagcggctgccctgccatgaaaatcgggagtgcagcaagctgcccctgcgcatcacctactaccacctgtccttccccaccaacatccaggccccagctgtggtgttcaggatgggccccagcagcgctgtgcctggggacagcatgcagctggccatcaccggcggcaatgaggagggcttcttcaccaccaggaaggtgagcccccacagcggcgtggtggccctgaccaagcctgtgcctgagccccgggacctgctgctgactgtgaagatggacctgagcagacatggaacagtgagcagctttgtggccaagctgttcatctttgtgtctgctgagctgtag

SEQ ID NO: 122869 - DNA, 2166 bp, Artificial Sequence
  derived and/or modified sequence
atggagcgggccgcccccagccggcgggtgcccctgcccctgctgctgctgggcggcctggccctgctggccgccggcgtggatgctgatgtgctgctggaggcctgctgtgctgatggccacaggatggccacccaccagaaggactgcagcctgccctatgccacagagagcaaggagtgcagagctgtgggcctggccagcctgtgccaggacctgaatggagcctgggccgtgtggaaggtgggccgggccagccaggccgagggcacagccagcgcccgggcccagaggcggggcatggtgcaggagcagtgctgccacagccagctggaggagctgcactgtgccaccggcatcagcctggccaatgagcaggacagatgtgccacccctcatggagacaatgccagcctggaggccacctttgtgaagcgctgctgccactgctgcctgctgggccgggccgcccaggcccagggccagagctgtgagtacagcctgatggtgggctaccagtgtggccaggtgttccaggcctgctgcgtgaagagccaggagaccggggacctggatgtgggcggcctgcaggagacagacaagatcatcgaggtggaggaggagcaggaggacccctacctgaatgaccgctgccggggcggcggcccctgcaagcagcagtgccgggacacaggagatgaggtggtgtgcagctgctttgtgggctaccagctgctgagtgatggagtgtcctgtgaagatgtgaatgaatgcatcaccggcagccacagctgccgcctgggggagagctgcatcaacacagtgggcagcttccgctgccagagggacagcagctgtggcaccggctatgagctgacagaggacaacagctgcaaggacattgatgaatgtgagagcggcatccacaactgcctgcctgacttcatctgccagaacaccctgggcagcttccgctgccggcccaagctgcagtgcaagagcggcttcatccaggatgccctgggcaactgcatcgacatcaatgaatgtctgagcatcagcgccccctgccccatcggccacacctgcatcaacacagagggcagctacacctgccagaagaatgtgcccaactgtggccggggctaccacctgaatgaggagggcacccgctgtgtggatgtggatgaatgtgcccccccagctgagccctgtgggaagggccaccgctgtgtgaacagccctggcagcttccgctgtgagtgcaagacaggctactactttgatggcatcagcaggatgtgtgtggatgtgaatgaatgccagcgctacccaggccgcctgtgtggccacaagtgtgagaacaccctgggcagctacctgtgcagctgcagcgtgggcttccggctgtctgtggatggccgcagctgtgaggacatcaatgaatgtagcagcagcccctgcagccaggagtgtgccaacgtgtatggcagctaccagtgctactgccggcggggctaccagctgagtgatgtggatggagtgacctgtgaggacattgatgaatgtgccctgcccactggaggccacatctgcagctaccgctgcatcaacatccctggcagcttccagtgcagctgccccagcagcggctaccgcctggccccaaatggaagaaactgccaggacattgatgaatgtgtgacaggcatccacaactgcagcatcaatgagacctgcttcaacatccagggcggcttccgctgcctggcctttgaatgtcctgagaactacagaagatctgctgccacccgctgtgagcggctgccctgccatgaaaatcgggagtgcagcaagctgcccctgcgcatcacctactaccacctgtccttccccaccaacatccaggccccagctgtggtgttcaggatgggccccagcagcgctgtgcctggggacagcatgcagctggccatcaccggcggcaatgaggagggcttcttcaccaccaggaaggtgagcccccacagcggcgtggtggccctgaccaagcctgtgcctgagccccgggacctgctgctgactgtgaagatggacctgagcagacatggaacagtgagcagctttgtggccaagctgttcatctttgtgtctgctgagctgtag

SEQ ID NO: 122870 - DNA, 2052 bp, Artificial Sequence
  derived and/or modified sequence
atggagcgggccgcccccagccggcgggtgcccctgcccctgctgctgttaggaggtctggcactgttggctgcaggtgttgacgctgatgttctgctggaagcgtgctgtgcagatggccacagaatggctacccaccaaaaagactgctctctgccatatgcaacagaaagcaaggaatgtaggatggtgcaggaacagtgctgccactcccagctggaagaacttcactgcgccacaggtatttctctggctaatgaacaggatcggtgcgcaaccccacatggtgacaacgccagcctagaagctactttcgtgaagcggtgttgtcactgctgcttattggggagggccgctcaggctcagggacagtcttgtgagtattccttgatggtagggtatcagtgcgggcaagtgtttcaggcgtgctgcgtaaaatcacaggaaacaggtgacctggacgtgggggggttgcaagagaccgacaaaattatagaggtggaagaggagcaggaagacccatacctcaacgacaggtgccgcggggggggaccatgtaagcagcagtgcagagacacgggcgacgaggtggtgtgttcatgcttcgttggataccagctgctttccgatggcgtgtcttgtgaggatgtgaacgagtgtataaccggatctcatagctgcaggcttggcgagtcttgtatcaataccgttggttccttcaggtgtcagcgggactcttcatgtggaaccggatacgaattgacggaggataatagctgcaaagatatagacgagtgcgagagcggaattcataattgcttgcctgactttatctgtcagaacacgttgggctctttcaggtgccgtccaaagcttcagtgtaagtctggctttatccaggacgcgctggggaactgcattgacattaatgagtgcctttctatatcagcgccttgtcctattggtcatacctgcataaacacggaaggctcctatacatgtcaaaagaacgtgcctaattgtgggcgcggataccacctcaatgaggagggcacacggtgtgtggacgtagacgagtgcgccccacccgcagaaccgtgtgggaaaggccaccgatgtgtcaattcccctggttcctttagatgcgagtgcaagacagggtactattttgacggcataagtcggatgtgcgttgacgtaaacgaatgccaaagataccccggaaggctttgtggacacaagtgcgagaatactcttggctcatatctttgctcatgtagtgttgggtttaggctgtcagtagatggccggtcttgtgaggatattaatgagtgttctagttctccttgcagccaggaatgtgctaatgtatacggcagctatcagtgctactgcagaagagggtaccagctttcagatgtcgatggcgtcacctgtgaagatattgacgagtgcgcgctacccaccgggggacacatttgctcctaccgctgtattaatatcccgggctccttccaatgctcatgcccgagttcaggataccggctggcacctaacggaagaaattgtcaggacatagacgagtgcgtgaccggaatccacaattgcagcattaatgaaacctgttttaatatccagggaggattccgctgcctcgcctttgaatgtcctgagaactaccgcaggagcgcagcaacgagatgcgagcggctgccatgccacgaaaaccgcgaatgcagtaagttaccactccgcatcacgtactaccatctcagttttccaactaatatacaggctccagcagtggtttttagaatgggcccctcatcagcggtgcccggcgactcgatgcaattggccatcacaggaggcaatgaggagggctttttcactacccgcaaagtgagccctcacagcggcgtggtggcactcactaagcccgtgcctgagccgagagatctgctactgaccgttaagatggatctgagtcgccatggcacagtttccagtttcgtggctaagctgtttatttttgttagtgcagaactgtag

SEQ ID NO: 122871 - DNA, 2166 bp, Artificial Sequence
  derived and/or modified sequence
atggagcgggccgcccccagccggcgggtgcccctgcccctgctgctactggggggcctggcactgttagccgccggggtggacgctgacgttctgcttgaagcttgctgcgccgatggacataggatggccactcatcagaaagactgttctctgccctacgcgaccgaatccaaagagtgcagagcagtgggactcgcatccctgtgccaggatctgaacggcgcttgggctgtgtggaaggtcggccgggcatcacaggccgaggggacagcctctgcgagggcacaacgcagggggatggttcaggaacagtgttgtcacagccagctcgaggagcttcactgtgccaccggaatttccttagctaacgagcaggacaggtgcgccaccccccacggcgataatgcctccttggaagccacatttgttaagcggtgctgtcattgttgtttactgggaagggctgctcaggcacagggccagagttgtgaatacagtctgatggtcggctaccaatgcggccaagtgttccaggcgtgttgcgttaagagtcaagagaccggagatcttgacgtggggggcctgcaagagacggacaagatcatcgaagtcgaggaggagcaggaggacccatacttgaacgacaggtgccgcggtggcggaccttgtaaacagcagtgcagagataccggggacgaggtggtgtgtagctgcttcgtcggctatcaattgctctccgatggcgtcagctgcgaagacgtcaatgagtgtataaccggttcccatagttgtagactcggagaaagctgtatcaacacggttgggagcttccggtgtcagagggattcgtcatgcgggactggttacgagcttactgaggataattcctgtaaggatattgatgagtgcgaaagtggaattcataactgtctgccagattttatctgccagaacactctaggttcttttaggtgccggcccaaactgcaatgcaagagcgggtttatccaggacgctctgggcaattgtattgatatcaacgagtgcttaagtatatctgccccatgtcctattggccacacgtgcataaataccgagggtagttacacctgccagaagaacgtgcccaattgcggtcggggatatcaccttaacgaagaagggacgcgttgcgtcgacgtggatgaatgtgccccccctgcagaaccctgcggtaaaggccataggtgcgttaattctccaggatcctttcggtgtgagtgtaaaactggctactatttcgatgggatctcgagaatgtgcgtggatgttaacgaatgccagagatacccaggacgtttgtgtggacacaaatgtgaaaacactcttggcagttatttgtgtagctgttccgtgggatttagactgtccgtagatggcagatcttgtgaggatatcaacgaatgctcaagctccccatgctcccaggagtgtgccaacgtatacggttcttatcagtgttattgtcgccgaggctaccagctcagcgatgtggatggcgtcacatgtgaagacattgacgaatgcgccctccctaccgggggccacatctgttcgtacagatgcataaacatacccgggtcttttcagtgctcttgtcctagttccggataccgtctagccccgaacggccggaattgccaagacatcgacgagtgtgtcaccggcatccacaactgctctattaatgaaacctgtttcaacatccaaggaggattccgatgtctagccttcgaatgccccgaaaactatcgtagatcagccgcaacgagatgcgaacggttgccctgtcatgagaatcgagaatgcagtaaattacctctgagaattacctactatcacctcagctttcctacaaacatccaggcgcccgccgtggtgtttcggatggggccttcatctgcagtacccggggatagtatgcagttagccatcacaggggggaacgaggagggattttttacaacgcgtaaggtatcacctcattcaggagttgtggccctgaccaaaccagtgccagaaccccgagatctcctgctgacagttaaaatggacttgtcaagacacggtaccgtgagtagtttcgtggccaaactcttcatctttgtgtcagccgaactctag

SEQ ID NO: 122872 - DNA, 2052 bp, Artificial Sequence
  derived and/or modified sequence
atggaacgggctgcaccaagtcgaagagtccccctgcctctgctgttactcggcggtttggcccttctagcagctggggttgacgcggatgtgctacttgaggcctgttgcgctgacggccacagaatggcaactcaccagaaggactgttcattaccttacgctaccgaaagcaaggagtgtagaatggtgcaggaacagtgttgtcattctcagttggaggaactgcactgtgccacaggaatttccctggccaatgagcaggaccgctgtgcaactccacacggggataatgcctcactagaggctacattcgtgaaacgctgctgtcactgttgcctgcttggtagggccgcacaggcccagggacagtcgtgcgaatactcactcatggtcgggtaccaatgcggccaagtgttccaagcatgttgtgtgaagtcccaggaaaccggcgatcttgacgtggggggactgcaagagaccgacaaaatcattgaagtggaggaagagcaggaggatccttacctgaacgacaggtgcagaggaggcggtccgtgcaagcagcagtgtagggacactggagacgaagtcgtctgttcttgcttcgtggggtaccagctgctgtctgatggtgtaagctgcgaggacgtcaatgaatgcattacgggtagccattcatgcagattgggagagtcctgcattaataccgtcggctcatttcgatgtcagagggacagctcttgcggcactggttatgaactgacagaggacaacagttgtaaggatattgatgagtgtgaatccggcattcacaattgtctgcctgacttcatttgccagaatacactgggatcattccggtgcaggccgaagctgcagtgtaagtccggtttcatccaagacgcactagggaattgcatagacattaacgaatgcctctcaatcagtgcaccatgccctattggccacacgtgtatcaacacagagggctcctatacgtgtcagaaaaacgtgccaaattgcgggagaggctatcacctgaacgaggaagggaccaggtgtgtggatgttgacgagtgcgctccaccagctgagccctgcggtaagggacaccgatgcgtgaattctcccggaagttttcgctgtgaatgtaaaacaggctactatttcgatggcatttcaaggatgtgcgtagatgtgaacgagtgccagcgctaccccggtcggctctgtggtcataaatgcgaaaatactctaggctcctatctgtgcagctgttccgttggatttagactttctgtcgacgggaggagctgcgaggatattaacgagtgctccagctcaccttgttcgcaggagtgcgccaatgtgtatggctcgtaccaatgttattgtcgtcggggataccagctctctgacgtggatggagtgacatgtgaagacatcgatgagtgtgcccttcctaccggcggacatatatgtagctatcggtgtattaacattccgggatcattccagtgtagctgtcctagctctggataccgactcgctcccaatggcagaaattgccaggacatcgatgaatgtgtgactgggatccacaactgcagcatcaatgaaacctgctttaacatacagggcggatttcggtgtctggcattcgaatgccccgagaactaccggaggtccgccgcaacacgctgcgagagactgccatgccacgagaatagagagtgctctaaactacctctgcgaattacttactaccatctgtcttttccaactaacatccaggcgccagccgtggtctttcggatgggacccagcagcgccgtaccaggtgactctatgcagctggccattactgggggaaacgaagagggattcttcaccacccgtaaggtcagtccgcacagcggcgtggtcgccctgaccaagcccgttcctgagccacgagatttattgctcacagtaaagatggatctttctaggcacgggacagtttcttcctttgtggccaaattatttatcttcgtgtccgctgaactctag

SEQ ID NO: 122873 - DNA, 2166 bp, Artificial Sequence
  derived and/or modified sequence
atggagcgggctgcccctagtcgccgagtgcctctccccctcctgttgttggggggtctggcattacttgcagccggtgttgacgccgacgtgctgctggaggcttgttgcgcagatgggcaccggatggccacacatcaaaaggattgttctctgccgtacgccacagaaagtaaggaatgtagggctgtggggctggcatctctgtgtcaggacctgaatggagcctgggcagtatggaaagttggcagagcctctcaagctgaaggaaccgcttcagcgagggctcagagaagaggcatggtacaggaacagtgttgccatagccagctcgaagagctgcactgcgcaactggtatctcattggcaaacgagcaagaccggtgtgcaacccctcatggcgacaatgctagcttagaagctacgttcgtgaaacgatgttgtcattgctgtctgttgggcagagcggctcaggcgcaggggcagtcatgcgaatattcactcatggttggctaccagtgtggtcaggtgttccaggcatgttgcgttaaaagtcaggagactggggacctggacgtcggaggactgcaggagaccgacaagatcattgaggtcgaagaagaacaggaggacccctatttaaacgatagatgccgtgggggaggcccatgcaagcagcaatgcagagatactggcgatgaggtggtgtgtagctgcttcgtcggataccagcttctgtcagacggagtgagctgcgaggacgtaaacgaatgcatcactggttcacacagctgtcggctgggggagtcttgtatcaatacagtcgggtcttttcgatgtcagcgtgacagctcatgcggcaccggatacgagcttacagaggataacagctgcaaagacatcgacgagtgtgaatccggcatacacaattgtctccccgacttcatctgtcagaacacactcggaagcttcagatgtaggccgaagttgcagtgtaagagcggctttattcaggacgccctgggcaactgcatcgatatcaatgaatgtctatctatttcagcgccatgtcctatcgggcacacttgtatcaacactgagggaagctacacatgccagaagaatgtgcctaactgcgggagaggctaccatctgaacgaagagggcacacggtgcgtggatgtggacgagtgcgcacctccagcagagccctgtggaaaaggacacaggtgcgtgaacagcccgggaagcttcaggtgcgagtgcaagacaggttactactttgacggaatctcccgtatgtgtgtggatgtaaacgaatgtcagaggtatcctgggaggctgtgcggccataagtgcgaaaatacattggggagctatctgtgctcatgttctgtgggtttcaggctctccgttgatgggcgatcctgtgaagacattaacgagtgttccagcagtccttgctcgcaggaatgcgcgaacgtgtacgggtcctaccagtgctattgcaggagagggtatcagcttagtgacgtggatggtgtcacttgcgaggacatcgatgagtgtgccctacctacaggtggccatatttgttcttacaggtgtatcaatatacctgggtcctttcagtgctcatgtccatctagtggatacagactggcgcctaatgggaggaactgccaagacattgatgagtgcgtgacgggcattcacaactgcagtattaatgagacgtgctttaatattcaagggggatttagatgtctcgcttttgagtgtcccgaaaactaccggagatcggccgctacacggtgcgagcgcctcccttgtcatgaaaaccgggagtgttctaaacttccactgcggattacttattatcaccttagcttccccaccaacatccaggcacctgccgtcgtgtttcggatgggcccatcaagcgctgtccctggcgacagcatgcagctcgctattaccggaggcaacgaggagggattttttaccacccggaaagttagcccccacagtggtgtggtggccctcactaagcctgtgcccgagcccagagatctgctactgacggtcaagatggacctctcgagacatggaacggtgagctcttttgtggctaagctgtttatatttgtttccgctgaactctag

SEQ ID NO: 122874 - DNA, 2052 bp, Artificial Sequence
  derived and/or modified sequence
atggagagagccgcgccttcccgccgtgtgcccctacccctcctcctgcttggagggctcgctctgctagcggccggagtagacgcagatgtactgctcgaggcctgttgtgccgacggccataggatggctacgcatcagaaagactgctccctcccctacgcaaccgagagtaaagagtgtcgaatggtgcaggaacaatgctgccacagccagctcgaagagctccactgtgctactggaatctccctggcaaatgagcaggataggtgcgcgacgcctcacggagacaatgctagcttagaggccactttcgtaaagaggtgttgccactgttgcttgttgggcagagctgcacaggcacaagggcagagctgtgagtatagtctgatggtaggataccagtgtgggcaggtgttccaggcctgttgtgtgaagagtcaggaaacaggagatctggatgtcgggggcctgcaggaaacggataaaatcatagaagtggaggaagaacaagaagatccatacctcaacgatagatgtaggggtggcggtccctgcaagcaacaatgtagagacactggggacgaggtggtgtgcagctgctttgtgggctaccagctactgtccgacggcgtcagttgtgaggacgtgaatgagtgcattacaggctctcactcatgtcggttaggtgagtcctgcattaacaccgtgggtagttttaggtgtcaaagagattcaagctgcggcactggttatgaattaacggaagacaactcttgtaaggacattgacgagtgtgagagcggaatccataactgcttgcccgacttcatctgccagaataccctaggctccttccggtgtcgcccaaagctgcagtgcaaatctggctttatccaagatgcattagggaattgcattgacataaatgagtgccttagcatatcagccccgtgccccatcggtcatacatgtatcaatacggagggaagctacacatgccagaaaaacgtgcctaactgtggtcggggatatcacttgaatgaagaaggtacacgctgtgtcgacgtggatgaatgcgcccccccagccgaaccttgtgggaaaggccataggtgtgtcaactctcctgggtccttcagatgcgagtgcaaaaccggatattacttcgatggcatttccagaatgtgcgttgatgtcaatgagtgtcagcgttaccccggaaggctttgcggacacaaatgcgagaacacgctgggctcatatctgtgttcctgctctgttggttttaggctaagcgtggacggtcgatcttgcgaggacattaacgaatgttcctctagtccttgctctcaggagtgtgccaacgtttacggttcttaccagtgttattgtcgtcgaggataccagctgtctgatgtggatggtgttacatgcgaggatatagacgagtgcgcattgcccaccggcggacacatctgcagttacagatgcatcaacatccccggatcatttcaatgctcttgtccatcttccggctacagactggccccaaatggcagaaactgccaggatatagatgagtgtgtgacaggtatccataattgctctatcaacgagacatgcttcaacatacagggaggctttaggtgtctggcctttgaatgccctgagaactatcgacgatccgctgcaacacgatgcgaaaggctgccttgtcacgaaaatagagaatgctccaaactgccgctcagaatcacatactaccatctcagttttcccactaacatacaggcccccgccgttgtgtttcggatgggccctagcagtgctgtgccgggcgattctatgcaactcgctatcactggtggaaacgaagagggattctttacaactaggaaggtttcaccccacagcggcgtggtggcactcacaaagcccgtcccagaacctcgcgatctacttcttaccgtgaaaatggacttgagccgacatggaacagtcagttctttcgtggcaaaactgtttatctttgtctctgccgaactctag

SEQ ID NO: 122875 - DNA, 2166 bp, Artificial Sequence
  derived and/or modified sequence
atggagcgcgcagccccatctaggcgtgtccctctgccccttcttctgctcgggggtttggcactcttggccgctggagtcgatgctgacgtcctgctcgaggcatgctgcgcagacgggcatcggatggctacacatcaaaaagattgttccctcccttatgcaacagaatctaaagaatgcagggctgtgggactggcctcactatgccaagacttaaacggggcatgggcggtgtggaaggtcggccgtgcatcacaggcagaaggaactgccagtgctagagcacagagacggggcatggttcaagagcaatgttgtcattcgcagctggaggagttgcattgcgctactggaatctccctcgccaacgaacaggatcggtgtgcaacaccacatggggataatgcaagtctcgaagccacctttgtcaagcgatgttgtcactgctgtctgctcggtcgagcggcacaggctcaaggtcagtcatgcgaatattccctcatggttggatatcagtgcgggcaggtttttcaagcatgttgtgttaagtcccaagagaccggtgacctggacgtcgggggtctgcaagagactgacaagatcatagaggtggaggaggagcaggaggacccgtatctgaacgatcggtgccgcggcgggggtccgtgcaaacagcaatgccgcgacaccggggatgaagtagtgtgctcctgttttgttgggtaccagctgctgtcagacggcgtgtcctgcgaagacgtcaatgaatgtattacagggtcccactcctgtcgactgggagagtcgtgtatcaatacggttggttccttcaggtgtcaacgagacagctcttgcggcactgggtacgagctgaccgaggacaattcatgtaaggatattgatgagtgcgagagcgggattcacaattgtctccctgacttcatatgccagaacacgttgggcagtttccggtgcaggccaaagctgcagtgcaaaagtggattcatccaggatgccctcggcaattgtatcgacatcaacgaatgcctgtccatcagcgctccctgccccattggtcacacgtgtatcaataccgaaggttcatacacatgccagaagaatgttcccaactgtggtcggggctaccacctcaatgaggaggggacccgttgcgtcgatgtggatgaatgcgccccccctgccgaaccctgcggaaagggccaccgctgcgtcaactcacccggcagctttcggtgcgaatgtaagacgggctattacttcgatggaattagtaggatgtgcgtggatgtgaacgagtgtcagcgctatcccggtcggctgtgtggtcacaaatgtgaaaacacgctaggctcctacctttgcagctgtagcgtcggttttcggctgtcagtggacggtaggtcatgtgaggacatcaacgaatgtagctcttcaccctgttctcaggagtgcgcaaacgtttatgggtcttaccagtgctattgccggagagggtaccagctgtcagacgtcgacggggtgacatgtgaggacatagacgagtgcgccctaccaaccgggggacacatatgcagttaccggtgtataaatatccctggaagtttccaatgcagttgcccttcaagcggctacagactggcaccaaatggcaggaactgtcaggatatcgacgaatgtgtgaccggaatacataactgctcaattaatgaaacttgtttcaacattcagggaggatttagatgcctcgccttcgaatgcccagagaactatcggcgaagcgctgcgaccaggtgtgaacggctcccttgtcatgagaaccgagaatgttcaaagctcccactgcggatcacctactaccacctgagttttccgactaatattcaggctccggcagtggtgttcagaatgggcccttcttctgccgtacccggagattccatgcagctggccatcacgggtggaaatgaggagggatttttcactacccggaaggtaagtccccactcaggagttgttgcgctaacgaagcctgtgcctgaaccacgggacctgctgttgactgtgaaaatggacttatccaggcatggaaccgtgagttcctttgtggccaaactgttcatctttgtttccgccgaattgtag

SEQ ID NO: 122876 - DNA, 2052 bp, Artificial Sequence
  derived and/or modified sequence
atggagcgagccgccccttcacgacgtgtacccctgcctttgttacttctaggcggattggcattacttgctgcaggagtggacgcagacgttctgttagaagcgtgttgcgcagatggtcacagaatggctacacaccagaaagactgttccttgccctacgcgaccgaatctaaggaatgtcgaatggttcaagaacaatgctgtcattctcagctggaagaactgcactgcgcaacaggcatttccctggcaaatgaacaggataggtgtgctacaccacacggcgacaacgcgtccctcgaggctacattcgtgaaacgatgctgtcactgctgtctgcttggcagagccgcccaagcacaaggacaaagttgtgaatactctctaatggtgggctaccaatgtggtcaggtgttccaagcatgttgcgtgaagtctcaggaaactggggacctggatgtggggggcctgcaggaaaccgacaaaatcattgaggtggaagaagagcaggaggatccctacctgaacgaccgttgccgtggtggtggcccttgcaagcaacaatgtcgagacactggcgacgaggtcgtatgttcgtgcttcgtaggatatcaactgctgagtgacggcgtcagctgcgaggacgtgaatgagtgtatcaccggctctcatagctgccgactgggcgagtcctgcatcaacacagtcggctcttttcgctgtcaacgcgactccagctgtggaacaggatacgaacttactgaggacaatagctgtaaagacatagatgaatgtgaatctggcattcacaactgtttacctgatttcatctgccaaaatactcttgggagtttccgatgtcggcccaagctgcaatgcaaatccggatttatacaggatgcattagggaattgcattgacataaatgagtgccttagcatatcagccccgtgccccatcggtcatacatgtatcaatacggagggaagctacacatgccagaaaaacgtgcctaactgtggtcggggatatcacttgaatgaagaaggtacacgctgtgtcgacgtggatgaatgcgcccccccagccgaaccttgtgggaaaggccataggtgtgtcaactctcctgggtccttcagatgcgagtgcaaaaccggatattacttcgatggcatttccagaatgtgcgttgatgtcaacgagtgtcaaagataccctgggcgcctatgtggacacaaatgcgagaacactctcggaagctacctctgttcttgctccgtgggctttaggttgtcagtggacggtcgatcatgtgaggatataaatgagtgttcttctagtccctgctcacaggaatgtgctaatgtttatggcagctaccagtgctactgcagacgagggtatcagctttctgatgtggacggcgttacgtgcgaagacattgacgaatgtgctctccccaccggtggacacatatgttcatatagatgtatcaacatccccggatcatttcaatgctcttgtccatcttccggctacagactggccccaaatggcagaaactgccaggatatagatgagtgtgtgacaggtatccataattgctctatcaacgagacatgcttcaacatacagggaggctttaggtgtctggcctttgaatgccctgagaactatcgacgatccgctgcaacacgatgcgaaaggctgccttgtcacgaaaatagagaatgctccaaactgccgctcagaatcacatactaccatctcagttttcccactaacatacaggcccccgccgttgtgtttcggatgggccctagcagtgctgtgccgggcgattctatgcaactcgctatcactggtggaaacgaagagggattctttacaactaggaaggtttcaccccacagcggcgtggtggcactcacaaagcccgtcccagaacctcgcgatctacttcttaccgtgaaaatggacttgagccgacatggaacagtcagttctttcgtggcaaaactgtttatctttgtctctgccgaactctag

SEQ ID NO: 122877 - DNA, 2166 bp, Artificial Sequence
  derived and/or modified sequence
atggaaagggctgcacctagcagacgagttcccttgcccctgctgctgctcggtggactggccctgcttgccgccggcgtcgatgctgatgtgctgctcgaggcttgctgtgctgatggccacagaatggccacacaccaaaaagactgttcactaccatacgccaccgagtctaaagagtgcagagcagtgggactcgcttcattgtgtcaggatttgaatggcgcatgggctgtgtggaaagttggtcgagcctcccaggccgagggcaccgcaagcgcgcgcgcccaaagacgaggtatggttcaagagcaatgttgtcattcgcagctggaggagttgcattgcgctactggaatctccctcgccaacgaacaggatcggtgtgcaacaccacatggggataatgcaagtctcgaagccacctttgtcaagcgatgttgtcactgctgtctgctcggtcgagcggcacaggctcaaggtcagtcatgcgaatattccctcatggttggatatcagtgcgggcaggtttttcaagcatgttgtgttaagtcccaagagaccggtgacctggacgtcgggggtctgcaagagactgacaagattatcgaagtggaggaagagcaggaggatccatatctcaatgacagatgtcggggcggtgggccatgtaagcagcagtgtcgtgatacaggtgacgaagtcgtttgctcctgtttcgttggttaccagctgctgagcgacggagtctcttgcgaagacgtaaacgagtgcattaccggatcccatagttgccgtctcggcgaaagttgcattaatacagtgggctcctttcggtgtcagcgggactctagctgcgggacaggatatgaattaaccgaggataacagctgtaaagatatcgacgagtgtgagtccggaattcacaactgtttgcctgatttcatctgtcagaatacgctgggctctttccgctgtcgccccaaactccagtgtaagtcaggctttattcaggatgccctcggcaactgcattgatattaacgaatgtttatccatatcagcgccttgtcccattggacacacatgtataaacaccgaagggagctatacctgtcagaagaacgtgcctaattgcggtcgcgggtaccatctcaacgaggaaggaacacggtgcgtggatgtagatgagtgtgctccgccggctgaaccgtgtggcaagggacataggtgtgttaacagcccaggatcttttagatgcgaatgcaaaaccggctattactttgacggaatctccagaatgtgtgtcgacgtcaacgaatgtcaaaggtacccagggaggctgtgtggacacaaatgcgaaaatacgctcggctcctacctgtgtagttgtagcgttgggtttcgactctcagttgacggcagaagttgtgaagatataaatgaatgcagttcatctccatgcagtcaggaatgcgctaatgtatacgggtcataccagtgctattgtcgaaggggataccagcttagcgacgtagatggcgtcacttgtgaagacattgacgaatgtgccttacccaccggcggccatatttgttcatatcggtgcattaacatcccagggtccttccagtgttcctgtcccagcagcggttacagactcgctcccaacggtagaaactgccaggacatcgatgaatgtgtaacaggaattcataactgcagcatcaacgaaacctgctttaacattcaaggcggctttaggtgtctggccttcgagtgccctgagaattatcgtcggagcgccgcaacccggtgtgaacgtttgccttgtcacgagaatcgcgaatgcagcaaactgccattgcgcatcacctattaccacctatctttcccaaccaatattcaggccccagcagtcgttttccggatgggcccatcgagtgcagttcccggagactcaatgcagctggcaattaccggaggtaacgaggaaggattttttactactagaaaagtgagccctcatagcggcgttgttgccttgacaaagcccgtaccagaacctcgcgatctcctactcaccgtcaagatggatctgtcacgacatggtacagtatcctcattcgtcgcaaagctcttcattttcgtgtctgctgaactctag

SEQ ID NO: 122878 - DNA, 2052 bp, Artificial Sequence
  derived and/or modified sequence
atggagagagccgcccccagcagaagagtgcccctgcccctgctgctgctgggcggcctggccctgctggccgccggcgtggacgccgacgtgctgctggaggcctgctgcgccgacggccacagaatggccacccaccagaaggactgcagcctgccctacgccaccgagagcaaggagtgcagaatggtgcaggagcagtgctgccacagccagctggaggagctgcactgcgccaccggcatcagcctggccaacgagcaggacagatgcgccaccccccacggcgacaacgccagcctggaggccaccttcgtgaagagatgctgccactgctgcctgctgggcagagccgcccaggcccagggccagagctgcgagtacagcctgatggtgggctaccagtgcggccaggtgttccaggcctgctgcgtgaagagccaggagaccggcgacctggacgtgggcggcctgcaggagaccgacaagatcatcgaggtggaggaggagcaggaggacccctacctgaacgacagatgcagaggcggcggcccctgcaagcagcagtgcagagacaccggcgacgaggtggtgtgcagctgcttcgtgggctaccagctgctgagcgacggcgtgagctgcgaggacgtgaacgagtgcatcaccggcagccacagctgcagactgggcgagagctgcatcaacaccgtgggcagcttcagatgccagagagacagcagctgcggcaccggctacgagctgaccgaggacaacagctgcaaggacatcgacgagtgcgagagcggcatccacaactgcctgcccgacttcatctgccagaacaccctgggcagcttcagatgcagacccaagctgcagtgcaagagcggcttcatccaggacgccctgggcaactgcatcgacatcaacgagtgcctgagcatcagcgccccctgccccatcggccacacctgcatcaacaccgagggcagctacacctgccagaagaacgtgcccaactgcggcagaggctaccacctgaacgaggagggcaccagatgcgtggacgtggacgagtgcgccccccccgccgagccctgcggcaagggccacagatgcgtgaacagccccggcagcttcagatgcgagtgcaagaccggctactacttcgacggcatcagcagaatgtgcgtggacgtgaacgagtgccagagataccccggcagactgtgcggccacaagtgcgagaacaccctgggcagctacctgtgcagctgcagcgtgggcttcagactgagcgtggacggcagaagctgcgaggacatcaacgagtgcagcagcagcccctgcagccaggagtgcgccaacgtgtacggcagctaccagtgctactgcagaagaggctaccagctgagcgacgtggacggcgtgacctgcgaggacatcgacgagtgcgccctgcccaccggcggccacatctgcagctacagatgcatcaacatccccggcagcttccagtgcagctgccccagcagcggctacagactggcccccaacggcagaaactgccaggacatcgacgagtgcgtgaccggcatccacaactgcagcatcaacgagacctgcttcaacatccagggcggcttcagatgcctggccttcgagtgccccgagaactacagaagaagcgccgccaccagatgcgagagactgccctgccacgagaacagagagtgcagcaagctgcccctgagaatcacctactaccacctgagcttccccaccaacatccaggcccccgccgtggtgttcagaatgggccccagcagcgccgtgcccggcgacagcatgcagctggccatcaccggcggcaacgaggagggcttcttcaccaccagaaaggtgagcccccacagcggcgtggtggccctgaccaagcccgtgcccgagcccagagacctgctgctgaccgtgaagatggacctgagcagacacggcaccgtgagcagcttcgtggccaagctgttcatcttcgtgagcgccgagctgtag

SEQ ID NO: 122879 - DNA, 2166 bp, Artificial Sequence
  derived and/or modified sequence
atggagagagccgcccccagcagaagagtgcccctgcccctgctgctgctgggcggcctggccctgctggccgccggcgtggacgccgacgtgctgctggaggcctgctgcgccgacggccacagaatggccacccaccagaaggactgcagcctgccctacgccaccgagagcaaggagtgcagagccgtgggcctggccagcctgtgccaggacctgaacggcgcctgggccgtgtggaaggtgggcagagccagccaggccgagggcaccgccagcgccagagcccagagaagaggcatggtgcaggagcagtgctgccacagccagctggaggagctgcactgcgccaccggcatcagcctggccaacgagcaggacagatgcgccaccccccacggcgacaacgccagcctggaggccaccttcgtgaagagatgctgccactgctgcctgctgggcagagccgcccaggcccagggccagagctgcgagtacagcctgatggtgggctaccagtgcggccaggtgttccaggcctgctgcgtgaagagccaggagaccggcgacctggacgtgggcggcctgcaggagaccgacaagatcatcgaggtggaggaggagcaggaggacccctacctgaacgacagatgcagaggcggcggcccctgcaagcagcagtgcagagacaccggcgacgaggtggtgtgcagctgcttcgtgggctaccagctgctgagcgacggcgtgagctgcgaggacgtgaacgagtgcatcaccggcagccacagctgcagactgggcgagagctgcatcaacaccgtgggcagcttcagatgccagagagacagcagctgcggcaccggctacgagctgaccgaggacaacagctgcaaggacatcgacgagtgcgagagcggcatccacaactgcctgcccgacttcatctgccagaacaccctgggcagcttcagatgcagacccaagctgcagtgcaagagcggcttcatccaggacgccctgggcaactgcatcgacatcaacgagtgcctgagcatcagcgccccctgccccatcggccacacctgcatcaacaccgagggcagctacacctgccagaagaacgtgcccaactgcggcagaggctaccacctgaacgaggagggcaccagatgcgtggacgtggacgagtgcgccccccccgccgagccctgcggcaagggccacagatgcgtgaacagccccggcagcttcagatgcgagtgcaagaccggctactacttcgacggcatcagcagaatgtgcgtggacgtgaacgagtgccagagataccccggcagactgtgcggccacaagtgcgagaacaccctgggcagctacctgtgcagctgcagcgtgggcttcagactgagcgtggacggcagaagctgcgaggacatcaacgagtgcagcagcagcccctgcagccaggagtgcgccaacgtgtacggcagctaccagtgctactgcagaagaggctaccagctgagcgacgtggacggcgtgacctgcgaggacatcgacgagtgcgccctgcccaccggcggccacatctgcagctacagatgcatcaacatccccggcagcttccagtgcagctgccccagcagcggctacagactggcccccaacggcagaaactgccaggacatcgacgagtgcgtgaccggcatccacaactgcagcatcaacgagacctgcttcaacatccagggcggcttcagatgcctggccttcgagtgccccgagaactacagaagaagcgccgccaccagatgcgagagactgccctgccacgagaacagagagtgcagcaagctgcccctgagaatcacctactaccacctgagcttccccaccaacatccaggcccccgccgtggtgttcagaatgggccccagcagcgccgtgcccggcgacagcatgcagctggccatcaccggcggcaacgaggagggcttcttcaccaccagaaaggtgagcccccacagcggcgtggtggccctgaccaagcccgtgcccgagcccagagacctgctgctgaccgtgaagatggacctgagcagacacggcaccgtgagcagcttcgtggccaagctgttcatcttcgtgagcgccgagctgtag

SEQ ID NO: 122880 - protein, 59 aa, Artificial Sequence [sequence omitted]

SEQ ID NO: 122881 - protein, 60 aa, Artificial Sequence
  derived and/or modified sequence
KVHGSLARAGKVRGRHQKVAKQDKKKKPRGRAHKRLQHNRRFVTAVVGFGKKRGPNSSEK

SEQ ID NO: 122882 - protein, 62 aa, Artificial Sequence
  derived and/or modified sequence
AKVHGSLARAGKVKSQTPKVEKTEKPKKPKGRAYKRLLYTRRFVNVTLVNGKRRMNPGPSVQ

SEQ ID NO: 122883 - protein, 18 aa, Artificial Sequence
  derived and/or modified sequence
KVHGSLARAGKVRGQTPK

SEQ ID NO: 122884 - protein, 18 aa, Artificial Sequence
  derived and/or modified sequence
KVAKQEKKKKKTGRAKRR

SEQ ID NO: 122885 - protein, 18 aa, Artificial Sequence
  derived and/or modified sequence
FVNVVPTFGKKKGPNANS

SEQ ID NO: 122886 - protein, 87 aa, Artificial Sequence
  derived and/or modified sequence
MQLFVRAQELHTFEVTGQETVAQIKAHVASLEGIAPEDQVVLLAGAPLEDEATLGQCGVEALTTLEVAGRMLGGGQTGEEEEEDRSG

SEQ ID NO: 122887 - protein, 75 aa, Artificial Sequence
  derived and/or modified sequence
MQLFVRAQELHTFEVTGQETVAQIKAHVASLEGIAPEDQVVLLAGAPLEDEATLGQCGVEALTTLEVAGRMLGGE

SEQ ID NO: 122888 - protein, 98 aa, Artificial Sequence
  derived and/or modified sequence
MQLFVRAQELHTFEVTGQETVAQIKALTTLEVAGRMLGGKVHGSLARAGKVRGQTPKVAKQEKKKKKTGRAKRRMQYNRRFVNVVPTFGKKKGPNANS

SEQ ID NO: 122889 - protein, 109 aa, Artificial Sequence
  derived and/or modified sequence
MQLFVRAQELHTFEVTGQETVAQIKAHVASLEGIAPEDQVVLLAGAPLEDEATLGQCGVEALTTLEVAGRMLGGKVHGSLARAGKVRGQTPKVAKQEKKKKKTGRAKRR

SEQ ID NO: 122890 - protein, 133 aa, Artificial Sequence
  derived and/or modified sequence
MQLFVRAQELHTFEVTGQETVAQIKAHVASLEGIAPEDQVVLLAGAPLEDEATLGQCGVEALTTLEVAGRMLGGKVHGSLARAGKVRGQTPKVAKQEKKKKKTGRAKRRMQYNRRFVNVVPTFGKKKGPNANS

SEQ ID NO: 122891 - DNA, 461 bp, Artificial Sequence
  derived and/or modified sequence
gacgcgccctcgcttcttcctctttctcgactccatcttcgcggtagctgggaccgccgttcagtcgccaatatgcagctctttgtccgcgcccaggagctacacaccttcgaggtgaccggccaggaaacggtcgcccagatcaaggctcatgtagcctcactggagggcattgccccggaagatcaagtcgtgctcctggcaggcgcgcccctggaggatgaggccactctgggccagtgcggggtggaggccctgactaccctggaagtagcaggccgcatgcttggaggtggccaaacaggagaagaagaagaagaagacaggtcgggctaagcggcggatgcagtacaaccggcgctttgtcaacgttgtgcccacctttggcaagaagaagggccccaatgccaactcttaagtcttttgtaattctggctttctctaataaaaaagccacttag

SEQ ID NO: 122892 - DNA, 533 bp, Artificial Sequence
  derived and/or modified sequence
gacacgcagcccacggtctgtactgacgcgccctcgcttcttcctctttctcgactccatcttcgcggtagctgggaccgccgttcagtcgccaatatgcagctctttgtccgcgcccaggagctacacaccttcgaggtgaccggccaggaaacggtcgcccagatcaaggctcatgtagcctcactggagggcattgccccggaagatcaagtcgtgctcctggcaggcgcgcccctggaggatgaggccactctgggccagtgcggggtggaggccctgactaccctggaagtagcaggccgcatgcttggaggtgagtgagagaggaatgttctttgaagtaccggtaagcgtctagtgagtgtggggtgcatagtcctgacagctgagtgtcacacctatggtaatagagtacttctcactgtcttcagttcagagtgattcttcctgtttacatccctcatgttgaacacagacgtccatgggagactgagccagagtgtagttgtatttcagtcacatcacgagat

SEQ ID NO: 122893 - DNA, 355 bp, Artificial Sequence
  derived and/or modified sequence
tcgccaatatgcagctctttgtccgcgcccaggagctacacaccttcgaggtgaccggccaggaaacggtcgcccagatcaaggccctgactaccctggaagtagcaggccgcatgcttggaggtaaagtccatggttccctggcccgtgctggaaaagtgagaggtcagactcctaaggtggccaaacaggagaagaagaagaagaagacaggtcgggctaagcggcggatgcagtacaaccggcgctttgtcaacgttgtgcccacctttggcaagaagaagggccccaatgccaactcttaagtcttttgtaattctggctttctctaataaaaaagccacttagttcagtc

SEQ ID NO: 122894 - DNA, 507 bp, Artificial Sequence
  derived and/or modified sequence
gcggtagctgggaccgccgttcaggtaagaatggggccttggctggatccgaagggcttgtagcaggttggctgcggggtcagaaggcgcggggggaaccgaagaacggggcctgctccgtggccctgctccagtccctatccgaactccttgggaggcctggccttccccactcgccaatatgcagctctttgtccgcgcccaggagctacacaccttcgaggtgaccggccaggaaacggtcgcccagatcaaggctcatgtagcctcactggagggcattgccccggaagatcaagtcgtgctcctggcaggcgcgcccctggaggatgaggccactctgggccagtgcggggtggaggccctgactaccctggaagtagcaggccgcatgcttggaggtaaagtccatggttccctggcccgtgctggaaaagtgagaggtcagactcctaaggtggccaaacaggagaagaagaagaagaagacaggtcgggctaagcggcg

SEQ ID NO: 122895 - DNA, 538 bp, Artificial Sequence
  derived and/or modified sequence
gcggtagctgggaccgccgttcaggtaagaatggggccttggctggatccgaagggcttgtagcaggttggctgcgggtcgccaatatgcagctctttgtccgcgcccaggagctacacaccttcgaggtgaccggccaggaaacggtcgcccagatcaaggctcatgtagcctcactggagggcattgccccggaagatcaagtcgtgctcctggcaggcgcgcccctggaggatgaggccactctgggccagtgcggggtggaggccctgactaccctggaagtagcaggccgcatgcttggaggtaaagtccatggttccctggcccgtgctggaaaagtgagaggtcagactcctaaggtggccaaacaggagaagaagaagaagaagacaggtcgggctaagcggcggatgcagtacaaccggcgctttgtcaacgttgtgcccacctttggcaagaagaagggccccaatgccaactcttaagtcttttgtaattctggctttctctaataaaaaagccacttagttcagtc

SEQ ID NO: 122896 - DNA, 1125 bp, Artificial Sequence
  derived and/or modified sequence
tcgcgatcgtttctggaccgctttccactcccaaatctcctttatcccagagcatttcttggcttctcttacaagccgtcttttctttactcagtcgccaatatgcagctctttgtccgcgcccaggagctacacaccttcgaggtgaccggccaggaaacggtcgcccagatcaaggctcatgtagcctcactggagggcattgccccggaagatcaagtcgtgctcctggcaggcgcgcccctggaggatgaggccactctgggccagtgcggggtggaggccctgactaccctggaagtagcaggccgcatgcttggaggtgagtgagagaggaatgttctttgaagtaccggtaagcgtctagtgagtgtggggtgcatagtcctgacagctgagtgtcacacctatggtaatagagtacttctcactgtcttcagttcagagtgattcttcctgtttacatccctcatgttgaacacagacgtccatgggagactgagccagagtgtagttgtatttcagtcacatcacgagatcctagtctggttatcagcttccacactaaaattaggtcagaccagggcccccaaagtgctctataaaattagaagctggaagatcctgaaatgaaacttaagatttcaaggtcaaatatctgcaactttgttctcattacctattgggcgcagcttctctttaaaggcttgaattgagaaaagaggggttctgctgggtggcaccttcttgctcttacctgctggtgccttcctttcccactacaggtaaagtccatggttccctggcccgtgctggaaaagtgagaggtcagactcctaaggtgagtgagagtattagtggtcatggtgttaggactttttttcctttcacagctaaaccaagtccctgggctcttactcggtttgccttctccctccctggagatgagcctgagggaagggatgctaggtgtggaagacaggaaccagggcctgattaaccttcccttctccaggtggccaaacaggagaagaagaagaagaagacaggtcgggctaagcggcggatgcagtacaaccggcgctttgtcaacgttgtgcccacctttggcaagaagaagggccc

SEQ ID NO: 122897 - DNA, 847 bp, Artificial Sequence
  derived and/or modified sequence
gagcctcacacccacgcgatgccctcagctcctcgctcagcgctctcaccaacagccgtagcccgcagccccgctggacaccggttctccatccccgcagcgtagcccggaacatggtagctgccatctttacctgctacgccagccttctgtgcgcgcaactgtctggtcccgccccgtcctgcgcgagctgcctgcccaggcaggttcgccggtgcgagcgtaaaggggcggagctaggactgccttgggcggtacaaatagcagggaaccgcgcggtcgctcagcagtgacgtgacacgcagcccacggtctgtactgacgcgccctcgcttcttcctctttctcgactccatcttcgcggtagctgggaccgccgttcagtcgccaatatgcagctctttgtccgcgcccaggagctacacaccttcgaggtgaccggccaggaaacggtcgcccagatcaaggctcatgtagcctcactggagggcattgccccggaagatcaagtcgtgctcctggcaggcgcgcccctggaggatgaggccactctgggccagtgcggggtggaggccctgactaccctggaagtagcaggccgcatgcttggaggtaaagtccatggttccctggcccgtgctggaaaagtgagaggtcagactcctaaggtggccaaacaggagaagaagaagaagaagacaggtcgggctaagcggcggatgcagtacaaccggcgctttgtcaacgttgtgcccacctttggcaagaagaagggccccaatgccaactcttaagtcttttgtaattctggctttctctaataaaaaagccacttagttcagtcatc

SEQ ID NO: 122898 - DNA, 697 bp, Artificial Sequence
  derived and/or modified sequence
cttgtagcaggttggctgcggggtcagaaggcgcggggggaaccgaagaacggggcctgctccgtggccctgctccagtccctatccgaactccttgggaggcctggccttccccacgtgagccgccgcgaccaccatcccgtcgcgatcgtttctggaccgctttccactcccaaatctcctttatcccagagcatttcttggcttctcttacaagccgtcttttctttactcagtcgccaatatgcagctctttgtccgcgcccaggagctacacaccttcgaggtgaccggccaggaaacggtcgcccagatcaaggctcatgtagcctcactggagggcattgccccggaagatcaagtcgtgctcctggcaggcgcgcccctggaggatgaggccactctgggccagtgcggggtggaggccctgactaccctggaagtagcaggccgcatgcttggaggtaaagtccatggttccctggcccgtgctggaaaagtgagaggtcagactcctaaggtggccaaacaggagaagaagaagaagaagacaggtcgggctaagcggcggatgcagtacaaccggcgctttgtcaacgttgtgcccacctttggcaagaagaagggccccaatgccaactcttaagtcttttgtaattctggctttctctaataaaaaagccacttagttcagtca

SEQ ID NO: 122899 - DNA, 264 bp, Artificial Sequence
  derived and/or modified sequence
atgcagctcttcgtcagggctcaggagctgcataccttcgaggtgactggacaggagactgttgcccagatcaaggcccatgtggcatctctcgaaggtatagcccccgaggatcaggtggttcttcttgccggagcgcctctagaagacgaagctaccttgggacagtgcggcgttgaagctctaacgactttggaggtcgctggaagaatgctcggcggcggccagaccggagaagaggaggaggaggatagatcaggctag

SEQ ID NO: 122900 - DNA, 228 bp, Artificial Sequence
  derived and/or modified sequence
atgcaactgttcgtacgggcccaggagctgcacaccttcgaagttaccgggcaggaaactgttgcgcagataaaagcgcacgtggcttccctggaaggaatcgctcctgaggatcaggtcgttctgttagccggcgcacccttagaagacgaggccactctgggtcagtgcggggtcgaggcgttgactaccttagaggtcgcaggccgtatgcttggcggtgagtag

SEQ ID NO: 122901 - DNA, 297 bp, Artificial Sequence
  derived and/or modified sequence
atgcagctgttcgtgcgggctcaggaattacacaccttcgaggtaacgggccaggagaccgtcgcccaaataaaggccctgactactctggaggtggccggcagaatgttaggtgggaaggtgcacggttcactggctagagcggggaaagtcagaggacagacaccaaaagtagccaagcaggagaagaagaaaaagaagacaggcagagccaaaagacgaatgcagtataatcggcgctttgtgaatgttgtgcctaccttcggcaagaagaagggtccaaatgccaacagctag

SEQ ID NO: 122902 - DNA, 330 bp, Artificial Sequence
  derived and/or modified sequence
atgcaattatttgtgcgcgctcaggagctgcacacgttcgaggtcacaggtcaggagaccgtcgctcaaattaaggctcatgtggcttcactcgaggggattgcacccgaagaccaggtcgtgctgttggccggcgcacccctcgaagatgaggcaaccttaggccagtgcggagtggaagcactgacaaccttagaggtcgctggcagaatgttgggtggcaaagtccacggcagcttggccagagctggcaaggtccgtggccagacccctaaggtcgccaagcaggagaagaaaaagaagaagacaggccgagctaagaggagatag

SEQ ID NO: 122903 - DNA, 402 bp, Artificial Sequence
  derived and/or modified sequence
atgcagctcttcgtgagggcccaggaacttcatacgttcgaagtgaccggacaggagacagtcgcgcagattaaagcacacgtcgctagcctagagggaattgctcctgaggatcaggttgtcctgttagccggagcacccctggaggatgaagcgactctgggtcagtgtggcgtggaagccctgaccaccttggaagtggctggtaggatgctgggaggtaaggttcatggttcacttgcccgggctggtaaagtgcggggtcagacaccaaaggtcgccaagcaggagaaaaaaaaaaagaaaacgggtcgagccaagaggcgtatgcagtacaacaggagatttgtaaatgtggtgccaacctttgggaagaagaaaggacccaacgctaatagctag

SEQ ID NO: 122904 - DNA, 228 bp, Artificial Sequence
  derived and/or modified sequence
atgcaactcttcgtgcgggcacaggagctgcacacttttgaggtgacagggcaagaaacagttgctcagatcaaagcgcatgttgcaagtcttgagggtattgcacctgaggatcaagttgtcctgcttgctggtgccccgttggaggatgaagccactctgggtcagtgtggcgtcgaagccctcaccaccctggaagtcgctggcagaatgctcgggggggagtag

SEQ ID NO: 122905 - DNA, 402 bp, Artificial Sequence
  derived and/or modified sequence
atgcagctgttcgtgagagcccaggaactgcacactttcgaggttacaggacaagagacagtcgctcagattaaggcacatgttgcctctctggagggaattgcgcctgaagatcaggtggtgctgctggccggggccccgttggaagatgaggctaccttaggccagtgtggggtggaggcgctgaccacactggaagtcgcaggcagaatgttggggggtaaagtacacggatcactggcacgcgcggggaaggtaaggggacagacacccaaagtagctaaacaggagaagaagaaaaaaaaaacaggtagggccaagcgcaggatgcagtataaccgtcgcttcgtgaatgtcgtccccacctttggaaaaaagaaaggaccaaatgcaaactcttag

SEQ ID NO: 122906 - DNA, 402 bp, Artificial Sequence
  derived and/or modified sequence
atgcagctgttcgtgagggctcaagagctgcacacgttcgaggttacaggccaggagacggtggctcagattaaggcccacgtcgcctcattggagggcatagcccctgaggaccaggtagtcctgctggctggggctcccctggaggacgaggccactctgggccagtgcggggtcgaagctctcacgactttggaggttgccggtcgtatgctcggcggcaaggtgcacgggtctttagctcgggctggcaaggtccggggtcagaccccgaaagtagcaaagcaagaaaagaagaagaaaaaaaccggcagagcgaaaaggcgtatgcagtataatcggcgctttgtgaatgtggtgcccacatttggcaagaagaagggcccgaatgccaactcctag

SEQ ID NO: 122907 - DNA, 264 bp, Artificial Sequence
  derived and/or modified sequence
atgcagctgtttgtgcgggcccaggagctgcacacctttgaggtgacaggccaggagaccgtggcccagatcaaggcccacgtggccagcctggagggcatcgcccctgaggaccaggtggtgctgctggccggggcccccctggaggatgaggccaccctgggccagtgtggggtggaggccctgaccaccctggaggtggccggccgcatgctgggcggcggccagacaggagaggaggaggaggaggacaggagcggctag

SEQ ID NO: 122908 - DNA, 228 bp, Artificial Sequence
  derived and/or modified sequence
atgcagctgtttgtgcgggcccaggagctgcacacctttgaggtgacaggccaggagaccgtggcccagatcaaggcccacgtggccagcctggagggcatcgcccctgaggaccaggtggtgctgctggccggggcccccctggaggatgaggccaccctgggccagtgtggggtggaggccctgaccaccctggaggtggccggccgcatgctgggcggggagtag

SEQ ID NO: 122909 - DNA, 297 bp, Artificial Sequence
  derived and/or modified sequence
atgcagctgtttgtgcgggcccaggagctgcacacctttgaggtgacaggccaggagaccgtggcccagatcaaggccctgaccaccctggaggtggccggccgcatgctgggcggcaaggtgcacggcagcctggcccgggccggcaaggtgcggggccagacccccaaggtggccaagcaggagaagaagaagaagaagacaggccgggccaagaggaggatgcagtacaacagaagatttgtgaatgtggtgcccaccttcggcaagaagaagggccccaatgccaacagctag

SEQ ID NO: 122910 - DNA, 330 bp, Artificial Sequence
  derived and/or modified sequence
atgcagctgtttgtgcgggcccaggagctgcacacctttgaggtgacaggccaggagaccgtggcccagatcaaggcccacgtggccagcctggagggcatcgcccctgaggaccaggtggtgctgctggccggggcccccctggaggatgaggccaccctgggccagtgtggggtggaggccctgaccaccctggaggtggccggccgcatgctgggcggcaaggtgcacggcagcctggcccgggccggcaaggtgcggggccagacccccaaggtggccaagcaggagaagaagaagaagaagacaggccgggccaagagaagatag

SEQ ID NO: 122911 - DNA, 402 bp, Artificial Sequence
  derived and/or modified sequence
atgcagctgtttgtgcgggcccaggagctgcacacctttgaggtgacaggccaggagaccgtggcccagatcaaggcccacgtggccagcctggagggcatcgcccctgaggaccaggtggtgctgctggccggggcccccctggaggatgaggccaccctgggccagtgtggggtggaggccctgaccaccctggaggtggccggccgcatgctgggcggcaaggtgcacggcagcctggcccgggccggcaaggtgcggggccagacccccaaggtggccaagcaggagaagaagaagaagaagacaggccgggccaagaggaggatgcagtacaacagaagatttgtgaatgtggtgcccaccttcggcaagaagaagggccccaatgccaacagctag

SEQ ID NO: 122912 - DNA, 264 bp, Artificial Sequence
  derived and/or modified sequence
atgcagctgttcgtgcgggcccaggagctgcacaccttcgaggtgaccggacaggaaaccgtggcccagattaaggcccatgtggcatctctggagggtatcgcgccggaagatcaggtggtccttctggctggtgctcccctcgaggacgaggcgacactgggccagtgtggggtggaggcccttacaacattggaggtcgcagggagaatgttaggagggggccagacgggggaggaggaagaggaagaccgcagcggttag

SEQ ID NO: 122913 - DNA, 228 bp, Artificial Sequence
  derived and/or modified sequence
atgcagctgttcgtgcgggcccaggagctgcacaccttcgaggtgacaggccaggagactgtggcccaaatcaaagcccacgtggcatcactggaaggtatcgcaccagaggaccaggtcgttttgctggcgggagcgccattagaagatgaagctactctgggccagtgtggagtggaggcactaacgacactggaagtcgctggccgcatgctcgggggcgagtag

SEQ ID NO: 122914 - DNA, 297 bp, Artificial Sequence
  derived and/or modified sequence
atgcagctgttcgtgcgggcccaggagctgcacaccttcgaggtgactggtcaggaaacagtggcacagatcaaagcgttgaccaccctggaggtagctggcagaatgctgggaggaaaagtgcacggatcccttgctagagctgggaaagtccgtggacagacccctaaggttgctaagcaggaaaagaaaaagaaaaagaccgggagagcgaaacgtagaatgcagtacaacaggcgcttcgttaacgtggtcccaactttcggcaagaaaaaggggcccaacgccaatagctag

SEQ ID NO: 122915 - DNA, 330 bp, Artificial Sequence
  derived and/or modified sequence
atgcagctgttcgtgcgggcccaggagctgcacaccttcgaggtgaccgggcaggaaacagtggcacagatcaaggcccacgtggcaagccttgagggcatcgccccagaagaccaagttgttctcctggccggtgccccactggaggatgaagccactttgggccagtgcggtgtcgaggctctgaccacactagaggttgcaggaagaatgctcggcggaaaagtgcacggctctctggcacgtgcggggaaggttagaggccagacccctaaagtcgccaagcaggaaaagaagaagaagaagaccggaagagccaagcgtcggtag

SEQ ID NO: 122916 - DNA, 402 bp, Artificial Sequence
  derived and/or modified sequence
atgcagctgttcgtgcgggcccaggagctgcacaccttcgaggtgacaggccaggagaccgtggcacagatcaaggcacacgtggcctctctggagggcattgcaccagaagatcaggtggtcctcctggccggcgcccctctggaggacgaggccaccctgggccagtgcggggtggaagccctgacgacactggaagtcgcaggccgaatgttgggaggtaaagtgcatggcagtctggctcgagcggggaaagtcagaggacaaacacccaaagtcgccaagcaagagaaaaagaaaaagaagactggacgagccaaacgtaggatgcagtataatcgaagattcgtcaacgtcgtacccacattcgggaagaagaaagggccaaacgcgaatagctag

SEQ ID NO: 122917 - DNA, 228 bp, Artificial Sequence
  derived and/or modified sequence
atgcagctgttcgtgcgggcccaggagctgcacaccttcgaggtgacagggcaggagaccgttgctcagattaaggctcacgtggccagccttgaaggaattgcccccgaagaccaggttgtccttctggccggcgcccccttggaagatgaagctaccctggggcagtgcggcgtggaggccctgacaactctggaagtcgcaggtagaatgctgggcggtgaatag

SEQ ID NO: 122918 - DNA, 402 bp, Artificial Sequence
  derived and/or modified sequence
atgcagctgttcgtgcgggcccaggagctgcacaccttcgaggtgactggccaggaaaccgtagcacaaatcaaagcccacgtagcctcactcgaaggcatagcacctgaggaccaagtcgtgctgctggctggcgctccactggaagacgaggccactctgggacagtgcggtgtagaagctttaacgaccttggaggtggccggtcggatgctgggaggaaaggtgcatggcagtctagccagggctggaaaggttagaggccaaaccccaaaggttgccaagcaggagaagaagaagaagaagactggaagagccaagcggcgaatgcaatacaacaggcggtttgtcaatgtggtcccaacctttgggaagaagaagggcccaaacgcgaactcttag

SEQ ID NO: 122919 - DNA, 402 bp, Artificial Sequence
  derived and/or modified sequence
atgcagctgttcgtgcgggcccaggagctgcacaccttcgaggtgactgggcaggaaaccgttgcacagattaaagcacatgtagcatccctggagggtattgcacctgaggaccaggtggttctgctggcgggggcccccctggaagatgaggcaacccttgggcaatgcggtgtggaggccttaaccacactcgaagttgctggccggatgttgggaggaaaggtgcacggaagtctggcgagagcagggaaggtgcgcggccaaacacctaaagtcgcaaagcaagaaaagaaaaagaaaaagacaggccgggcgaaacggagaatgcagtacaatcggcgttttgtgaacgtagtccccacattcggaaagaagaaagggcccaacgcaaatagttag

SEQ ID NO: 122920 - DNA, 264 bp, Artificial Sequence
  derived and/or modified sequence
atgcagctctttgtacgggcacaagaattgcatacattcgaggttacaggccaggagactgtggcgcagatcaaagcacacgtggcctctttggagggcattgctccagaagatcaggtcgtgctacttgctggcgctccgttagaggacgaagccaccttgggtcagtgtggcgtcgaagctcttactactctagaagtggctggaaggatgctgggagggggacagaccggggaggaagaggaagaagataggtcaggttag

SEQ ID NO: 122921 - DNA, 228 bp, Artificial Sequence
  derived and/or modified sequence
atgcagttgtttgtgcgagctcaggagttgcacacatttgaggttactgggcaggaaacggttgcacagataaaggctcacgtggcatctctcgaaggtatcgctcctgaggaccaggtcgtcctcctggccggtgctcctttggaggatgaggcaaccctcgggcagtgcggtgtagaagcgcttaccaccctggaggtggcagggagaatgctcggaggggaatag

SEQ ID NO: 122922 - DNA, 297 bp, Artificial Sequence
  derived and/or modified sequence
atgcaactgtttgttagggcccaggagttgcacacctttgaggtgacaggccaggagacggtggcacagatcaaggccctgactacactcgaggtcgcaggcaggatgttgggcggaaaagtgcatggcagtctcgcacgtgccggaaaggtgagaggacagacaccgaaggtggcaaagcaagaaaaaaagaagaaaaagactgggagggctaaacggcgaatgcagtacaaccggaggttcgttaacgtggtgccaaccttcgggaagaaaaagggcccaaatgctaattcatag

SEQ ID NO: 122923 - DNA, 330 bp, Artificial Sequence
  derived and/or modified sequence
atgcagctgtttgtgcgcgctcaggagctgcacacattcgaagtgactggccaggagaccgtcgctcagattaaagcgcatgtggcgagcctggaaggaattgctcccgaggaccaggtcgtcctgctcgccggagctccactggaggatgaggccactctgggacagtgcggggtggaggctcttaccactctggaggtggcagggcgtatgcttgggggtaaggtgcacggcagtctcgcccgtgcagggaaggtgagagggcagacgccaaaagttgcaaaacaggaaaagaagaagaaaaagacgggacgagcaaaacggaggtag

SEQ ID NO: 122924 - DNA, 402 bp, Artificial Sequence
  derived and/or modified sequence
atgcagctgttcgttcgcgcacaagagctccacaccttcgaagtgactgggcaggaaaccgtggcccaaataaaagcacacgtcgcgagtctggaaggcatcgcgcctgaagaccaggtggtcctactcgctggtgccccactcgaagacgaagcaactctcggacaatgtggggtggaggccctcacgactctagaggtcgccggaaggatgctgggcggaaaagtgcacgggtctctggctcgcgcaggcaaggtgcggggtcagacgcctaaagttgccaagcaggagaaaaaaaagaagaagaccgggagggccaaaagaaggatgcaatacaaccgacggtttgttaacgtggtccctacattcggcaaaaagaaaggcccaaatgcgaactcttag

SEQ ID NO: 122925 - DNA, 228 bp, Artificial Sequence
  derived and/or modified sequence
atgcagctgttcgttcgagcgcaggagctccacaccttcgaagtgaccggacaagaaaccgtggcacagatcaaggcacatgttgcgtctctggaaggcatagccccagaagaccaggtggtgctgctggccggagctcccttggaagatgaggcaaccctcggccagtgcggagttgaagccctcacaaccctggaggttgccggacgcatgctgggaggggagtag

SEQ ID NO: 122926 - DNA, 402 bp, Artificial Sequence
  derived and/or modified sequence
atgcagctctttgtcagagcccaggaactgcacacttttgaagttacaggacaagagaccgtggcccagataaaagcacacgtggcctcactagaaggcatagcaccggaggatcaggttgtcctgctggcaggagcacctctggaggacgaggcaacattgggccaatgcggggtcgaggccttgaccacacttgaggtggctggccgaatgctcggaggtaaggtgcatggcagtcttgcacgcgctggcaaggtgaggggccagacccccaaggtggcgaagcaggagaaaaaaaaaaagaaaactgggagggcaaagcgtagaatgcagtacaaccgaaggtttgtgaacgttgtgccaacctttggaaagaagaagggacctaatgctaattcatag

SEQ ID NO: 122927 - DNA, 402 bp, Artificial Sequence
  derived and/or modified sequence
atgcaactgttcgtccgggctcaggagcttcacaccttcgaagtgaccggccaggagacggttgcccagattaaggcacacgtggcttccttggaagggattgcccctgaagaccaggtcgtgttgctagccggagcccctctcgaggatgaggcgactctcgggcaatgcggcgtggaagcacttactaccctggaggtggctggaagaatgctgggcggtaaggtgcacgggtcactggccagggctggcaaggttagagggcagacacccaaagtggcaaaacaggagaagaaaaagaagaagactggacgcgctaagagaagaatgcagtataatagaagatttgtaaacgtggtccccactttcggaaaaaagaagggacccaatgcaaactcttag

SEQ ID NO: 122928 - DNA, 264 bp, Artificial Sequence
  derived and/or modified sequence
atgcagctgttcgtgagagcccaggagctgcacaccttcgaggtgaccggccaggagaccgtggcccagatcaaggcccacgtggccagcctggagggcatcgcccccgaggaccaggtggtgctgctggccggcgcccccctggaggacgaggccaccctgggccagtgcggcgtggaggccctgaccaccctggaggtggccggcagaatgctgggcggcggccagaccggcgaggaggaggaggaggacagaagcggctag

SEQ ID NO: 122929 - DNA, 228 bp, Artificial Sequence
  derived and/or modified sequence
atgcagctgttcgtgagagcccaggagctgcacaccttcgaggtgaccggccaggagaccgtggcccagatcaaggcccacgtggccagcctggagggcatcgcccccgaggaccaggtggtgctgctggccggcgcccccctggaggacgaggccaccctgggccagtgcggcgtggaggccctgaccaccctggaggtggccggcagaatgctgggcggcgagtag

SEQ ID NO: 122930 - DNA, 297 bp, Artificial Sequence
  derived and/or modified sequence
atgcagctgttcgtgagagcccaggagctgcacaccttcgaggtgaccggccaggagaccgtggcccagatcaaggccctgaccaccctggaggtggccggcagaatgctgggcggcaaggtgcacggcagcctggccagagccggcaaggtgagaggccagacccccaaggtggccaagcaggagaagaagaagaagaagaccggcagagccaagagaagaatgcagtacaacagaagattcgtgaacgtggtgcccaccttcggcaagaagaagggccccaacgccaacagctag

SEQ ID NO: 122931 - DNA, 330 bp, Artificial Sequence
  derived and/or modified sequence
atgcagctgttcgtgagagcccaggagctgcacaccttcgaggtgaccggccaggagaccgtggcccagatcaaggcccacgtggccagcctggagggcatcgcccccgaggaccaggtggtgctgctggccggcgcccccctggaggacgaggccaccctgggccagtgcggcgtggaggccctgaccaccctggaggtggccggcagaatgctgggcggcaaggtgcacggcagcctggccagagccggcaaggtgagaggccagacccccaaggtggccaagcaggagaagaagaagaagaagaccggcagagccaagagaagatag

SEQ ID NO: 122932 - DNA, 402 bp, Artificial Sequence
  derived and/or modified sequence
atgcagctgttcgtgagagcccaggagctgcacaccttcgaggtgaccggccaggagaccgtggcccagatcaaggcccacgtggccagcctggagggcatcgcccccgaggaccaggtggtgctgctggccggcgcccccctggaggacgaggccaccctgggccagtgcggcgtggaggccctgaccaccctggaggtggccggcagaatgctgggcggcaaggtgcacggcagcctggccagagccggcaaggtgagaggccagacccccaaggtggccaagcaggagaagaagaagaagaagaccggcagagccaagagaagaatgcagtacaacagaagattcgtgaacgtggtgcccaccttcggcaagaagaagggccccaacgccaacagctag

SEQ ID NO: 122933 - protein, 1184 aa, Artificial Sequence
  derived and/or modified sequence
MVLLWEPAGAWLALGLALALGPSVAAAAPRQDCTGVECPPLENCIEEALEPGACCATCVQQGCACEGYQYYDCLQGGFVRGRVPAGQSYFVDFGSTECSCPPGGGKISCQFMLCPELPPNCIEAVVVADSCPQCGQVGCVHAGHKYAAGHTVHLPPCRACHCPDAGGELICYQLPGCHGNFSDAEEGDPERHYEDPYSYDQEVAEVEAATALGGEVQAGAVQAGAGGPPAALGGGSQPLSTIQAPPWPAVLPRPTAAAALGPPAPVQAKARRVTEDSEEEEEEEEEREEMAVTEQLAAGGHRGLDGLPTTAPAGPSLPIQEERAEAGARAEAGARPEENLILDAQATSRSTGPEGVTHAPSLGKAALVPTQAVPGSPRDPVKPSPHNILSTSLPDAAWIPPTREVPRKPQVLPHSHVEEDTDPNSVHSIPRSSPEGSTKDLIETCCAAGQQWAIDNDECLEIPESGTEDNVCRTAQRHCCVSYLQEKSCMAGVLGAKEGETCGAEDNDSCGISLYKQCCDCCGLGLRVRAEGQSCESNPNLGYPCNHVMLSCCEGEEPLIVPEVRRPPEPAAAPRRVSEAEMAGREALSLGTEAELPNSLPGDDQDECLLLPGELCQHLCINTVGSYHCACFPGFSLQDDGRTCRPEGHPPQPEAPQEPALKSEFSQVASNTIPLPLPQPNTCKDNGPCKQVCSTVGGSAICSCFPGYAIMADGVSCEDINECVTDLHTCSRGEHCVNTLGSFHCYKALTCEPGYALKDGECEDVDECAMGTHTCQPGFLCQNTKGSFYCQARQRCMDGFLQDPEGNCVDINECTSLSEPCRPGFSCINTVGSYTCQRNPLICARGYHASDDGTKCVDVNECETGVHRCGEGQVCHNLPGSYRCDCKAGFQRDAFGRGCIDVNECWASPGRLCQHTCENTLGSYRCSCASGFLLAADGKRCEDVNECEAQRCSQECANIYGSYQCYCRQGYQLAEDGHTCTDIDECAQGAGILCTFRCLNVPGSYQCACPEQGYTMTANGRSCKDVDECALGTHNCSEAETCHNIQGSFRCLRFECPPNYVQVSKTKCERTTCHDFLECQNSPARITHYQLNFQTGLLVPAHIFRIGPAPAFTGDTIALNIIKGNEEGYFGTRRLNAYTGVVYLQRAVLEPRDFALDVEMKLWRQGSVTTFLAKMHIFFTTFAL
